United States Patent Application Publication US 2024/0327476 A1 - sequence listing, part 113

SEQ ID NO: 215707 - DNA, 3381 bp, synthetic construct
  misc_feature 1..3381: note = Description of Artificial Sequence: Synthetic coding sequence
  source 1..3381: mol_type = other DNA
atggagcccaacgattccactagtaccgccgtggaagagccagactcactagaggtcctggttaaaactcttgattctcagacaagaaccttcatcgtcggtgcccagatgaacgtcaaagagtttaaggagcacatcgcggcttcagtctccatcccttcggagaagcagagattgatttatcagggacgggtgctgcaagacgacaaaaagcttcaggagtataacgtcggcggaaaagttattcacctagtggagcgcgcaccacctcagacacacctcccttcgggcgcatcttctgggaccgggagcgcatcggcaacacatgggggaggcagccctccagggacacgtgggccaggcgcaagcgtgcatgacagaaacgccaatagttatgttatggtgggaactttcaatctgccctctgatggctccgctgtcgatgtgcacattaacatggaacaggcacccattcagtctgaaccgcgagtgcgactggtgatggcccaacacatgatccgcgatatccagaccttgctcagtcggatggaatgtcgtggcggaccacaacctcagcattctcagccacccccacaaccaccagctgtgacaccagaacccgtcgctctgtcatcgcagacatccgagcccgttgaaagcgaagcccctccacgagagccaatggaagccgaagaagtcgaggaacgggcaccagcacagaaccctgagctcaccccaggccctgccccagccggtcccacacctgcccctgagactaatgctcctaaccatccgtcccccgctgagtatgtggaagtcctgcaggaactgcagcgcctcgaatccaggcttcagccctttctgcaaaggtactacgaagtgttaggtgccgctgcgacaactgactataataacaatcatgaaggcagagaggaggatcagcggctaatcaacctggtaggcgagtccctgagactcctcgggaatacttttgtggcgctgtcagacctgagatgtaatctagcttgcactccccctcggcatctgcacgtggttcgcccaatgtcacactacacaactcctatggtcctgcagcaagccgctattccaatccagataaacgtgggcactaccgtcactatgaccggcaatgggacaagacctccccctacaccaaatgcagaggctccacccccaggtcccggtcaagcgtcaagtgtagctccctctagtaccaatgtggagagttctgctgaaggcgcacctcctcctggccctgcccctccgccagccacttcacaccccagggtaataaggatatctcatcagtcggtggagcctgtggtgatgatgcacatgaacatccaggattccggaacacaacccggaggggtccctagcgctcctacagggccactggggccacctggtcatggtcagaccttgggccagcaggtgcctggctttccgacagcacccactcgggtggtgatcgcccgtcccacacctccacaagctcgccctagccatccaggtggccctccagtcagtgggacgcttcaaggagccggtcttggaaccaacgcctctctggcccaaatggtcagtggcctggttggtcagttgcttatgcagcctgtcctcgttgcccaggggacccccggaatggccccacccccagcacccgcaactgcctccgccagcgccggaaccacaaatacggctacaactgcagggcctgctccgggaggcccagctcagccaccacccactccacaaccatcgatggcggatctccagttctcgcagctgctgggcaacctactggggccagcaggtcccggagctggaggcccaggagtggcaagcccaaccatcacagtggccatgcctggagttcccgcattcctgcagggcatgacagattttctgcaggccacacaaacggcgcctccacccccaccgccacctcctccacccccacctgccccagagcagcagactatgccaccacctggaagcccgtcaggaggtgccggatcacctggagggctgggcctcgagagtctgagccctgaatttttcacttccgtggtacagggcgtactctcaagcctgttagggtccctcggggcaagagctggctcaagtgagtccattgcggcattcatccaaagactgagcgggagcagcaacattttcgaacccggtgcagacggggctcttggattcttcggggcactgctatctctgctctgccaaaatttctcgatggttgacgtggtgatgctgctacatggccactttcaacccctgcagcgtttacaaccacagcttcgatcattcttccatcagcattacctagggggacaggaaccgacaccgtccaacatcagaatggcgacacacacactgatcacaggtttagaagagtatgtacgagagtccttctccctcgtgcaggtccagcccggagtagacattataagaactaacctggagtttctccaagaacagttcaactcgattgccgctcatgtactgcactgcaccgacagtggtttcggtgccagactcttagaactctgcaaccagggcttgtttgagtgtctcgcactgaacctgcattgcctgggtggtcagcagatggaactggcagcggtcattaatggtcggattcgcaggatgtccagaggagtgaacccgtccctggtgagctggctgacaacaatgatgggcctgagactgcaggtggtcctggagcacatgcccgtggggccagacgctattctgcgctacgtgcgacgggttggtgatcccccacagcctctcccagaggagcccatggaggtacaaggcgctgaaagagcgtcccccgagccccaaagagaaaacgcatcccccgcacctgggaccacagccgaagaagccatgtcccgaggccctccacccgctcccgagggtgggagcagggatgagcaagacggcgcaagcgcggagactgagccctgggccgctgccgttccaccagagtgggtgcctatcattcagcaggacattcaatctcagcggaaggtgaagccacagcccccactgagtgatgcctatctgtcaggaatgcccgctaaaaggagaaagactatgcagggagagggaccacagctcctattatccgaggctgtctccagagccgcaaaggccgctggggcaagacctctgacgagccccgaaagcctcagtagagacctcgaggctcctgaggtgcaggaatcttaccgccagcagttgcggtcagatatccagaagaggctccaggaggacccgaattactcaccccagaggtttcccaacgcccaaagagcttttgccgacgacccatag

SEQ ID NO: 215708 - DNA, 648 bp, synthetic construct
  misc_feature 1..648: note = Description of Artificial Sequence: Synthetic coding sequence
  source 1..648: mol_type = other DNA
atggagcccaatgactccacatctactgccgtagaggagcctgactcgctggaagtgctggtgaaaacattggattctcagacccgcacattcatcgtgggcgctcagatgaacgttaaggagtttaaggaacacattgccgcttctgtgtccataccatcagagaaacaaaggttgatctatcagggaagagtcttgcaggacgataagaagctgcaggagtacaatgtcggcggaaaggtgatccaccttgtagaacgagcgcctcctcagacgcacttgccatccggtgcctcctccggcacgggctccgcatctgccacacatggcggaggaagtccacccggtaccaggggacctggggctagcgtgcatgatcgcaatgcaaacagttatgtcatggtcggtaccttcaaccttccatctgaacctcgggtgagactggtgatggcgcagcacatgattcgcgatattcaaaccctgttgtcacgtatggaatgccgcggaggtccccagccacaacactcccagcctccacctcagccgcctgcagtgacaccggaacccgttgcattatcatcacagacctccgaacccgtggaaagcgaggcacctccacgtgaacctatggaggcagaggaggtctag

SEQ ID NO: 215709 - DNA, 789 bp, synthetic construct
  misc_feature 1..789: note = Description of Artificial Sequence: Synthetic coding sequence
  source 1..789: mol_type = other DNA
atggaaccaaatgacagtacctccactgctgtcgaagaacctgattccctggaggtgttggtgaagacattagacagtcaaaccagaacgttcatcgttggagcacagatgaacgtaaaggaattcaaggaacacattgccgcatccgtttccattccatccgaaaaacagcggcttatctaccagggcagggtcctgcaagacgacaagaagctgcaggagtacaatgtcggcggtaaggttatccaccttgtggagcgagctcccccacagactcacctccccagtggtgccagttccggcaccggctccgcgagcgcaactcatggagggggaagtccgccagggacacgtgggcctggtgcaagcgtgcatgaccgaaatgccaatagttacgttatggtcggcactttcaacctcccatccgatggctccgccgtggatgttcatatcaacatggaacaggccccaattcagagcgaaccgagggtgcgactggttatggcacagcacatgatcagagacattcagacgctcttaagccggatggagtgtcgcggaggcccacagccacagcattcccaaccccctccccagccgcctgcagtgacccctgagcccgtggccttgtcaagtcagacctctgagcccgtcgaatccgaggctcctccgagagagcccatggaagctgaagaggtcgaggaaagagcacccgctcagaatccagaactgaccccaggtccggctcccgcaggtcctacacccgcacctgaaacgaacgctccttag

SEQ ID NO: 215710 - DNA, 2232 bp, synthetic construct
  misc_feature 1..2232: note = Description of Artificial Sequence: Synthetic coding sequence
  source 1..2232: mol_type = other DNA
atggagcctaatgactcgacatccaccgcggtggaagagcccgacagcctagaggtgctagtgaaaactcttgactcccagactaggaccttcatagtgggagcacagatgaacgtgaaggaattcaaagagcacatcgccgcaagtgtctctattccaagtgaaaagcagcgtcttatctatcagggaagagttctccaggatgacaagaaattgcaagagtataatgtgggcggaaaagtgatacacctggtagagagggccccaccccagactcatctccctagcggtgcttcaagcggaactggctccgcatctgccacccatggtggagggtcgccacctggaaccagaggcccaggggcttccgtccacgatagaaatgccaattcttatgtgatggtcggaactttcaatctgccaagtgacggatccgccgtggatgtgcatattaatatggaacaggctcctatccagtccgaacccagggtccggcttgtgatggctcagcatatgattagagatatccagacactcctctctagaatggaatgcaggggaggccctcagccacaacacagccagcccccaccccagccacctgctgttactcccgaacctgtcgcactcagtagtcaaacgtctgagcccgtggagagcgaggcccctcccagagagcccatggaggccgaagaggtggaagagagggcccctgctcagaatcccgagctgaccccaggccctgcgccagcgggtccgaccccagctccagaaacaaacgccccaaaccatccgtccccagcagagtatgtcgaagtcctccaggaattgcagcgcctcgaaagtcgcctgcagccattcctgcaaagatactatgaggtgctaggcgctgcggctacaactgattacaacaacaatcacgagggtagagaggaggatcagcggcttatcaatttggtgggggaatctctgagattgcttggaaatacattcgtcgcccttagtgacctcaggtgcaatttggcctgcacacctccgcgtcacttacacgtggttcgccctatgtcacattataccacaccaatggtgttgcagcaagccgctatccctattcagattaatgttggcaccacggttactatgacaggcaacgggacacggcctcccccaactcctaatgccgaggctcccccaccaggccctgggcaggcctcgtcagtggcgccaagttccacaaacgttgaatcttccgcagaaggggctcctccccctggtccggctcctccacctgccacgagtcacccccgagttattcgaatctcacatcagtctgttgagcccgtggtaatgatgcacatgaacatacaggactctggcacgcagcctgggggagtgccctctgcacctaccggtcctttgggtccacctgggcatggtcaaactctaggatccactctgattcagctgccctcccttccgcctgagttcatgcacgccgtcgcccaccaaattacccaccaggcaatggttgcggctgtggccagcgcagctgccggacagcaagtgcctggattcccaacggcccctactagggtggtcatcgcccgtccaacaccgccacaagctcgcccaagtcaccccggaggacctccggtttcaggcaccctccagggagctggcctcgggacaaatgcaagtttggctcagatggtctccggacttgtagggcagctgcttatgcagcccgtcctcgttgcccaggggacccccggaatggctccaccccctgcgccagcgacagcgagtgcctcagctgggaccactaatacggctacaaccgccggtccagcacccggaggcccagcacagcccccacctacaccgcagccaagcatggcggacctgcagttttcacagctgcttggaaacctgctgggccctgcagggcctggcgctggcggtcccggagttgcaagtccaaccattactgtagccatgcctggagttccagccttcttgcagggtatgactgatttcctgcaggcaacccagactgccccaccgccaccccctccccctccacctcctcctcctgctccggaacagcagaccatgccccctcctggatcccctagcggtggtgccggtagtccaggtggcttgggattggaaagccttagtcccgagtttttcacttctgtggtgcagggagtactctcttccctgctctag

SEQ ID NO: 215711 - DNA, 3381 bp, synthetic construct
  misc_feature 1..3381: note = Description of Artificial Sequence: Synthetic coding sequence
  source 1..3381: mol_type = other DNA
atggaaccgaatgacagtacctcaacggctgtcgaagagccggacagcctggaggtgctcgtcaaaaccctggacagccagactcgcactttcattgtgggcgcacagatgaacgtcaaagaatttaaagaacacatagctgcctccgtgtcgatccctagcgaaaagcagcggttgatctatcagggcagggtactccaggatgacaaaaaattacaggagtacaacgtggggggaaaagtgattcacttggtggaacgggctccaccgcagacccatctcccttccggggctagtagtggaactggctcagcctccgccactcacggtggaggatctcctcccggaacccgaggccctggcgcaagcgtgcatgatagaaacgccaatagctatgttatggtgggaacttttaaccttccatcggacgggagcgcagtggatgtccatataaatatggagcaagcccctattcaatcggaacctagagtacggttagtgatggcacaacatatgatccgggacatccagaccctgctcagccgcatggagtgtagagggggtcctcagccacagcactcccagccaccacctcagccccctgcggtcaccccggaacccgttgcactctcatctcagacctcggagccagttgaatccgaagctccccctcgcgaacccatggaagccgaggaggtcgaagagcgcgctccggctcagaacccagagctcaccccaggaccagcgcctgcaggcccaactccggcacccgaaactaatgccccaaaccacccctcccccgcagaatacgtcgaagtgctacaggagctacagcgcctggaatcacggttacagccattcctccaaaggtattacgaggtgctcggagcagccgcaaccacggactacaacaacaatcacgagggcagagaggaggatcagcggttgattaatctggtaggggagtcactgaggctgttgggcaacacatttgtagccctctccgatttacgctgcaacctggcatgcactccacctaggcacctgcatgtggtgcgtcctatgagccactacacaacgccaatggtcttgcagcaggcagcgatcccaatccagataaatgttggcaccaccgtgaccatgacaggtaacggcaccagaccaccccctacacccaacgccgaggcgccaccgccaggcccaggccaggcatcctctgtggctccgagtagtactaatgtggaaagctctgccgaaggcgctccccctcccggaccggcaccgccacctgctacaagtcatcctagggtcatcaggatttctcatcaatccgttgagcccgtggtgatgatgcatatgaatatccaggactccggaacacagccaggcggagtgccctctgccccaacaggtcccctcggtcctccagggcacggccagaccctgggacaacaggtaccagggttcccaaccgcccctacgagggtcgtaatcgcaagaccaactccacctcaggcccgaccaagccaccctgggggtccacctgtgagtggaacactgcagggcgcaggcctaggcacgaacgccagtctggctcagatggtgagtggcctggtgggacagctgctcatgcagcccgttctcgtggcccagggcactcccggaatggctccacctcctgcccctgccactgccagcgccagcgctggtacaacaaatacagcgacaactgcaggccctgccccaggcggacccgctcaacctcccccaactccccagccatctatggccgacttacagttctctcaactcctgggaaacctactgggacccgcaggcccaggcgctggaggcccaggtgtcgcatctcccaccataacagtcgcgatgccgggagtccccgcattcctgcagggaatgaccgatttcttgcaggccacccagaccgctccccctcctccccctccaccacctcctccccctcccgcaccagaacagcagaccatgccccctccgggtagcccctcaggcggtgccggatcccctggcggtctgggccttgagagcctgagtcctgagtttttcacttcagtggtccaaggagtgctgtcctcattgctgggatctttgggggctcgagctggatctagcgaaagtatcgcagcctttattcagcggctcagcggcagcagcaatatttttgaacccggagccgatggggctctgggattcttcggcgcactgctctcccttctttgtcagaatttttcaatggtggatgtggttatgcttttgcatggacactttcagcctctgcaaagacttcaaccacaactgagaagtttttttcatcaacactatctggggggtcaggagcccacaccctcaaacatccgtatggccactcacaccctgatcacagggttggaggaatacgtgcgcgaatctttttcgttggtgcaagtccaacctggagttgatatcatccggactaatttggaatttctccaggagcagtttaattctatcgccgctcatgtgctgcattgcaccgactccggcttcggcgcaagactgctggagctctgtaaccaaggccttttcgaatgccttgcccttaacctccattgtctgggcggacagcagatggaacttgccgctgtgattaatggacggatcaggaggatgtctagaggcgtcaatccctcacttgtgtcatggctgacaacaatgatgggactccgtctccaagttgtcctggaacatatgccggtcggccctgacgcaattctgaggtatgtgcgcagggtgggcgaccctccacagcctctgcccgaggagcccatggaggtccaaggggctgagcgagcatcacccgagccacagagagagaacgcctctcctgctcccggaacaacggctgaggaggccatgtctaggggcccaccgccagcgccagagggcggttctagagatgagcaggatggggcttctgccgagaccgagccgtgggctgccgcagtccctccagagtgggtgccaataatacaacaagatatacagagtcagaggaaggtgaagccacagccacccctctctgatgcctacctgagcggaatgcctgcaaagaggcgcaagacgatgcagggggaagggccacagctcctactgagcgaggccgtatcaagagccgcaaaggctgcgggtgcaaggcctctgacttcccccgagtccctctctagagacctggaggcgcctgaagtgcaggagtcatatagacagcagctgaggtctgatattcaaaagcgcctacaggaggacccaaactattctccgcaaagattcccaaacgctcagcgggcttttgctgacgatccatag

SEQ ID NO: 215712 - DNA, 3381 bp, synthetic construct
  misc_feature 1..3381: note = Description of Artificial Sequence: Synthetic coding sequence
  source 1..3381: mol_type = other DNA
atggaaccaaacgactccacatctacggccgttgaggagcctgacagcctggaggtgctggtaaaaactctggacagccagacccggaccttcatagtcggcgcacaaatgaacgttaaagagtttaaggaacatattgctgcatctgttagtattccttctgagaagcagcgtttgatctaccaggggagagtcctccaggacgataaaaaattgcaggagtacaatgtggggggaaaagtcatacacctcgtggagagagcacctccacagacacatctgccttcgggtgcttcatccggtacaggcagtgcatctgcgacccatgggggagggagcccacctggtactcgcggtcccggtgcctctgttcacgaccgaaatgctaacagctatgtcatggtgggtactttcaatcttcccagcgacggaagtgctgtcgacgttcacatcaatatggaacaggcacctatccagagtgaaccaagggtgcggctggtgatggctcaacatatgattcgagatattcagacactgttatctaggatggagtgtcggggtggcccacagccccagcactctcagccccctcctcagcctccggctgtgacacccgagcccgtggccctgtcctcccagaccagcgagcctgtcgaaagtgaagcccctcctagagagcctatggaggcggaggaggttgaggaacgggcaccagctcagaaccccgagctcactccagggccagctcctgctgggccaactcctgcaccggaaacgaatgctccgaatcaccccagtcccgcagagtacgtcgaggtgctgcaagagctccagagacttgaaagtaggctgcagccattcctgcagagatactacgaagtgctaggtgcagctgctacaactgactacaacaacaatcatgaggggagagaagaggatcaaaggttgatcaacctggttggggagtccctgagactgctggggaatacatttgtcgcgctctctgatctgagatgtaatttagcctgcacacctcctaggcacttgcatgtagttcgccctatgtcacattacacaactcccatggtcctccagcaggccgcaattcctatccaaatcaacgttgggactacggtgacgatgactggcaacggcacacgcccacccccaacccccaatgccgaggccccaccccctggacccggtcaggcatctagcgtagcaccatcatcgacaaacgtggagtcttctgcggagggtgccccacctcctggcccagcccctcctccggctaccagtcatcctcgggttattagaatcagccatcagagcgtggagcccgtggtcatgatgcatatgaacatacaggatagtggcactcagccagggggagtccccagtgctccgacaggtcctctgggacctcccggacatggacagactttggggcagcaagtgcccggattcccaaccgccccaacacgggtcgttattgcccgacccacacctccgcaggcgagaccttctcaccccggaggccctccagtttctgggactctccagggtgcaggcctaggcacaaacgcaagcctggcccagatggtctccggtctcgttggccagttacttatgcagccggttctggttgctcagggcacccctggaatggcccctccgccagctccagcgaccgccagtgcgtcggctgggacgaccaataccgctaccactgctgggcctgcaccaggtggtcccgctcagccaccccctaccccgcaaccctccatggccgacctgcagttcagccaacttctcggaaatctgttgggtccagcgggaccaggggctggaggacccggagtcgcgtcccctactatcaccgtcgccatgccaggcgtgcccgcatttttgcaagggatgaccgattttttgcaggctacacagaccgcgcctcccccaccccctcccccaccaccacctccacctgcaccggaacagcagactatgccccctccaggttccccatccggaggggctggtagtccaggcggactcggattggaatcattgagcccagagttttttacatcagtcgttcagggagtgctgtccagtctgctgggtagtctcggcgctcgcgcaggctcgagcgagtcgatcgccgcattcatccaacggctgtctgggagctccaatatcttcgagcctggagcagacggtgcacttggatttttcggcgctctgttatccctgttgtgtcagaacttcagcatggtggacgtggttatgctgctccacggtcactttcaacctttacaacggttgcagccacagctcagatcctttttccaccaacactacctgggaggtcaagaacctaccccttctaacattagaatggctacacacaccctgattaccggattagaggaatacgtgagggaatcattctcactcgtgcaggtgcagcccggagtcgatattatccggacaaatctcgaattcctgcaggagcagttcaactccattgctgcccacgtgctgcactgcaccgatagcggctttggtgctagattgttagaactttgcaatcagggtctgtttgaatgcctcgccctgaatctgcactgcttgggcggtcagcagatggaacttgcagccgttattaacggcaggattaggagaatgagccggggtgtgaatccatcactagtgtcctggctgaccactatgatggggctgcgactccaagtcgtgttagagcacatgccagtgggccctgacgccatcctgagatacgtgcggagagtgggagatccgcctcagcctttacccgaagagccaatggaagtgcagggggctgagcgcgcatctcccgagcctcagcgcgagaatgcgtcccccgcacccggaactactgctgaggaagccatgagtcgtgggcctccacccgctcccgagggtggaagccgtgacgagcaggatggagcatccgcggaaacagagccatgggctgctgcggtacccccagaatgggtgcctataatccaacaggacattcagtcccaacgaaaggtcaaaccacagccccctctgtcagacgcgtatctttctgggatgccagccaagagacgtaagacaatgcagggggaagggccacaattgctattgagtgaagcagtctctcgggcagcgaaagctgccggtgcccgtccattgacatccccagaatccctgagccgcgacctcgaagcacctgaggtgcaagagtcctaccgccagcagctgcgcagtgacatccagaaaagactccaagaggatccaaactatagccctcagaggttcccgaacgcccaacgagcgtttgcagatgatccctag

SEQ ID NO: 215713 - DNA, 411 bp, synthetic construct
  misc_feature 1..411: note = Description of Artificial Sequence: Synthetic coding sequence
  source 1..411: mol_type = other DNA
tgacggatgtccagaggggtcaatcccagtctcgtaagctggcttactactatgatgggcctacggttacaggtagtgctcgaacacatgcctgtgggccctgacgctattttgagatatgtccgcagggtgggagatcccccacagcctttgcccgaggagcccatggaagtgcaaggcgctgaacgtgcctctcccgagccccaggagtgggtgccaatcatccagcaggatattcagagtcagcggaaagtcaagccacaaccaccactgtctgatgcctatctaagcggtatgcccgcaaagcgcaggaagcttaggagtgatattcagaaaaggctgcaggaggaccctaactactcaccccaaagattcccaaatgctcagagagctttcgctgatgacccctag

SEQ ID NO: 215714 - DNA, 789 bp, synthetic construct
  misc_feature 1..789: note = Description of Artificial Sequence: Synthetic coding sequence
  source 1..789: mol_type = other DNA
atggagcccaatgattctacgagtacagccgtggaagaacctgactcgctggaagtccttgttaaaaccctcgatagccagacgagaactttcatcgtgggggcacagatgaacgtgaaggaattcaaagagcacatcgccgcatctgtgagcatacccagcgagaagcagaggctgatctatcagggcagagttcttcaagacgataagaagttacaggaatataacgtgggcggtaaggtgatacatcttgtggaacgagcacccccacagacccatttgccctcgggcgcttccagcggtaccggcagtgcttccgctacccacggcggaggaagcccacctggtacacggggtccgggagcttctgtgcacgatcggaatgctaactcttatgtgatggtaggcacattcaacctgccctccgacggatctgctgttgacgttcacatcaacatggagcaggctcctatacagagtgagcctcgggtacgcctcgtcatggctcagcatatgattagagatatacagaccttactttctagaatggagtgcagaggagggcctcaacctcaacatagtcagccccctccccaacctcccgctgtgactcctgagcccgtagccctgtctagccagacatcagaacctgtggagtctgaggcgccacccagagaaccaatggaggcagaggaagtggaggaacgggcaccagcgcaaaatcctgagttaacacccggaccagcccctgctgggcctacccctgcgcctgagaccaacgccccatag

SEQ ID NO: 215715 - DNA, 735 bp, synthetic construct
  misc_feature 1..735: note = Description of Artificial Sequence: Synthetic coding sequence
  source 1..735: mol_type = other DNA
atggaacctaatgattcaaccagcacagctgtggaggaacccgactctttagaggttctggttaagaccttggactcacagactcgcacttttatagtcggagcccagatgaacgtgaaagaattcaaagagcatatagccgcatcggtgagcatcccgagtgagaagcagagattgatctatcagggaagagtgttgcaagacgataagaagctgcaggaatacaacgttggaggaaaggtgattcatctagtggagagggctcccccacagacccatctgccctctggagcttcttccggaaccgggagcgcctcagcaacacatgggggagggtctcctccagggacacgaggtccaggtgcttctgtacacgaccggaacgctaacagctacgttatggtgggaacttttaatctgccatccgagcccagagtgcgcttggtcatggcgcagcatatgattcgcgatatacagactttgctgtcccggatggagtgtagaggaggccctcagcctcagcatagccaacctcctccccagcctcccgctgtgacccccgagccagtggctctctctagtcagaccagcgagcccgttgaatctgaggcaccccctcgagaacccatggaggccgaggaagtcgaagagagggctcccgcacagaaccccgagctcacacctggcccagcgcctgccggtccgacccctgctccagaaactaatgcaccatag

SEQ ID NO: 215716 - DNA, 594 bp, synthetic construct
  misc_feature 1..594: note = Description of Artificial Sequence: Synthetic coding sequence
  source 1..594: mol_type = other DNA
atggaacctaatgattctacgtctacagccgtggaggagcctgatagtttagaggtgttagtgaaaaccctggactctcagacccggacgtttattgtgggcgcacagatgaatgtgaaggaattcaaggaacatatagcagctagcgtcagtattccgtctgaaaaacagcggctgatttaccaggggcgagtcctgcaagacgacaagaaactgcaggaatataatgtgggaggcaaagttatccatctggtggagcgagccccaccacaaactcacttgcctagcggagctagcagtgggacgggaagtgccagtgccacccatggagggggatcaccacccggaacacgcggaccaggcgcatccgtccacgaccgcaacgctaactcatacgtcatggttggcacatttaacctgccttccgacggctccgccgttgacgttcacattaatatggaacaggccccaatacagagcgaaccaagggtgcgccttgtgatggctcagcatatgatccgggatattcagacactactgagtcggatggaatgtcgcggtggccctcagccccaacattcacagcctccctag

SEQ ID NO: 215717 - DNA, 621 bp, synthetic construct
  misc_feature 1..621: note = Description of Artificial Sequence: Synthetic coding sequence
  source 1..621: mol_type = other DNA
atggagcccaatgatagtacaagtaccgctgtcgaggaaccagacagtctggaagttcttgttaaaacattagactcacagacccgcacctttattgtaggagcccagatgaacgttaaagagttcaaggaacacattgctgctagcgtgtccatcccatcagagaaacagcggctgatatatcagggccgagtgctgcaggatgataagaagctgcaagagtacaatgttggtggcaaggtcattcatcttgtagagagagcccctccccagacacacctgccgagcggggctagcagtggtacgggatctgcctctgccacgcatggtggaggctctcccccaggcactcgagggccaggtgctagcgttcacgaccgtaatgcgaacagctacgtgatggtggggacgttcaatctgccgtcggagccaagagtaagactagtgatggcgcagcacatgatccgggacatccaaactctgctgagcaggatggaatgcagagggggtccacagccacagcactcacagcccccaccccaaccccctgccgtcacacctgagcccgtcgctctcagtagtcagaccagcgagccagtggaaagcgaggcccctccctag

SEQ ID NO: 215718 - DNA, 735 bp, synthetic construct
  misc_feature 1..735: note = Description of Artificial Sequence: Synthetic coding sequence
  source 1..735: mol_type = other DNA
atggagcctaatgatagcaccagtaccgctgtcgaagaacctgattcactggaggtcctggtcaaaacgctagacagccagacaaggacttttattgtcggggctcagatgaacgtcaaagagttcaaagaacatatcgccgcttctgtgagcatcccctcagagaaacagaggcttatctaccagggacgcgtgctgcaggatgacaaaaaacttcaggagtacaacgtcggtggcaaggtgatccatctggtcgaaagggcgccaccgcagacccaccttccctcaggagcttcctctggtactggaagcgcctcagccactcatgggggaggctctccccctggaacacgcggtcccggagcatctgtccacgataggaatgccaattcgtatgtgatggtgggtaccttcaatcttccaagtgagcctagagttcgcctggtcatggctcagcacatgatccgcgatatccagactctcctgtctcgcatggagtgtcggggaggtccccagccacagcatagccaaccccctccccagccaccagccgtaactcccgagcctgtcgctctctcaagtcaaacttctgagcctgtcgaatctgaggccccaccccgagagccaatggaggccgaagaggtggaagagcgcgctccagcacagaatcctgagctcacacccggtcccgcaccagcagggccaacacctgctcccgaaacaaatgcaccttag

SEQ ID NO: 215719 - DNA, 3381 bp, synthetic construct
  misc_feature 1..3381: note = Description of Artificial Sequence: Synthetic coding sequence
  source 1..3381: mol_type = other DNA
atggaaccaaacgattccacctcaaccgctgtagaagagcctgattcattagaggtgctcgtaaagacactagattcgcaaacacgcacatttatcgtcggagcgcagatgaacgtgaaagagttcaaagaacatattgcagccagcgtgagtattcccagtgagaagcagcgcctaatttatcaggggagagttctgcaggatgacaagaaattgcaagagtacaacgtgggaggaaaggtgatacatctcgtagagagggcgcctcctcagacccacttgccgagcggtgcttcctccggaaccggatcagcctccgccacccacgggggaggcagtccccctggcactcggggacctggtgcctcagttcatgaccgaaatgcaaacagctacgtgatggtgggaactttcaacctgccaagcgatggctccgctgtcgacgtgcatataaatatggagcaggctcccattcaatctgagccaagggttcgcctggtgatggcgcagcatatgatcagggacattcagactcttctaagcagaatggagtgcaggggcggtccccagccacaacattcacaaccgcctcctcagccacccgcagtgacccctgagcctgtcgcgctgagcagccagacctcagagcccgtcgagtcggaagctcccccaagagaacccatggaagctgaggaggtggaggagcgcgctcccgcacagaatcccgaactgacaccgggacctgcccctgcaggcccaactccagcacctgaaaccaatgcgcctaaccacccctcacccgctgagtacgttgaggttctgcaggagctgcaacgattggaaagcaggctccagcccttcctgcagaggtattacgaggtccttggcgctgctgctactactgactataacaataaccatgagggtagggaagaagatcaaagactcataaatctcgtaggggaaagcttacgcctgttaggcaacacctttgtggcgctaagcgacctgcgatgcaacttagcctgtacgcctcctcgacatctacatgttgtgcggcctatgtcacattacactactcccatggtgctgcagcaggccgcaatccccattcagattaatgtcgggaccacagtcacaatgactggcaatggaacgaggccccctcccacaccaaacgccgaagctcctcctccaggccctggacaggcctcgtccgtggcaccatctagcactaacgtcgagtctagcgcggagggagcccctccccctgggcctgccccacctccagcaacgtcacatccacgtgtaattcggatctcgcaccagtccgtagaacctgtggtgatgatgcatatgaatatccaggactcagggactcagccagggggagtcccatccgccccaactggccctctcggccctcctggtcacggtcagactttggggcagcaagttccaggctttccgaccgcacctacacgagtggtcatcgccaggcctacacctcctcaagcccgacccagccaccctggagggcctcctgtttcagggacgctgcagggcgcagggctgggtaccaatgcttccctggctcagatggtatcaggcctcgtcgggcaattgctgatgcaacctgtgctcgtggcgcagggaacaccagggatggcacccccacctgcaccagccacggcttccgcatctgccggtactactaatactgcgaccaccgctggtccagcccctggcggacctgctcagcccccacccacccctcagccaagcatggcagatcttcagttctcccagctcctcgggaatctcttaggtcccgctggcccaggagctggaggatccggtgttgctagccccactataaccgtggccatgccaggagtgcctgccttcctgcagggtatgacagatttcctccaggcgactcaaacggcccctccgccaccacctccaccgccaccccctccccctgcccctgagcagcagaccatgccccctcccggaagcccgtccggaggtgcaggatctccagggggtttggggctggagtccctgagccccgaattcttcacctccgtcgtgcagggagtcttgagttctctgctcggctcacttggggctagggcgggtagcagcgagtcaatcgcggcttttatccagcgactttccggatcaagtaatatcttcgagcccggagcagacggcgctctcggcttttttggagcactgttatctcttctgtgccagaatttctccatggtggacgtggtcatgctgctccacggccacttccagcccttgcagagactccagccccagctacgttctttttttcatcagcattacctgggagggcaagagccgaccccctctaacatcaggatggctacccataccctaattacaggacttgaagagtatgtgagggaaagtttttctctcgtccaggtgcagcccggtgtggatatcattagaaccaacctcgagtttctgcaggaacagtttaacagcatcgcagcgcacgtgttacactgtactgacagcgggttcggcgctcgactcttggagctgtgcaaccagggcctgtttgaatgtctggcgctgaacctgcattgcctgggaggccagcaaatggaactggctgcagtcatcaatgggcgtatccgtcggatgtccagaggggtgaatccttcacttgtgagctggcttaccacaatgatggggctgcggcttcaggtggtcctggagcacatgccagtgggccctgatgcgatcctgcggtatgttcgcagggtgggggacccccctcagccactgcctgaggagcctatggaggtgcagggcgctgaacgggcttctccggaaccccaacgggaaaatgctagccctgcccctggtaccaccgctgaggaggccatgtctagaggcccacccccagctccagagggcggaagcagagacgagcaggatggtgctagcgctgaaaccgaaccatgggcagcagcagtccctccagagtgggtgcctatcatccaacaggacatccagagtcagcgaaaagttaagccccaaccccctttgtcagatgcctatctgtccggaatgccagccaagcggcgaaaaaccatgcagggggagggcccacagctgctactgtcagaagccgtgagtcgtgcggctaaagcagctggagctcggccacttacctctccagaatcactgagcagagacctagaagcaccagaagtgcaggagagttacagacagcagcttcggagcgatatccaaaagcgccttcaggaggaccccaactattctccccagcgattccctaatgcccagcgagccttcgcagatgacccctag

SEQ ID NO: 215720 - DNA, 735 bp, synthetic construct
  misc_feature 1..735: note = Description of Artificial Sequence: Synthetic coding sequence
  source 1..735: mol_type = other DNA
atggagcccaacgattctacatcaacagctgtggaagagcctgactccttggaagtgctcgtcaaaacactggactctcagacacgcacatttattgtgggtgcgcagatgaacgtgaaggagtttaaagagcacatcgccgcttcggtgtccatccctagcgagaagcaacgcctcatctatcagggtcgcgttctccaagacgataagaagctgcaagagtacaatgtgggaggaaaggtgattcaccttgtggagcgggctccaccccagactcatctgccctctggcgctagcagcgggacgggtagcgctagtgccacccatggagggggaagcccccctggcacaagaggccctggggcaagcgtgcacgaccgaaacgctaactcatatgttatggtgggaacttttaacctgcccagcgaacctagagtgaggctggtgatggcacagcacatgatcagggatatccaaacactgctctcacgtatggaatgccgagggggaccgcaaccacagcattctcagccaccccctcagccccctgccgtgacccccgagcccgtggctctgtcttcccagacctctgaaccggtcgagtccgaggcccctcccagagagcccatggaggccgaagaggtggaagaacgtgctccagcgcagaatcccgagctgacccccggacccgctcctgccggacccacccccgcaccagaaacgaacgccccatag

SEQ ID NO: 215721 - DNA, 717 bp, synthetic construct
  misc_feature 1..717: note = Description of Artificial Sequence: Synthetic coding sequence
  source 1..717: mol_type = other DNA
agcagcgccgaaggggcacctcctccagggccagctccgccacccgcaacatctcatccgagggtcattcggatatcacatcagtcagtggagcccgtggtgatgatgcacatgaatattcagggtccattgtcactttctccttgcccagatagcgggacccagcccggaggagttccatccgctccgactgggccactcggccctcccggacatggccagacattggggcaacaggtcccaggttttccaacagcccctactcgtgtggttatcgctcgccctactccaccacaggccaggccaagtcatccaggtggaccaccagtatccggaactctgcagggcgctgggctggggaccaacgcttccctcgcacaaatggtgtctgggcttgtcggacaactgcttatgcagcccgtgctggtggcacagggcacccccggaatggcccctcctccagctcccgctacagctagtgcctctgccggaacaaccaataccgccaccacagccggacccgcacccggagggccagcgcagccccctccaaccccccaacctagtatggccgacctgcagttttcacagcttcttggcaacctgctaggacccgctgggccaggcgctgggggttcaggagtggcctcaccaacaatcaccgtggctatgccaggtgtgcccgcttttttgcagggaatgacggacttcctttag

SEQ ID NO: 215722 - DNA, 735 bp, synthetic construct
  misc_feature 1..735: note = Description of Artificial Sequence: Synthetic coding sequence
  source 1..735: mol_type = other DNA
atggagccgaacgattcaacttcaactgccgtggaagagcctgactcactggaggtgctcgttaaaacactggactcccagactagaaccttcatagtgggagcccagatgaatgtcaaggagtttaaagaacacattgctgcgtctgtgtctatccctagtgaaaaacagcggttaatataccaggggcgagtgctgcaggacgataagaagctgcaggagtataatgttgggggaaaggtgattcatctggtcgagagagcccctccccagacacatttacctagcggggctagctctggcactgggtccgccagcgcaactcatgggggtgggagcccacccggtacccgcggacctggcgcttctgtgcacgatagaaatgcaaactcctatgtaatggtcgggactttcaatctgccatcggaaccaagagtgaggttagtgatggctcagcatatgattcgcgatattcagaccctgctctcacggatggagtgcagagggggaccccagccccagcacagccagcctcctccccagcctccagctgttacgcctgagcccgtggccttaagtagtcaaaccagcgagccagtggagagtgaggcccctccacgggagccaatggaagcagaagaggttgaagaaagagctccagcacagaatcccgaacttaccccaggtcccgcacctgcgggtccaacccctgctccagagactaacgccccatag

SEQ ID NO: 215723 - DNA, 2232 bp, synthetic construct
  misc_feature 1..2232: note = Description of Artificial Sequence: Synthetic coding sequence
  source 1..2232: mol_type = other DNA
atggaaccgaatgactccacttctaccgccgtggaggaacccgacagtctggaggtgctggtgaagaccctggactctcagacccgtaccttcattgtgggggcacaaatgaatgtgaaggaatttaaggaacacattgctgcgtctgttagcatcccctccgaaaaacaacggcttatatatcagggcagggtcctgcaagacgacaaaaagctgcaggagtacaatgtggggggtaaagtgattcatttggtggagcgggcaccaccacagacacacctcccatctggagccagctctggcactggttccgcgagtgctacccatgggggagggagcccccctggaacccgaggtccgggagcctccgtgcatgacaggaatgctaattcctacgtaatggtgggaacctttaacctgccttccgacggatccgccgtagacgtccacattaacatggagcaagctccgatacaaagcgaacctcgcgtgcggctggtcatggcccagcacatgattagagatattcagaccctgctgagccggatggagtgtagagggggtccccaaccgcaacacagccaaccaccaccacagccaccggctgtgacgcccgagcccgtggcgcttagctctcaaaccagcgagcctgtggaaagtgaggcccctcctcgggagcctatggaggctgaagaagtcgaagaacgggctcccgctcagaatcctgaattaacaccaggacccgctcctgctggccctactcctgccccagagacaaatgctcctaatcacccaagccccgctgaatatgttgaggtgttacaggaattgcagcgcttagagagcaggctacaaccgtttctgcagaggtattatgaagtgctgggtgctgccgctacgacggactataacaataatcacgaggggagagaagaagatcaaaggttgattaatctcgttggagagtccctcaggctgctggggaacacctttgtagccttgtcagacttgcgctgtaacctggcctgcacacccccacgccacttgcatgtggttaggccaatgagccactatacaaccccaatggtccttcagcaggccgctatccctatacaaattaacgtcggaacaacagtaaccatgacaggcaacgggacgagaccaccccctacacccaacgcagaagcccctcctccaggccctggccaagcaagtagcgtggccccttcctctaccaacgtggaatcctctgctgagggcgcacctcctccaggacctgcccctcctcctgcaactagccacccaagagtgattcggatcagccatcagtctgtcgagccagtcgtgatgatgcacatgaatattcaggacagtggaactcagcccggaggagtgcccagcgcccctacaggtccattgggacccccaggtcatggacagaccttaggcagtactctaatccagctcccttcattgccccctgagtttatgcacgcagttgcacatcagatcactcaccaagccatggtcgctgcagtggcctcagccgcagccggacaacaggttcccggtttcccaacagcccctactcgcgtggtgatcgcacgccctacaccacctcaggctcgtccttcacatccaggaggcccacctgtgagcggcactttgcagggagcaggactgggcacaaatgcaagcctggcacagatggtgtcgggcctggtcggtcaactgctgatgcagccagtgcttgtcgctcagggcactccaggaatggctccacccccagcacctgcaacagcatcagcatccgcaggaaccacaaatacagccacaaccgccggaccggcacccggtggacctgctcagccaccacctaccccccaaccctctatggcagatctgcaattttctcaacttctgggcaacctgttggggccagccggacctggagcgggaggtagcggggtcgcgtcccccactatcacggtagcaatgccaggggttccagctttcctgcagggtatgacagattttctgcaggcgacgcaaacagcccctcctcctccacctccccctcctcccccacctccagcgccagagcagcaaacaatgccccctcctgggtcacccagcgggggagccggatccccgggaggtctgggactagagagcctctcgccggagttttttacgtctgtagtgcagggggtgttgagctcgctcctctag

SEQ ID NO: 215724 - DNA, 477 bp, synthetic construct
  misc_feature 1..477: note = Description of Artificial Sequence: Synthetic coding sequence
  source 1..477: mol_type = other DNA
atggaacctaacgactcgacatcaactgcggtagaggagcccgattcgctggaagtgctggttaaaacactagatagccagacacggaccttcatcgtgggtgcacaaatgaatgtgaaggaatttaaagaacacattgccgcttcggtatccattccctcggagaagcaacgcctaatctaccaaggcagagttctccaagacgacaagaaactgcaggagtataatgtaggagggaaggtaattcatctggtggagagggccccaccccagacacatctcccatctggcgcatctagcggtacaggttctgcttctgctactcatggcggaggctcccctccgggaacacggggaccaggcgcaagcgtgcacgatcgcaatgccaatagttacgtcatggtgggtacatttaacctgccttcagacggttctgccgttgacgtgcacatcaacatggaacaggctcccatttag

SEQ ID NO: 215725 - DNA, 681 bp, synthetic construct
  misc_feature 1..681: note = Description of Artificial Sequence: Synthetic coding sequence
  source 1..681: mol_type = other DNA
tagagcggcttcggcgcacggctgcttgagctgtgtaatcaaggactgtttgagtgtctggctctcaatctgcactgcttaggagggcagcagatggagctagctgcagtgatcaatggcaggattcgcaggatgtctaggggggtgaacccctcactggtgtcatggttgacaacaatgatgggactgcgccttcaggtggtgctggaacatatgccagtgggccctgatgctattctccgctacgttcggagggtcggagatcccccacaacctctgcccgaggaaccgatggaggtgcagggtgcagagcgagcgtccccagagccgcagagagaaaatgcctcgcccgctcctggaaccacggcagaagaggccatgtctcgtggacctcctcctgctccggaaggcggaagccgagacgagcaggacggagctagcgccgaaacagagccctgggcagcggcagtgccacccgagtgggttccgatcatacagcaagatatccagagccaacggaaggtgaagccccaacccccactctccgatgcttacctatctggtatgcctgccaagcggcgtaagttacgtagcgacatacagaagaggctccaagaggaccctaactattcaccccagcgctttcccaacgcacaacgggctttcgccgacgacccatag

SEQ ID NO: 215726 - DNA, 717 bp, synthetic construct
  misc_feature 1..717: note = Description of Artificial Sequence: Synthetic coding sequence
  source 1..717: mol_type = other DNA
tcctccgcggagggcgcaccccctccaggacccgcacccccaccagcaacatctcatcctcgggtaatcaggatctcccaccagtcagttgagcccgttgtgatgatgcatatgaatatacaggggccattaagccttagcccctgccccgactcaggcactcagcccggtggagtgccatctgccccaacgggcccactggggccaccaggtcacggccaaacattgggccaacaggtcccgggttttccaacagctcctaccagagtggtgatcgctcgccctaccccaccacaggccaggcccagccatcctggtggcccacccgtgtcagggactctgcagggagcaggcctggggacaaacgccagccttgcccaaatggtctcagggctcgtgggccagctgctgatgcagcctgtccttgtggctcaaggcacgcctggtatggctccccctcctgctcctgcgacagccagcgcaagcgctgggaccaccaacaccgcaactactgctggcccagcaccaggaggaccggcacagccacccccaaccccgcagccctctatggccgacctgcaattctctcagctcttaggcaacttgctgggccctgccggacccggagcaggcggtccaggagtggcatcccccacaataactgtagccatgcctggtgtgccagcttttttgcagggcatgacagatttcctgtag

SEQ ID NO: 215727 - DNA, 3381 bp, synthetic construct
  misc_feature 1..3381: note = Description of Artificial Sequence: Synthetic coding sequence
  source 1..3381: mol_type = other DNA
atggaacccaatgatagcacgagcactgccgtggaggagcccgatagcctggaggtactggtcaaaacattggacagccagactcggaccttcattgttggggctcaaatgaatgtaaaagagtttaaagaacatatcgctgcctctgtctctattccatctgaaaagcagcgacttatttaccaggggagggtactgcaggatgacaaaaagctgcaggagtataacgtgggaggaaaagtcatccacctggttgaacgtgcaccccctcagacccacctgccttccggagcctctagtggaacgggcagcgcctctgcgacacacggtggcggatctccccctggtaccagaggccctggtgcctctgtccatgataggaacgcaaattcatatgtgatggtcggaacatttaacctccccagcgacggaagtgccgtcgatgtgcacataaacatggaacaagcgccaattcagtccgagcctcgagtgaggctggtgatggcccagcacatgattagagacatacaaactctgctttcccgtatggaatgtagaggcggtccccagccacagcactcccagccgcctccccaacccccagctgtgacccccgagccggtggcactgtctagtcaaacttcagagccagttgaatcggaagcaccccctagggaacctatggaagccgaggaagtcgaagagcgcgctccagcccagaaccccgagctgactccgggaccggctcccgctggcccaactcctgcgcctgaaacaaacgccccaaatcatccatctcccgctgaatacgtggaagtattgcaagaactgcagcgtttggaatcaaggctgcagccttttctgcagaggtactatgaggtcctcggggcagcagctactacagactataataacaaccatgaaggcagagaggaagatcagcgactgatcaatctggtaggcgagtctcttagattattagggaacacctttgtggccctgtcagacttgcggtgtaacctggcatgtacgcccccaaggcacctgcacgtagttagacctatgtcccactataccactcccatggtgcttcaacaagcagccatccccattcagattaacgttggtaccactgtgaccatgacgggcaatggaacccggcctcctccaaccccaaatgcggaagctcctccccctgggccaggccaggcttcgtccgtcgcaccaagctccaccaacgtggagtccagcgcagaaggcgcacctcctcctggcccagccccacctccagcaaccagccacccgagggtcatcagaatctcccaccagtcagtagagcctgtggtcatgatgcatatgaatatacaagatagcggtacccaacccggaggtgttccctccgctccaaccggccctttgggacctcctggtcacggccagaccctgggccagcaggtgcctgggttcccaacagcccctacccgtgtggtgatagctcggccaacccctccccaagctaggcccagtcaccctggcggaccgcctgtcagcgggacattgcagggagccggactaggtactaatgccagcttggcccagatggtctcaggcttggtgggacagctgctcatgcagcccgtactggttgctcagggcacccccggtatggcccctccgccagcccctgcaaccgctagcgcatctgctgggaccacgaatacagccaccaccgctgggcctgcacccggaggtcccgctcagcccccacccacaccacagccgtcaatggctgacctccagtttagccagttgcttggaaatttgctcggcccagccggtccaggcgcaggaggctccggagtcgcttctcccactattacagttgcaatgcctggggttcccgcattcctgcagggcatgactgatttcctccaggcaactcagaccgccccaccccctcctccaccaccaccacctcctcctcccgctccagaacagcagaccatgcccccaccaggatccccatcaggaggggctgggtcccctggaggactcggtctcgagagcctctcccccgaattctttactagcgttgttcaaggcgttctgtcctctctcctgggcagccttggcgctagggctgggagtagcgagagcatagcagccttcatccagcgtctgtctggcagttctaacatctttgagcctggagccgatggggcactgggtttcttcggagccctgttgagcctgctctgtcagaacttctccatggtggatgtggtcatgctcttgcacggccacttccagcctcttcagcggttgcaaccacagctgcgttctttcttccaccaacactatttgggcggtcaggaacctaccccatcaaacattaggatggcgacacatacactgataacagggctggaggaatacgtgcgcgagagtttctctctggtgcaggtgcagcccggagttgatatcatcaggactaacctggagttcctgcaagaacagttcaattctatcgctgcacacgtcctgcattgtaccgactccggcttcggagctcgcctcttggagctatgtaatcagggcctgttcgaatgcctggcccttaatttgcactgtctgggtggtcagcagatggagctggctgccgtcatcaacgggcgaatccggaggatgtcaagaggcgtcaatccctcactcgtgagctggctcacaaccatgatgggactcagactccaggtcgtcttagaacatatgccagttggcccagatgccattcttagatacgtaagacgtgtcggtgaccctcctcagccactacctgaagagcctatggaagttcaaggagctgaaagggcgtctccggaacctcaaagagagaatgcctctccggcacccggtactaccgcagaggaagccatgtctcgcggtccaccccctgcacccgagggaggctccagagacgaacaagacggggcttctgcagagaccgagccatgggcggcagctgtgccacccgaatgggtgccaataatccagcaggacattcagagccaaaggaaggtgaagcctcagcctcctctgtcagacgcctacctgtctggaatgcctgcaaagagaagaaaaacaatgcagggcgagggccctcagctcctactttctgaagccgttagccgtgccgcaaaggcagctggtgcaagacccctgacttctcctgaaagcctttcccgcgacctcgaagcaccagaggttcaggaatcatatcgtcagcagctacgatcagatattcaaaagcgcttgcaagaggatccgaactactcaccccaacggtttcccaacgcacagagggcatttgcagatgatccctag

SEQ ID NO: 215728 - DNA, 789 bp, synthetic construct
  misc_feature 1..789: note = Description of Artificial Sequence: Synthetic coding sequence
  source 1..789: mol_type = other DNA
atggagcccaatgattccaccagcactgcggtcgaggagcctgattcactcgaggtcctggttaagacactcgattcccagactaggaccttcatcgtcggggcacagatgaatgtcaaggagtttaaggaacacatagccgctagtgtgagcataccttctgagaaacagcgcctgatctatcaaggaagagttctccaggacgataaaaaactgcaggagtacaacgtcggcggaaaggtcatccatctggtggagagagccccaccacagacacaccttccttcgggcgcttccagcggaactggcagtgcatcagctactcatggcggtggcagtcctccaggcactaggggaccaggtgctagcgtgcacgatagaaatgccaacagttacgtgatggttggcacgttcaatcttccttcagacggctccgcagttgatgtccacatcaatatggagcaagcaccgatccaatctgagcccagggtgcgtctagttatggcccagcatatgataagagatattcaaacactcctgagtcgcatggaatgtagaggcggaccccagcctcagcactcccagccccctccacaaccacccgctgtgaccccagagccagtcgcgctgtcttcccagaccagcgagcctgtggaatctgaagcgcctcccagagagccaatggaggccgaagaggtggaggagcgtgcaccagctcagaatcccgaattgactccgggacccgctccagccggaccgacaccggcacctgagaccaacgcaccatag

SEQ ID NO: 215729 - DNA, 477 bp, synthetic construct
  misc_feature 1..477: note = Description of Artificial Sequence: Synthetic coding sequence
  source 1..477: mol_type = other DNA
atggagccgaatgatagtacctcaactgccgtggaagagcccgatagtctcgaggtcttagttaagacactcgatagccagactagaacctttattgtgggcgctcaaatgaatgtaaaggagtttaaagaacacatagccgcttccgtgtcaatcccaagtgagaaacagaggttgatctaccaggggcgtgtgctgcaggacgacaagaaactgcaggaatacaacgtgggtggaaaggtgatccatctcgtggaacgcgctccaccccagacccacctgccctcaggcgctagcagcgggacaggatcagcttccgccactcatgggggaggtagccccccaggcacaagagggcctggtgcgtccgtgcacgaccgtaacgccaacagctacgtgatggttgggacttttaatctgccctccgatgggtcagcggtcgacgtgcatattaacatggagcaggcaccaatttag

SEQ ID NO: 215730 - DNA, 777 bp, synthetic construct
  misc_feature 1..777: note = Description of Artificial Sequence: Synthetic coding sequence
  source 1..777: mol_type = other DNA
atggaacccaatgactccactagcacagcagtggaggaacctgattcgctggaggtgctagtgaagacattggactcccagaccagaacctttattgttggcgctcagatgaatgttaaggaattcaaggagcacatcgccgcatcagtgtccatcccctccgagaaacagaggcttatttatcagggacgggtgttacaggacgacaaaaagcttcaggaatataacgtcgggggaaaagtgattcatctagtggaacgcgctcctccacaaactcacctgcccagtggggcatcttcagggaccggttctgcgtcagcgacgcacggcggtggatccccacccggtacaaggggacccggagcatcagtgcatgacagaaacgcgaacagctatgttatggtcggcaccttcaatctgccatctgacggatccgctgtggatgtgcacattaatatggagcaggctccgattcaaagtgagccccgtgtaagactcgtaatggcccagcacatgattagggatatccagaccctgctcagccgaatggaatgtcgaggcggaccccaaccacagcacagtcaacccccaccccaaccaccagccgtcacaccagagcctgtcgctctgtcctctcagacttcagaacccgttgagagcgaggcgcctcccagggagccaatggaggctgaagaagtggaagagcgcgctccggcacagaatccagaactcacccccggtcccgcaccggcaggtcccacccccgcaccggaatag

SEQ ID NO: 215731 - DNA, 735 bp, synthetic construct
  misc_feature 1..735: note = Description of Artificial Sequence: Synthetic coding sequence
  source 1..735: mol_type = other DNA
atggagccaaacgattcaacttccacagcagttgaggagccggactcactcgaggtactggtgaagacacttgatagtcagactcggacttttattgtcggagcgcaaatgaacgtgaaagagttcaaggagcacatcgccgctagcgtgtcaatcccctccgaaaagcagcgactgatctatcagggtagagttctccaagacgacaaaaaactgcaggagtataatgtcggcggaaaggtcatccacctggtggagcgtgctcctcctcagacacacctaccttccggcgcttcatccggcacgggttccgcctccgcaacacacggcggtgggagccccccaggtactcgtgggccaggcgcatctgtccacgatagaaatgcaaactcttacgtgatggtgggcacctttaacctgccgtcagagccacgcgtgaggctggtgatggcacagcacatgattcgcgatatccagactttgttgtccagaatggagtgtagaggagggccacagccccagcatagccagccgccaccacagccgcctgctgtgaccccagagcctgtggcattaagctcacagacatctgaacctgtggaaagcgaggcacctccaagggagcctatggaagctgaagaggtggaagaacgggctccagcccaaaaccccgaattgacacctggccctgcgccagctggcccaacccctgcgcctgaaactaatgccccatag

SEQ ID NO: 215732 - DNA, 1548 bp, synthetic construct
  misc_feature 1..1548: note = Description of Artificial Sequence: Synthetic coding sequence
  source 1..1548: mol_type = other DNA
atggaacctaacgattcgacatctacagcagtggaggagcccgattctctggaggtgcttgtcaaaactttggactcccagacccgtacatttatcgtcggagctcaaatgaatgtcaaagaatttaaggaacatatcgctgcatccgttagtatcccctccgagaaacaacgcttgatttaccaggggcgtgtgctccaggatgacaagaaactacaggaatacaacgtgggcggaaaagtgattcacctggtggaacgcgcacccccacagacacatctgccatcgggagcctcctcagggactggatccgcctcagccacccacggaggcggatcaccaccaggaactcgaggacccggagcttctgtccacgaccgaaatgcgaattcttacgtgatggtgggcactttcaatcttccgtctgacgggagcgctgtggatgtccatattaatatggagcaggcacccatccagtcagagccgagggtccgtcttgtgatggctcagcacatgattagagatattcaaaccttactttccaggatggagtgtcgagggggtccacagccccaacatagccagcctccccctcagccacccgcagtcactccagagcctgtggcgcttagcagtcagacaagcgaaccggtggaaagcgaagccccaccacgcgaacccatggaggccgaagaagtggaagaaagggcaccagcccagaacccagagctgacccctggaccggctccagccggtcccacccctgcgccagaaactaatgcccctaatcatccgagtcccgctgaatatgtagaagtgttgcaggagctgcagaggctcgaaagcagactacagccatttctgcaacggtattacgaggtgctgggcgcagcggctaccactgactacaataataaccacgaaggaagggaagaagatcagaggctgatcaatctcgtcggtgaaagcctccgactactgggaaacaccttcgttgcactgtccgatctcaggtgcaatctggcctgcactcctcctagacatctccacgtcgttcgccctatgtctcactacacaaccccgatggttctgcagcaagccgcaattcccattcagatcaacgtgggaacaaccgtgactatgacaggcaacgggacgcgcccaccccctacacccaacgctgaggcccctcccccaggcccaggccaggcctccagcgttgctccaagctcaactaatgtggagtccagtgcagaaggggctcctccgcctggcccagctccaccccctgccacttctcaccctcgagtgatcagaatatcacatcagtcggtggagcctgtagtcatgatgcacatgaacatacaggactccggcacacaaccaggaggggtgccatctgctcctactgggccattagggccacccggtcacggccagactctcggatctactctgatccagttgccatctctgcctcccgagttcatgcacgctgtggcgcatcaaataacacaccaggcaatggttgctgccgtcgcttcttag

SEQ ID NO: 215733 - DNA, 702 bp, synthetic construct
  misc_feature 1..702: note = Description of Artificial Sequence: Synthetic coding sequence
  source 1..702: mol_type = other DNA
atggaacccaacgatagtacaagcaccgccgtggaagaacctgactctctcgaggtgctggttaaaaccctggatagccagacacgtaccttcatcgtgggcgctcagatgaatgtcaaagagttcaaggaacatatcgcagcctccgtgagtatcccaagcgagaagcagaggctcatttatcaggggagagtgctccaggatgacaagaaattacaagagtataatgtcggaggaaaagtgattcatctggtggagagagcccctccacagacacaccttccatccggagccagtagcggcacaggttctgcttcggcaacacacggcggaggttcacctcccggaacacggggtcccggtgcatccgtccatgacaggaatgccaactcgtatgtgatggtaggtacattcaacctcccgagtgacggatcagctgttgatgtccacattaacatggaacaggcaccgatccagtcagagccccgagttagactggtgatggctcagcacatgattagggatatccagactcttctgagtcgaatggagacactaccctatctgcaatgtcgaggtggccctcagccccaacattcccagccaccaccccagcctcccgcagttactccagagcctgttgcactatccagccagacttccgagcccgtcgagagtgaggccccacccagggaaccgtag

SEQ ID NO: 215734 - DNA, 3381 bp, synthetic construct
  misc_feature 1..3381: note = Description of Artificial Sequence: Synthetic coding sequence
  source 1..3381: mol_type = other DNA
atggagcccaacgattcgacctctactgccgtcgaagagcctgactcactggaggtgctggtgaagactctggattctcagacgcgcaccttcatcgtgggcgctcagatgaatgtgaaggagtttaaagaacatatcgccgcatctgtatctattccgagcgagaagcagcgcctaatctatcaaggccgagtgctgcaggacgacaagaaactccaggaatataatgttggaggcaaagttatacacctggttgagcgagcgccacctcagacccatctgccgtctggagccagctctggcaccggaagtgctagtgccacacacggcggagggtcccctccaggcaccaggggaccaggtgcctctgtccacgatcgcaatgcaaacagttatgtgatggtgggcacattcaacctcccttccgatggtagcgccgtggatgtgcacataaatatggagcaggcccctatccagagtgagcccagagtgcgcttagttatggctcagcacatgatacgcgatattcaaaccctactgtcacggatggagtgccgaggtggaccgcagccacaacactcacagccacctcctcagccccctgctgtcacccccgagcctgtggctcttagtagccagacaagcgaaccagtcgaatcagaggctccacctcgcgaacccatggaagccgaggaggtcgaagaacgtgctccagcacagaatccggaacttacacccggtcccgcacccgcaggcccaaccccagcaccagaaacaaacgccccaaatcacccaagtcctgcagagtatgtggaggtgctgcaggagctgcagagactggagtctagattacaacccttcctgcagcgatactatgaggtcctgggggctgcagcgaccacagactataataataatcatgagggcagagaggaggaccagagactgatcaacctagtgggagaatcactacggctccttggcaacaccttcgtggcgctgtccgacttgaggtgtaacctcgcctgtaccccaccgcgtcatctgcacgtcgtcaggcctatgtctcactacacgactccaatggtgttgcagcaggccgctattccaatccagatcaatgttggaactacagttacgatgactggcaacggtacccgccctccccctacccccaatgctgaggccccaccaccgggtcctggccaagcatcatcagtggccccatcctcaactaacgtcgaatctagtgcagagggagcgcctcccccaggaccggctcctccccctgcaacatctcaccctcgagtcatcagaatctcacatcagtctgtggagcccgtcgttatgatgcacatgaatattcaggattcaggcactcaaccaggtggggtgcccagtgcccctactggacccctcggcccacctggacatgggcagaccctggggcagcaggtgcctgggttccctacagctccgactcgcgtggtgattgcgagacctaccccccctcaagctagaccctctcacccgggtggccctccggtatcaggaactctccagggcgcaggcctggggacaaatgcctctctcgcccagatggtttctgggctggttggccagctactgatgcagcccgtcctggtcgctcagggaacacccggaatggccccacctcccgcaccagcaaccgcttccgctagtgcagggaccacaaacaccgccaccacagcagggcctgcccctggtggccctgcgcaaccaccacctactccacagccgtccatggcggacctccagttctctcagcttcttggcaatcttttgggccctgccggacctggggcaggcggacctggagttgcgtcccccacaattacggttgccatgcctggagttccagcgtttttgcagggcatgaccgatttcttgcaggctacccagaccgccccaccccctcctcctcctccaccccctcctcctcctgccccagagcagcagaccatgcctcctcctgggagtccatccggaggggcaggcagtcctggtggtctcggcctcgaatcactcagccctgagtttttcacgtccgttgtccaaggggttctttcatcattgctgggctcactaggcgcacgagcaggatcaagtgaaagtatcgcggctttcattcagcgactgtcggggagctccaacatcttcgaacccggtgccgatggtgccttgggcttctttggggctctcctgagcttactgtgccagaacttttcaatggtggacgtagtcatgctgctacacgggcatttccagccgttgcagaggttacagccacaactgcgaagtttctttcatcagcattacctgggcggtcaagaacccaccccttcaaacatcaggatggccacgcatacccttatcactgggctggaagaatacgtcagagaaagcttttccctagttcaggtacagcctggggtggacatcatccgaacaaatcttgagtttctgcaggaacagttcaactcaattgcggctcatgtgctgcactgcacggattccgggttcggggcacggttgttggagctgtgcaaccagggcctattcgaatgtttagctttgaatctccactgtctgggtggacaacagatggaacttgcagctgtgatcaatggcagaatcaggagaatgagtagaggggtgaatccatcccttgtgtcttggctgactactatgatgggcttgcgcctacaggtcgtcctggagcacatgcccgtagggccagatgccatcctgcggtatgtacgtcgggtgggggatccacctcagccgttgccagaagagcctatggaagtccagggagccgagagggctagtcccgagccccagagagagaacgcaagccctgccccaggaactacagccgaggaggcaatgagccgtggcccaccacctgcaccagaaggcggaagccgcgacgagcaggatggagcttctgccgagacggagccgtgggcagccgctgttccaccagagtgggtgcccataatccagcaggatatacagagccaacgtaaggttaaaccacagcccccattgtcagacgcctatctgagcggaatgccagcaaagaggcggaagaccatgcagggagagggcccacagttactgctgagtgaagcagtgagcagggctgctaaagctgccggagcaagacccttgacctccccagaaagcttatccagagacctcgaagcccctgaggttcaggagagttaccggcaacaactcaggagcgatatccagaagcgcctgcaggaggaccccaactattcaccacagcggtttccaaatgctcagcgggctttcgctgatgacccttag

SEQ ID NO: 215735 - DNA, 789 bp, synthetic construct
  misc_feature 1..789: note = Description of Artificial Sequence: Synthetic coding sequence
  source 1..789: mol_type = other DNA
atggaaccaaatgattccaccagtacagccgtggaagagcccgactccctggaggtgttggtgaagaccctggattcccaaacacgcaccttcatcgtaggcgctcagatgaacgtgaaagaattcaaggaacacatcgccgcttcagtgtccattccctctgagaaacaacggttaatttaccagggcagggttcttcaggacgacaaaaaactccaggaatacaacgtgggtggaaaagttatccacctcgtggagagggcgcctccacagacgcatttacccagcggcgcatcttctggaactggatcggctagcgcgacccatgggggaggcagcccacctggcactagagggccaggcgcttctgtgcatgaccgcaacgccaacagttacgtgatggtgggtactttcaacttgccctctgacggatccgcggttgacgtacacatcaacatggaacaggcccctattcagagtgagccacgagttcggctggtgatggctcagcatatgatcagggacatccagacattgttgagtcgaatggagtgtcgcggaggccctcagccccaacactcacaacctcctccccagccacctgccgtcactcctgagcccgttgctcttagctcacaaacatctgagcctgtggaaagtgaggcacctccaagagagccaatggaggcagaagaagtagaggagcgtgcccctgcgcagaaccccgaattaactcctggaccagcacccgcagggccaactcctgcccctgagactaacgctccgtag

SEQ ID NO: 215736 - DNA, 411 bp, synthetic construct
  misc_feature 1..411: note = Description of Artificial Sequence: Synthetic coding sequence
  source 1..411: mol_type = other DNA
tgacgcatgtctcgcggtgtgaacccctctttggtcagttggctgacgaccatgatggggttgcggctgcaggttgtgctggagcatatgccagttggccctgacgccatcctgcggtatgttcgcagagttggcgacccccctcagccattgccagaggaaccaatggaggttcagggcgcagaaagggcatcaccagaaccccaggaatgggtacccattattcagcaggatatccagagtcaacgtaaggtaaagcctcagccgccactgagcgacgcttatctgagcggaatgcctgccaaacgcagaaaattacggagtgacattcagaagcggttgcaggaagacccaaattattcccctcagagattccctaacgcccaaagggctttcgctgatgacccatag

SEQ ID NO: 215737 - DNA, 558 bp, synthetic construct
  misc_feature 1..558: note = Description of Artificial Sequence: Synthetic coding sequence
  source 1..558: mol_type = other DNA
tgacttgcttgcaccccccctcgccacctccacgtggtgcggccaatgagtcactatactacgcctatggtactgcaacaggctgctatcccgattcagatcaacgtcggcaccacggttaccatgacgggaaatggtacacggccaccccctactcctaacgccgaggctccccctcctggtcccggacaagcttcttcggtggcccctagtagcaccaacgtggaaagctctgccgaaggggctcccccacctggacctgcgcctcctcctgcaacatcacacccacgggtcattcggataagtcatcagtccgtggaacccgttgtcatgatgcacatgaacatccagggtcaacaggtccctggattccccactgccccaaccagggtcgtaatcgcacgaccaactcctccgcaggccaggccaagtcaccccggaggcccaccagtgagcggtaccttacagggagccggactcggcacaaacgcaagtttagcccagatggtgagcggcctggtcggccagcttctcatgcagccagtcctggtggcctag

SEQ ID NO: 215738 - DNA, 681 bp, synthetic construct
  misc_feature 1..681: note = Description of Artificial Sequence: Synthetic coding sequence
  source 1..681: mol_type = other DNA
taatctggctttggagcgaggctcctagaactgtgtaatcaagggctcttcgagtgcttggccctgaacttacattgcctcggcggtcaacaaatggagttggccgctgtgatcaatggacgaattagacgtatgagccgtggcgtcaacccatccctcgtgagttggctcacgactatgatgggattacgacttcaggtggtgttagagcacatgccagtgggacctgatgcgatactccgttatgtacggagagtcggcgaccccccacagcccctgccggaggaaccaatggaagtgcagggcgcagagcgcgcttcacctgagccacagagggaaaatgcatcccccgcacccggaaccaccgccgaagaagcaatgagccggggtccgcctcccgctccagagggcggaagccgggacgagcaggatggggcttctgccgagactgagccttgggccgctgccgtccccccagaatgggttcccataatccagcaggatatccaatcccaaagaaaggtaaaaccacagcctcctttgtcggacgcgtatctgtctggcatgcccgcaaaacgacggaagctgaggtcagacatccagaagaggttgcaggaggatcccaactacagcccacagagattccctaatgcacaacgcgcattcgcagatgacccttag

SEQ ID NO: 215739 - DNA, 594 bp, synthetic construct
  misc_feature 1..594: note = Description of Artificial Sequence: Synthetic coding sequence
  source 1..594: mol_type = other DNA
atggagcctaacgatagcacaagcactgccgtcgaggaacctgacagcttggaagtgctggttaagaccctggacagccagacgcggaccttcattgtaggtgcacagatgaatgtcaaggaatttaaagagcacatagccgcttctgtcagcatcccttcagaaaagcaacggctgatctaccagggacgggtgttgcaggatgataagaaactgcaggagtataatgtgggaggaaaggtgattcacctggtcgaaagagcccctcctcagactcaccttccatcaggagcatcaagtggaacagggagtgcctccgctactcatgggggaggttccccccctggcacccgaggcccaggcgcttctgtgcatgacagaaacgcaaattcgtacgttatggtgggaacgttcaacctcccaagcgacggctccgccgtcgacgttcacatcaacatggaacaggcccctatccagtcggaacctcgggttagactagtgatggcccaacatatgatccgagacatccaaaccctcttgtcccgaatggaatgcaggggtggcccacagccccagcactcacagcctccatag

SEQ ID NO: 215740 - DNA, 648 bp, synthetic construct
  misc_feature 1..648: note = Description of Artificial Sequence: Synthetic coding sequence
  source 1..648: mol_type = other DNA
atggagcctaacgactccacttcaacggctgttgaggagcctgattcccttgaagtcctggtgaagaccttggacagccagaccagaacatttattgttggcgctcagatgaacgtgaaagaatttaaagagcacattgctgcttcggtgagcatcccctcagaaaagcagcggttgatttaccaggggcgtgtattacaggacgataagaaactacaggagtataatgtcggtggcaaggtgattcacctggttgagagagcacctccacagacgcacctaccttcaggcgcaagtagtggcaccggctcggcctctgctacacatggcggtggctctccccctggcacaagggggcctggcgctagcgtgcacgaccggaatgcgaattcctacgtgatggtcggcactttcaatctgccttctgagccacgggtgcgtctggtaatggcccagcatatgatcagggatattcagactctgctaagccggatggagtgtcgtggcggaccccaaccacagcacagccagccaccacctcagcctcctgccgtgacccccgagccagtggcattgtccagccagacgtctgaacccgtagaaagtgaggcaccacctcgcgaacccatggaggccgaggaagtgtag

SEQ ID NO: 215741 - DNA, 702 bp, synthetic construct
  misc_feature 1..702: note = Description of Artificial Sequence: Synthetic coding sequence
  source 1..702: mol_type = other DNA
atggaacctaatgattcgacaagtaccgccgtagaggagccagacagcctcgaggtgctggtgaagactttggacagccagacaagaacgtttatagtcggggcacaaatgaacgtcaaagagttcaaggagcatatagccgcaagcgtttctatcccctccgagaagcaaagattgatctatcagggtcgggtcctgcaggacgacaaaaaactgcaagaatataacgttgggggaaaagtgatccatttggttgagcgcgctccaccacagacccacctgccgtctggggcatcttccgggacaggctccgcaagcgccacacacgggggtggaagtccccctggaacccggggacctggagcttcagtgcacgaccgcaacgcgaactcctatgtcatggttggcacatttaatctaccttcagacggctcagcggttgatgtccatataaatatggaacaagcacccatccagagcgagcctcgagtcagactcgtcatggcacagcacatgatcagagacatccagaccttactgtccaggatggagacactcccttacttgcagtgtaggggcggtcctcagcctcaacattcccagccccctccacagcctcccgctgtgaccccagagcctgtggccctaagctcccagaccagcgaacctgtcgaatcagaggctcctcctcgcgaaccatag

SEQ ID NO: 215742 - DNA, 777 bp, synthetic construct
  misc_feature 1..777: note = Description of Artificial Sequence: Synthetic coding sequence
  source 1..777: mol_type = other DNA
atggagcccaatgactctacctcaaccgccgtggaagagccggattccctggaagttctcgtaaagacattggattcacagacacgcacatttattgtaggcgcacaaatgaatgtgaaggagtttaaggagcatatcgctgctagcgttagtatcccatcagagaagcagcgtctaatctaccaaggcagagtcctccaggacgacaagaaactacaggagtacaacgtgggtggcaaagtgattcacctagtggagcgagcaccaccccagacgcacttaccttctggcgctagttccggaaccggcagcgctagtgcaacccatggaggtgggagccctcctggaaccaggggcccaggagcttccgttcacgacagaaacgccaactcctacgtgatggttggaaccttcaatctcccctcagatgggtctgccgtagacgtgcatattaatatggagcaggccccaattcagtcagaaccccgagtgcgactggtgatggcccagcacatgattagagatattcagacactcctgtcgagaatggaatgccgcggaggtccccaaccacagcattcccaaccccctccccagcctccagccgtgacccccgaacccgttgctctgtcctcacagacctccgagcctgtcgagagtgaggcaccaccaagggagccaatggaagcagaagaagtggaagagagagccccagcacagaaccccgagctgacgccaggtccagcccctgccggacccacgcctgcacccgagtag

SEQ ID NO: 215743 - DNA, 411 bp, synthetic construct
  misc_feature 1..411: note = Description of Artificial Sequence: Synthetic coding sequence
  source 1..411: mol_type = other DNA
tgacggatgtccagaggcgtcaaccccagcctcgttagctggctcaccaccatgatgggtctgcgacttcaggttgttctcgagcacatgcctgtggggcctgacgcaatcctgcgctatgtgcggagagtcggagatccacctcagcctctccccgaggagcccatggaagttcagggggcagagcgggcatcaccagaaccacaggagtgggtgccgatcattcaacaagacatccaaagccagaggaaagtaaagccccagccccctctttctgatgcctatctgtcagggatgcctgctaaaagaagaaagctccggtcagatatccaaaagcggctgcaagaggaccccaactattctccacagcgattccccaacgcacagcgcgcttttgctgacgatccctag

SEQ ID NO: 215744 - DNA, 780 bp, synthetic construct
  misc_feature 1..780: note = Description of Artificial Sequence: Synthetic coding sequence
  source 1..780: mol_type = other DNA
atggagcccaacgactcgacatctacagctgtggaagaacccgattccttagaggtgcttgtgaagacgttggactctcagacacgcacctttatcgtcggtgcacagatgaatgttaaagagtttaaagaacacattgccgctagcgtgtcaatcccatctgaaaaacagaggctgatctaccaggggagagtgcttcaggacgataagaagctgcaggagtataatgttggtggaaaggtgatccatctcgtggaaagagcgccacctcagacgcatttgcctagcggggcatcctcgggcaccggtagtgcctctgctactcacggagggggttcccctccaggcacaagagggccaggcgcttctgtgcatgacagaaatgcgaacagctatgtaatggtcggcacctttaatctcccctcagatggaagtgccgtggacgttcacattaacatggagcaggctcctattcaaagcgagccgagggtgagacttgtaatggctcagcacatgatccgggatattcagaccctcctcagtcggatggagtgccggggaggccctcaacctcagcacagtcagcccccaccccaacctcctgcagttactcctgaacccgtggcactctcgtctcagacgtctgaaccggtggaatctgaggcgcctcctagagaacccatggaagcggaagaagtggaggagagggccccagcccagaatcccgagctgacacctggtcctgcaccggctggcccaactccagccccagagacttag

SEQ ID NO: 215745 - DNA, 2232 bp, synthetic construct
  misc_feature 1..2232: note = Description of Artificial Sequence: Synthetic coding sequence
  source 1..2232: mol_type = other DNA
atggagcctaatgacagcacctctaccgccgtcgaggaaccagacagcctggaagttttagtcaaaacattagattcccagacacgcacatttattgtgggagctcagatgaacgtgaaagagttcaaagagcatatcgctgcgtctgtgtcaataccctctgaaaagcagcgcttgatctaccaaggacgtgttcttcaggatgacaaaaagctgcaggagtacaatgtgggtggcaaggttatccatctggttgaaagagccccaccccagactcacttacccagtggcgcaagtagcgggacaggttccgcctctgcaacccatggaggtgggtctcctccgggtactcggggaccaggcgcatcggttcatgatcggaacgctaattcttacgttatggtcggcacctttaacctgccctccgacggatccgctgtcgatgtgcatataaacatggagcaagcccctatccagagcgagcccagagtgaggctggtcatggcccagcacatgatccgtgatatacaaacgttgctttcgagaatggagtgtagaggtggaccccagcctcagcatagccaacctccccctcagcctccagcagttacaccagaacctgtcgctttgtcgagtcagactagtgaaccagtggaaagtgaggcaccgcctcgggagcccatggaggccgaagaagtggaggaaagggcccctgctcagaaccccgagctcacaccaggccctgctcccgctgggcctaccccggcacccgagactaacgcaccaaatcatccgtcccctgccgaatacgtggaagtgttacaagagctgcagaggctggaaagtcggctacagccttttttgcaaagatactacgaggtgcttggtgcagccgctacaaccgactataataacaatcacgaggggagggaagaggaccagagacttatcaacttggtcggtgaaagtctgcgtctcctggggaacactttcgtcgccctctccgacctcaggtgtaatctcgcgtgtacgcctcctagacatctgcatgtagtccggcctatgtcacattacaccactccgatggtgctgcagcaagcagccatccctatccagatcaatgtcggcactaccgtgaccatgactggtaatgggacccgcccaccgcctacacctaatgcagaagcgccacctcccggaccaggccaggctagctcagtagcgcctagctccacaaacgtggagtctagcgcggagggggcacctcctccaggccctgcgccaccacctgccacctcacatcccagggtgatcagaatcagccatcagtcagtcgaaccagtggtgatgatgcacatgaatatccaggattctggcactcagcccggaggagtgccgtccgccccaaccggtcctctcggacctcccggtcacgggcagaccctcggatccaccctaattcagttaccatcgcttcctccggagttcatgcacgctgtggcacatcagatcacacatcaggctatggttgctgctgtcgcttcagctgcggctggacaacaggtgcctgggttcccaactgcgcctacccgcgtggttattgcgagacctaccccccctcaggcacggccatcccatccaggagggcctcctgttagcggtaccctacagggagctgggcttggaacgaacgcttccctggcgcaaatggtcagcggcctagtcggacagctgctgatgcagccggtgttggtcgcccagggaacaccaggaatggcccctcctccagctcctgcaactgcttcggcttcggcaggaactactaatactgcgactacagcaggcccagccccaggcggtcccgctcagccgcctcccacgccgcagccaagcatggccgacctgcagtttagccagcttcttgggaacctgttggggccagccggacccggagctggcggttccggtgtcgctagcccaacgattaccgttgccatgcccggagtgcctgctttcctacaggggatgaccgacttcctgcaggcgacacaaaccgcccctccccctccaccaccccctccgcctcccccaccggcacccgagcagcagacaatgccccctccagggtctccgagtggtggggctgggagccccggaggtctgggccttgaaagtctctcacccgagttcttcacaagtgttgtacaaggggtactgtcctcactcctctag

SEQ ID NO: 215746 - DNA, 3399 bp, synthetic construct
  misc_feature 1..3399: note = Description of Artificial Sequence: Synthetic coding sequence
  source 1..3399: mol_type = other DNA
atggagccaaatgattctaccagtaccgccgtggaggaacctgacagtctggaagtcctcgtcaaaacattggatagtcaaactcgtacctttattgtaggagcccaaatgaacgtaaaggagtttaaggagcatatcgccgcttctgtatccatccctagtgaaaagcagcgtctgatctatcagggcagggtccttcaagacgataagaagctgcaagaatataatgttgggggtaaggtaattcacttggtcgaaagggcccctccccagactcacctgccctccggcgctagctccggcaccggctctgcgagtgccacgcatgggggagggtcaccacctgggactcgcggacctggagcctccgtgcatgatagaaatgcaaattcttacgtgatggtaggcacattcaatctgccttctgatgggtccgcagtggacgtccatattaatatggagcaagcccctattcagtccgagccgagggtccggctcgttatggctcagcatatgattcgggatattcagacactgttgagcaggatggagactttgccttacctccagtgcaggggcggtccacaaccacaacacagccagccaccacctcaacctccagcagtaacccctgagcctgtggctctctcttcccagacgagcgaacccgtggagtctgaagcacccccacgggagcccatggaagccgaagaagtagaggagagggcacctgcccagaaccctgagctgacaccagggcctgcacctgcagggcctactccagcccctgagacaaatgcacccaaccacccctcccccgcagaatacgtagaggtcctgcaggagcttcaaagactggaaagcaggctgcagcccttcctgcagagatactacgaggtgctaggtgccgcagccacgacagactacaataacaatcatgaggggagggaggaggaccagcgcctgattaacctggtcggcgagtccctccggcttcttggcaacacgttcgtggcgttgagcgacttacgctgcaatctcgcctgtaccccccctcgccatctgcatgtcgtgcggcctatgagccactacacgactccgatggtcctccagcaagcagctattccaatacagattaatgtcggcacgacggtgaccatgactggaaacggcaccagaccacctcccaccccgaatgcagaggcgccacctccgggacctggccaggcttcctcagtagcacccagcagcaccaatgtagagtctagcgctgagggggctccaccaccagggccagcccctcccccagccacatcacatccaagggtgattcggattagccatcaatctgtggaaccagtcgtgatgatgcatatgaatatccaggactcaggcacgcagcccggaggtgtcccctcagcccctacgggtcccttgggaccacccggacacgggcaaaccctcggtcaacaggttcccggtttcccaaccgctccaacccgagtcgtcatcgccagacccacgccccctcaagctcgcccttcccacccaggaggaccacctgttagtggcactctgcaaggcgcaggactaggaactaacgcttcgttggcacagatggtgtcgggtctagtggggcagcttctcatgcagcccgttcttgttgcccagggcacacccggaatggcaccacccccagctccagcaaccgcttctgcttccgccggtaccactaataccgcaaccactgccggaccagctccgggaggtcctgcacagcccccaccaacaccccagccaagcatggccgaccttcaattctcacagctgctgggtaatctactcggtccggctggtccgggagccggtggtcccggagtggccagccctacaattaccgtcgcgatgccaggcgtgccagctttcttgcagggcatgacagacttcctgcaggcaacccagaccgcccctcccccaccgcctccaccaccccctccacctcctgcacccgaacagcagaccatgccaccacccggtagcccatctggtggagccggatcacctggtgggctggggttagaatccctttcacctgagtttttcacatccgtcgtgcagggagtgctgtcatctctcttaggatccctgggtgcgagggctggctccagcgagtctatcgcggcattcatccagaggctctctggaagctcgaatatctttgagccaggggcagatggtgccttaggattcttcggcgctctcctgagtctcctctgccaaaacttctctatggtcgacgtagtgatgctcctacacgggcatttccagcctctacagaggctccaaccacaattacgcagttttttccaccaacactatctgggtggacaggaacctacaccctcgaatatccgcatggccacccacaccctgattactggcctcgaggaatatgtgcgggagagtttttctctggttcaggtccaacctggcgtagacattataagaactaacttggagtttctgcaagagcagtttaacagtattgccgcacacgtccttcactgcacagacagcggctttggtgctcgcctgctggaactttgcaatcaaggccttttcgaatgcctggctctaaacctacactgtctggggggtcaacagatggagctggccgctgtcatcaatgggagaatcaggaggatgtctcgtggagtgaatccaagtttggtgagctggctgacgaccatgatgggactgaggctgcaggtggtgttggagcatatgccggtgggccctgacgccatcttaagatatgtgcgcagggtgggagaccctccccagcccctcccagaggagcccatggaagtgcagggagccgagcgggctagccctgagcctcaaagagaaaacgctagtccagctccagggaccacagcagaggaggccatgtcacgcggaccaccacccgctcctgaagggggttcgagagatgagcaggacggcgcatcggcagagacggaaccttgggcagcagcagtccctcctgagtgggtgcccataatccagcaggatattcagtcccagcgaaaagttaagcctcagccaccactgagcgatgcctatctgagtggaatgcccgctaaacgcagaaagacgatgcagggtgaagggccacagctgctgctgagtgaagccgttagtagggcggcaaaggctgccggagctcggccactgaccagtccagagtcattgagtagggatctcgaagccccagaggtgcaggagtcatatcgacagcagcttaggagcgacatccagaagaggctccaggaggatccaaactactctccgcagcgcttccccaatgcccagcgggctttcgcggatgatccctag

SEQ ID NO: 215747 - DNA, 594 bp, synthetic construct
  misc_feature 1..594: note = Description of Artificial Sequence: Synthetic coding sequence
  source 1..594: mol_type = other DNA
atggagccaaacgattccacatcgacagcggtcgaagaaccggattctcttgaggtgttagttaagacactggacagtcagactagaacttttatagtgggagcccagatgaatgtgaaggagttcaaagagcacattgctgcctctgtatcaattccctccgagaaacagagattaatttatcaggggcgagtcttacaggatgataagaagctgcaggagtataatgtgggcggaaaggtcatccacctggtggagagggctccgcctcagactcaccttccttccggggcaagcagtggcaccgggtcagctagtgctacacacggaggcggttctccaccaggcacgcgcggaccgggtgcgagtgtccatgacaggaatgctaacagctacgtgatggtaggaacttttaatttgccttcagatgggagcgccgtggacgtgcatatcaatatggagcaggcacctatccagtccgagccccgtgtccgcttggtgatggcacagcacatgattagggacatacaaacactcctgtctcggatggaatgtcgaggaggaccccaacctcaacacagccagccgccttag

SEQ ID NO: 215748 - DNA, 735 bp, synthetic construct
  misc_feature 1..735: note = Description of Artificial Sequence: Synthetic coding sequence
  source 1..735: mol_type = other DNA
atggagcctaatgactcaacatctaccgccgtcgaagagccggacagtctggaggtgttagtgaaaacattggacagtcagacgcgcaccttcattgtgggggctcagatgaacgtaaaggagttcaaagagcacattgcagctagcgtcagcattccttccgagaaacagcggcttatttaccagggtagagttttacaggacgataagaagctgcaagaatataacgtcggcggaaaagtcattcatctagtcgagcgcgctcctccccagactcacctgccttctggggctagcagcgggacagggtctgcctccgccacacatggaggcggatcccctcctggcacccgcggtcccggtgcttctgtgcatgaccggaacgccaattcctacgttatggtcggcacctttaacctgccatcggagcctagggtcagattagtgatggcccagcatatgatcagggatatacagacactgctttcaaggatggagtgtagaggaggccctcagccgcagcacagccagccgcctccacagcctcccgctgtaacaccggaacccgtggctctatcatcgcaaacttccgaacccgtcgagagtgaggctcccccaagagagccaatggaggctgaggaagttgaagaaagagcaccagcacagaaccctgaattaacaccaggacccgctcccgctggtcctacacccgcaccagaaacaaatgctccctag

SEQ ID NO: 215749 - DNA, 594 bp, synthetic construct
  misc_feature 1..594: note = Description of Artificial Sequence: Synthetic coding sequence
  source 1..594: mol_type = other DNA
atggagccgaacgacagcacctccacggctgtcgaagagcctgacagcttggaggtgctagtcaagaccctggattctcaaaccaggacctttattgtgggcgctcagatgaatgttaaggagttcaaagaacacatcgccgcttcagtgtccattcctagcgagaagcagaggttaatctatcagggccgagtcttgcaggatgacaagaagctccaggaatataatgtcggaggaaaggttatacatctggtcgagcgcgctcctcctcagacgcacctgccatcaggtgcctcaagtggcaccggaagtgcgtccgccactcacgggggtgggagcccacccggaacacgaggcccaggggcatctgttcatgacaggaatgcgaattcttacgtgatggtgggaacatttaacttgccatctgacggcagcgccgtggatgttcacataaatatggaacaagcgccaatacaaagtgagccccgagtgcggctggttatggcccaacacatgattagggacatccagactcttctgtcccggatggaatgtcgtgggggacctcaacctcagcactcccagcctccttag

SEQ ID NO: 215750 - DNA, 1548 bp, synthetic construct
  misc_feature 1..1548: note = Description of Artificial Sequence: Synthetic coding sequence
  source 1..1548: mol_type = other DNA
atggagccaaatgacagtacctcaaccgcagtggaggaaccggattctctggaggtgctcgtcaagactctggatagccagactagaacattcatcgtgggggctcagatgaatgtcaaggagtttaaagagcatatcgcggcttcagtgtctatccctagtgagaagcagaggctcatttaccaaggccgtgtcctccaggatgacaagaagctgcaggaatacaacgtaggaggcaaggtaatacatcttgtggagagggcacctccgcaaacacatttgccatccggcgctagcagtgggaccggctcagccagcgctactcacggaggcggatcaccccctggcacccggggaccaggcgcaagcgtgcacgatcgcaacgccaactcgtacgtgatggttggaacctttaacctccccagcgacggcagcgccgtggacgtccatattaacatggagcaggctcctattcagtctgagcctcgggtaaggttagttatggcccaacatatgattagagatattcagactcttctgtcaagaatggagtgtcgtgggggaccacagccacagcacagccaaccgcctccccagccccctgcagttactcctgaacctgtggcacttagctcccagacgtctgagcctgtggaaagtgaggccccacccagagaaccgatggaggccgaagaagttgaggagagagcaccagcccagaatcccgaactaacaccgggtcctgctccggctggcccaacccccgctccggaaacaaatgctcccaatcacccctcccccgcagaatacgtcgaagtgttgcaagagctccaacgtctggaaagccggctgcaaccattccttcagcgatactatgaagtgctgggcgcagctgcaacaaccgactacaataacaaccatgagggccgtgaggaagatcaacgcctgatcaacctggtcggggagtccctgcgcttacttggcaatacatttgtggcacttagtgatctgcggtgtaatttggcgtgcactccgcctcggcatctgcacgtagtgcgacctatgtcccactacaccacgccaatggtgcttcagcaggccgcaattcccatccagattaatgtcgggacgactgtcaccatgactgggaacggaaccaggccaccgccaactcccaatgctgaggccccacccccaggcccagggcaggcctcttcagtggcgccatcatccacaaacgtggaaagttcagctgagggagcaccccctccaggcccagctcctcctccggcaaccagtcatccgcgtgtaatccggatatcccatcagtctgtcgagcccgttgtgatgatgcatatgaacatccaggatagtgggacccagccagggggtgtgccctctgcacctacaggtcctctggggcctcctggccacggacagacgctcgggagtaccttgatccaattaccttctctcccgccagagtttatgcatgcagtagctcaccagatcacacatcaggcgatggtggccgcagtcgctagctag

SEQ ID NO: 215751 - DNA, 735 bp, synthetic construct
  misc_feature 1..735: note = Description of Artificial Sequence: Synthetic coding sequence
  source 1..735: mol_type = other DNA
atggaaccgaacgattcaacgagcacagccgtggaggaaccagacagtcttgaggtgttggtgaagactctagatagccagacgcgcaccttcatcgttggagcacagatgaatgtgaaagaattcaaggagcacattgccgcatctgtatcgatcccctccgaaaaacagagacttatatatcaggggagggtgctgcaagatgataaaaagcttcaggagtacaatgtcggtggaaaggttattcacctggttgaaagggcaccaccacagacccaccttccatccggagcctcaagtgggacaggctccgcttcggctacccacggagggggaagccccccagggacacgcggtcccggtgcctccgtccacgatcggaatgcaaattcttatgttatggtcgggacttttaatttgccttctgaacccagagtgaggttagtgatggcacaacatatgattcgagatatccagaccctgctgtccaggatggagtgccggggtggaccacagcctcagcatagtcagcctccccctcagccacctgctgtaacccccgagcctgttgccctgagcagccagactagtgagccagtggagtcggaggctccacctcgggagcctatggaagctgaggaagtcgaggaacgggcacccgctcagaatcccgaactgacccccggtcctgcgcctgcgggtccgactccagctcccgaaacgaatgcaccttag

SEQ ID NO: 215752 - DNA, 789 bp, synthetic construct
  misc_feature 1..789: note = Description of Artificial Sequence: Synthetic coding sequence
  source 1..789: mol_type = other DNA
atggaaccaaacgatagtacaagcacggcagtcgaggaaccggacagtctggaagtgctcgtaaaaaccctggatagccaaaccaggacattcatcgtcggggctcagatgaatgttaaggagttcaaggaacacatagccgctagcgtgagcattccctcagagaaacaaagactgatctaccaaggaagggtgttgcaggatgataagaaattgcaagaatacaatgtggggggtaaagttattcatctggttgaaagagctcccccacaaactcatctcccctctggggcttccagtgggactgggtctgccagcgctactcatggagggggaagtccgccaggcacacgcggaccaggagcaagtgtacacgatcgaaacgcgaatagctatgtgatggtaggcactttcaacctgcctagtgatggaagtgctgtggatgtgcacattaatatggaacaagcaccgatacagtccgagccacgcgtgcggctggtgatggcccagcacatgataagggacatccagactctgttatctcgaatggagtgtaggggcggaccgcaaccccagcacagccagcctcctccacaaccacccgcagtgacgccagaacccgtcgctttaagcagtcagaccagcgagcctgtggagtcagaggcccctccaagagaaccgatggaggccgaggaggttgaggaaagagcacctgcccagaatcccgagcttacgcccggaccagcacccgcaggcccaactccggcaccagagactaacgccccatag

SEQ ID NO: 215753 - DNA, 789 bp, synthetic construct
  misc_feature 1..789: note = Description of Artificial Sequence: Synthetic coding sequence
  source 1..789: mol_type = other DNA
atggagcctaacgactctaccagcactgctgtcgaagagccagatagtcttgaggtcttagtgaagacactagacagtcagacaaggacgttcattgtgggtgcccagatgaacgtgaaggagttcaaggagcacatcgcagcgtctgtgtcaatcccctccgagaaacagaggctcatttaccaggggagagtgctccaagacgacaaaaagcttcaagaatacaacgtaggtggaaaggtcatacacctggttgagagggcgccacctcaaacgcacctgcccagtggtgcctcatcagggacgggatcagcttctgctactcatggaggcggatcacccccagggacaagaggaccgggtgcctctgtccacgatcgcaacgccaactcctatgtgatggtcggaacgttcaacctgccaagcgatggcagcgcagtagatgtgcacattaatatggagcaggccccaattcagtcggagccaagggtccgccttgtgatggcacagcacatgattagggacattcagacattattaagccggatggagtgtcggggtggaccacagccacagcactcccagcctccacctcaaccccctgctgtcacgcccgagcctgtggctctgagttcacagactagcgagccagtggaatccgaggcacctccacgtgaaccaatggaggcagaagaagtggaagagcgcgcacctgcccagaaccccgagttgaccccaggccctgccccagccggtcccacaccagcgccagaaactaacgccccatag

SEQ ID NO: 215754 - DNA, 717 bp, synthetic construct
  misc_feature 1..717: note = Description of Artificial Sequence: Synthetic coding sequence
  source 1..717: mol_type = other DNA
tccagcgctgagggcgctcccccaccaggtcccgctccaccacccgctactagtcatccccgagtcatcagaatctcccatcagtctgtagaaccagttgttatgatgcatatgaacattcaggggcctctctcacttagtccttgccctgattctggaacccagcctggaggggtgccttcagccccaacgggccctctgggtccacccggacatggtcagacccttgggcagcaggtacccggttttcctacggctcctactcgggtggtgattgctaggcctactccaccacaggccagaccctcacacccgggtggccctcccgtgagcgggactctccagggggcaggactcgggaccaatgccagtctcgcccaaatggtctctggactggtgggacagctgttaatgcagccagtactggtggcccaggggacaccaggcatggccccaccacccgcaccggctaccgcaagcgccagcgccggaaccactaatacggccaccaccgccggacccgctcctggaggaccggcacagcccccacccacgcctcagccttcaatggccgacctgcaattttcacagcttcttggaaatctgttggggcctgcaggaccgggagctggcggatccggggtcgctagcccaactatcaccgtggctatgcctggggtgccagctttcctgcagggaatgaccgacttcctctag

SEQ ID NO: 215755 - DNA, 735 bp, synthetic construct
  misc_feature 1..735: note = Description of Artificial Sequence: Synthetic coding sequence
  source 1..735: mol_type = other DNA
atggagccgaatgatagcacttcaactgccgtggaggaacctgatagtctggaagtgctggttaaaactctggactcacagacgaggacctttatagtcggagcgcagatgaacgtaaaggagttcaaggaacatatcgcggcttccgtttccatacccagcgaaaaacagcgactcatctatcagggacgcgtgctgcaggacgacaaaaagcttcaggagtataatgtcggcggaaaagtgatacaccttgtggaaagggctccgccacagacacaccttccttccggcgcttccagtggtacaggctcagcctcagctacgcatggcggtggcagtcctcccggaaccagaggtcccggtgcttctgtgcacgacaggaatgcgaattcatacgtaatggtcggcacctttaacctcccaagtgagccaagagtaaggctggtgatggcacaacatatgattcgtgacatccagaccctgttatcacgaatggagtgccggggaggacctcagcctcagcacagccagccaccccctcagccgccagctgtgacgcctgaaccggtcgcactcagttctcagacaagcgagcctgtagagagtgaggcgcctccaagggaaccaatggaggccgaggaagtggaagagagggccccagcgcagaacccagagctgaccccaggcccagcgcctgctgggccaacacccgctccagagaccaatgcaccctag

SEQ ID NO: 215756 - DNA, 621 bp, synthetic construct
  misc_feature 1..621: note = Description of Artificial Sequence: Synthetic coding sequence
  source 1..621: mol_type = other DNA
atggagcccaacgactccactagcacagccgtcgaggagccggattccctggaggtgctcgtgaagaccttggactcgcagactaggaccttcattgtcggcgcacaaatgaacgtgaaggaatttaaagagcatatcgctgcatctgtctctatcccgagtgaaaaacagcgcttgatctaccagggcagggttctgcaggatgataagaagttgcaggagtataatgtcggcggaaaagtgatccatctggttgaacgcgcacccccacagacccatttgccctcgggggcttcaagcgggactggatccgctagcgccacccatggagggggaagtccgcctgggacccgcggacccggtgcaagcgtacatgacagaaatgccaacagttatgttatggtgggcactttcaatcttccctccgagcccagggttaggttggtgatggctcaacacatgatcagagatatacagacgctgctgtctagaatggagtgcagaggcggtccacagccgcagcattctcagccacccccacaacctccagccgtgaccccagaaccggtggctctttcaagtcagacttcggaaccagttgaaagcgaagcccctccttag

SEQ ID NO: 215757 - DNA, 735 bp, synthetic construct
  misc_feature 1..735: note = Description of Artificial Sequence: Synthetic coding sequence
  source 1..735: mol_type = other DNA
atggaacctaacgactccactagcaccgccgtggaagagcccgacagcctggaagttttggtgaaaacactggactcgcaaaccagaacgttcatagtgggcgcacaaatgaacgtcaaagagttcaaggaacacattgcagcaagcgtttctataccatctgagaaacaaagactgatctatcagggacgggtcctgcaggacgacaaaaaacttcaggaatacaatgttggagggaaagtcattcacctggtggagcgcgctcctcctcagacccacctgcccagcggagcttcctccggaacaggaagtgcctccgccacgcacggagggggtagtccgcctggcacacggggtcccggagcatctgtacatgatagaaatgctaactcgtacgtgatggtgggcacatttaacctaccatcagaacccagagtccggctggtgatggcacagcacatgatccgagatattcagacactactgtccaggatggaatgtcggggtggcccacagccacagcactctcagcctcctccacagccccctgccgtcacacccgaacctgtggcactgagctctcagacaagcgaaccagtcgagagtgaggcccctcctagagagccgatggaggcggaggaggttgaagagcgcgcacctgctcagaaccctgagctgactcctgggcctgctcccgcaggtcccaccccagcccctgagactaatgcaccctag

SEQ ID NO: 215758 - DNA, 780 bp, synthetic construct
  misc_feature 1..780: note = Description of Artificial Sequence: Synthetic coding sequence
  source 1..780: mol_type = other DNA
atggaaccaaacgactccacttcaacagccgttgaagagcccgactcactcgaagtgcttgtaaagacccttgacagtcagactcgtacctttatagtcggagcccagatgaatgtgaaggagttcaaagaacacattgcagcttccgtgagcatcccgtctgagaaacagcgcctaatctaccagggccgagtgctgcaggatgataagaagctgcaggagtataacgtcggtggcaaggtcatccacctggtggagcgggcacccccacagacccacctgccctccggagccagctcagggactgggagtgcgtccgccacacacggcggtgggtcgccccctggaacccggggacctggggcttcagtgcatgatcgcaacgcaaactcatatgtaatggttggaaccttcaaccttcccagtgacggatctgcagtcgacgtgcacatcaacatggaacaggcgcctatccagtcggagcccagagtccggttagtaatggctcagcacatgattagggacatccaaactctgctctcaagaatggaatgccgtgggggacctcaaccacagcactcccagccccctccacagccccctgcagtcaccccggagcctgtggctctttcatctcagacaagtgaacctgtggaatctgaagctcccccaagagagcccatggaagcagaagaagtggaggagcgcgctcctgcgcaaaacccagagttaactccaggacccgctcctgctggccctacacctgctccagagacttag

SEQ ID NO: 215759 - DNA, 558 bp, synthetic construct
  misc_feature 1..558: note = Description of Artificial Sequence: Synthetic coding sequence
  source 1..558: mol_type = other DNA
tagttagcatgcaccccccctaggcacctccatgtggtacgccctatgagccattacacaacccctatggtgctccaacaggccgctatccccatacagatcaacgtcggcaccaccgtcacgatgactgggaacggcaccaggccccctcctaccccaaatgcagaggcaccgcctcccggtcctggtcaggcctccagcgtagccccttcttctactaacgtggaaagtagtgcagagggtgcacccccaccaggtcccgcaccccctccagctactagtcaccctcgcgttatccgaatctctcaccagagcgtcgagcctgttgttatgatgcacatgaacatacaggggcagcaagtgcccggatttcccaccgctccaactagagtggtcattgccagaccaacgccacctcaggcacgtccctcacaccccggtggcccaccggtgtcaggaaccctgcagggagctgggctgggtacaaatgcatcgctggcccagatggtgtcaggcctcgttgggcagttgttaatgcagcccgtcctcgttgcctag

SEQ ID NO: 215760 - DNA, 621 bp, synthetic construct
  misc_feature 1..621: note = Description of Artificial Sequence: Synthetic coding sequence
  source 1..621: mol_type = other DNA
atggaacccaatgatagcaccagcactgctgtggaggagccggattctctggaagtgctagtgaagacgctcgactcacaaacccgcacattcattgtcggtgctcagatgaatgtcaaagaattcaaagagcatatcgccgcttctgtctcaataccaagcgagaagcagcggttaatataccaggggagagtccttcaggacgataagaagttgcaggaatataatgtgggtggaaaggttatacatctcgtggaacgcgcaccccctcaaacgcatctgccatccggggcatcttccggcactggaagcgcttcagccacccatggcggtgggagcccacctggcactcggggaccaggtgcttcagtgcacgatcgcaatgccaattcttacgtcatggttggcacctttaatctgccatccgagccacgagttagacttgtgatggcgcagcatatgattagggacatccagaccttattgagcagaatggaatgtcggggtggacctcagcctcagcactcccagcctccccctcagccacccgctgtgaccccggagcctgtggctttatcaagccagacaagcgaaccagtcgaatcagaggcacccccatag

SEQ ID NO: 215761 - DNA, 735 bp, synthetic construct
  misc_feature 1..735: note = Description of Artificial Sequence: Synthetic coding sequence
  source 1..735: mol_type = other DNA
atggagcctaacgactccacttccactgctgttgaagagccagattctctcgaggtcctggtcaaaacactcgactcccagactcgcacgttcattgttggcgctcagatgaacgtgaaggaattcaaggagcacatcgcagcttccgtctcaattcctagcgaaaaacagcggcttatttatcagggcagagtcctacaggatgacaagaagcttcaagagtataacgtcggcggaaaggtgatacacctcgtggaacgagccccaccgcaaacccacctgccaagcggagcaagtagcggcaccggatccgcctccgcgacacacggcggaggatctccaccaggaaccaggggtccgggagcatccgtccatgatcgtaatgccaacagctacgtgatggttggaactttcaacctgccttcagagccaagagtgagattggtgatggctcagcatatgatccgagatattcaaactctcctcagccgaatggagtgccgtgggggtccacagccacagcactcccagccacctcctcagccacccgcagttacccctgagccagtggccctatcgagccaaacaagcgaacctgtagagtctgaggcccctcccagggagcctatggaggcagaggaagtagaagagcgggctccagcacagaatcctgaattgacacctggccctgcccctgcaggacccacacccgctccggagaccaacgcaccatag

SEQ ID NO: 215762 - DNA, 1548 bp, synthetic construct
  misc_feature 1..1548: note = Description of Artificial Sequence: Synthetic coding sequence
  source 1..1548: mol_type = other DNA
atggagcccaacgattctacatccacggccgtggaggagcccgactccctggaagtgttggtgaaaacccttgattctcagacaaggaccttcatcgtgggggctcagatgaacgtcaaagagtttaaagagcatattgcggcatcggtgtccattcctagcgagaaacagcgcctaatttaccagggacgagtcctccaagacgataagaagctccaggagtataatgtgggcggtaaggtgattcatctggtcgaacgggctcctccacagacccacctcccgagtggagcctcatcggggacaggttcggcgtctgccacccacggaggtggctctccccctggcacacgaggtcccggagctagcgttcatgatagaaacgcaaactcttacgtaatggtaggcacatttaatctgccgagtgatggatcagccgttgacgtgcacatcaatatggagcaggcgcctattcagtcggagcccagagttagactggtcatggctcagcacatgattcgggacattcaaacattattatctagaatggaatgccggggtggaccccagcctcaacattctcagccacctcctcagccaccagccgtgacacccgaacctgtcgcgttatcatctcagacctctgagccggtggagtctgaagccccaccacgagagccaatggaggccgaagaggtggaagaacgcgcaccagctcagaatcctgaactgactcctgggcctgcccctgcgggacccacgccagcaccagagacaaacgccccaaaccaccccagccccgcagaatacgtggaagtgctgcaggaactccagaggctggagtccagacttcaacccttcctacagagatattatgaggtactgggcgctgctgctaccactgattacaataacaaccacgagggccgagaagaagaccagagattaatcaacctggtgggggaaagtttaaggctcctaggcaacacatttgtagctctttcagacttgagatgtaatcttgcctgcacacctccgaggcacctacacgtcgttagacctatgagccactatactaccccaatggtactccagcaggccgctatccccatacagataaacgtcgggacaactgtgacaatgaccggaaacggcacaagacctcctcctactcccaatgccgaagcacctccaccaggcccaggacaggcatcctccgtggccccttccagcaccaatgttgagtcaagcgcagagggggctccgcctcccggaccggctcccccacctgctacttctcacccacgggtgatcagaatcagccaccagtccgtagaaccagttgtgatgatgcatatgaatatacaagatagcggcacgcagccaggcggtgttccttccgcccctaccggccctctcgggcctcctgggcatgggcagacgctggggtcaactctgatccagctgccctcattgccccctgagttcatgcacgctgtggcgcaccagatcacccaccaagctatggtcgctgctgtagcttcttag

SEQ ID NO: 215763 - DNA, 717 bp, synthetic construct
  misc_feature 1..717: note = Description of Artificial Sequence: Synthetic coding sequence
  source 1..717: mol_type = other DNA
tcctctgccgagggggctccaccaccgggtcccgcaccccctcctgctacatcgcatcctagggtgatccgcatttcccatcagtctgtggagcctgtagtgatgatgcacatgaatattcaaggcccactgagtctgagcccctgcccagatagtggaacgcagccaggaggagtcccatcagcccctactgggccactgggcccacccggtcatggtcagacattgggccaacaggtacccggatttcccacagccccaactagagtcgtgattgctagacccacacctccacaagcaagacccagtcatccaggcggtccacctgtgtctgggacactgcagggagccggactgggaaccaatgctagcctggcgcagatggtatccggcctggtgggccaactgctgatgcagcctgtgctggtagctcagggtactcccggaatggccccacctcccgcacccgcaaccgcgagtgcatccgctggcacaacaaacacagccacaaccgccggtcctgctcccggaggtcccgctcagccacctcccaccccccagccatcgatggctgatctacagttcagtcagctcctaggcaatctgctgggacctgccggtccaggggctgggggtcccggagtcgcttcgccgacaataactgtggccatgccaggggtacctgccttcctccagggcatgaccgacttcctctag

SEQ ID NO: 215764 - DNA, 648 bp, synthetic construct
  misc_feature 1..648: note = Description of Artificial Sequence: Synthetic coding sequence
  source 1..648: mol_type = other DNA
atggagccaaacgacagcacttccactgcagtcgaagaacctgattccctcgaggtgttggtaaaaactttggactctcagaccagaacgtttattgtaggagcccagatgaacgtcaaagagttcaaggagcacatcgctgcctccgtgtctatacctagcgaaaagcagcgcctcatctaccagggccgtgtactgcaggatgataagaaactccaggaatacaatgtggggggtaaagtcattcatctcgtggagagggccccacctcagactcacttaccttccggcgctagctctggaacggggtccgcctctgccactcatggcggtggatcccctccaggtacccggggtcccggagcctcagtacacgatcgcaatgcaaattcttatgtgatggttggaaccttcaaccttcccagtgagccaagggtgcgacttgtgatggctcaacatatgattcgagacattcagacacttctgtctaggatggaatgccgcggtggtccacagccacagcatagtcagcccccaccgcagcctcctgccgtgaccccagaacctgtcgccctgtcctcacagacttcagaacccgtcgaatcggaggctcccccaagagagccaatggaggcagaagaggtgtag

SEQ ID NO: 215765 - DNA, 477 bp, synthetic construct
  misc_feature 1..477: note = Description of Artificial Sequence: Synthetic coding sequence
  source 1..477: mol_type = other DNA
atggagcccaatgactctacatccacggcagtggaagaacctgactccctggaagtgctagtcaaaactttggactcccagaccaggacgtttattgttggagcccagatgaacgtcaaggaatttaaggagcacattgccgctagcgtgtcaatcccctctgaaaaacagcgtctgatttaccaaggcagagttctacaggatgataagaagcttcaagagtacaacgtgggtggaaaggtgatccacctggtggagcgtgccccaccccagactcatttgccctctggtgctagtagcggaactggaagcgcatctgccacccacgggggaggttctccccctggaaccagaggacccggtgcatcagtgcacgacagaaatgcaaactcttacgtgatggtcggcactttcaacctgccgtcagatggcagcgccgtggacgtgcacattaacatggagcaagctcccatctag

SEQ ID NO: 215766 - DNA, 702 bp, synthetic construct
  misc_feature 1..702: note = Description of Artificial Sequence: Synthetic coding sequence
  source 1..702: mol_type = other DNA
atggagcccaacgattcaacaagcaccgctgtggaagagcccgatagcctggaggtcctcgtcaagacattggacagccagaccaggactttcatcgttggagcacagatgaatgtaaaggagttcaaagaacatatcgcagctagtgtgtccattccctccgagaaacagagattgatttatcaaggcagagtccttcaggatgacaagaaattacaagagtacaacgttggaggcaaggttatacacctggtggagcgggcacccccacaaacacatctgccctctggagctagctcaggtactggaagtgccagcgctacacatgggggaggcagcccacctggcacgcgcggacccggagcatctgtgcatgacaggaacgctaatagctacgttatggttgggacattcaacctcccttctgacggatcagccgtggatgtgcatattaacatggaacaagctcctatccagtcggagccacgggtaagactcgtaatggcgcagcacatgatacgcgacattcagacgctgctgtcaaggatggaaacccttccatacctgcagtgccgcggtggaccacaacctcagcactcccagccaccgccacagcccccagcagtgacacccgaacccgtggctttaagtagccagacgagcgaaccagtggagtccgaagccccaccaagggaaccatag

SEQ ID NO: 215767 - DNA, 780 bp, synthetic construct
  misc_feature 1..780: note = Description of Artificial Sequence: Synthetic coding sequence
  source 1..780: mol_type = other DNA
atggagcctaatgactcaacatccaccgcggtggaggaacccgatagcctggaggtacttgtgaaaaccttggattcacagacacggaccttcattgttggcgcacagatgaacgttaaagaattcaaggagcacatcgccgcaagcgtcagtatcccctccgagaaacagcgattaatttatcagggacgcgtgctgcaggatgataaaaagctacaggagtacaacgtggggggtaaagtaatacatctggtagaacgcgcaccacctcagactcatctgccgagtggggctagctcagggaccggcagcgcgagtgccactcacggtggaggtagcccccctggaaccagaggaccaggtgcgagcgtccacgatagaaatgcaaatagctatgtcatggtgggcacattcaatctgccaagtgatggatccgccgtggacgttcatatcaatatggaacaggcgccaattcagagtgagcctcgagtgcggctcgtgatggcacagcacatgatccgggatattcaaaccctgctgtcccggatggaatgccggggaggtcctcagccccagcattcccagcctcctccacaaccgccagccgtcacccccgaacccgtcgccctcagctcccagacctccgagcctgttgagtctgaggcccctccccgagaaccaatggaagctgaggaagtggaagagcgggctccggctcagaatccagagctgacaccaggcccagcgcctgctggccctaccccagctcctgaaacgtag

SEQ ID NO: 215768 - DNA, 411 bp, synthetic construct
  misc_feature 1..411: note = Description of Artificial Sequence: Synthetic coding sequence
  source 1..411: mol_type = other DNA
tgaaggatgagcagaggcgttaaccccagcctcgtgtcttggttgacaacaatgatgggactcagattgcaggtggtgcttgagcacatgcctgtgggtccagacgccattttgagatatgtgaggagagttggcgatcccccacagcctctgcctgaggaaccaatggaggtgcagggcgctgagcgcgctagcccggaaccccaggagtgggtcccaattatccagcaggacatccaatcccagcggaaggtaaaaccccagcctccactatcagacgcctacctgtccgggatgccggctaagcgcaggaaactgcggtctgacatccagaagaggctgcaggaggaccccaattatagtccgcagcgcttcccaaatgcacaaagagccttcgccgatgatccatag

SEQ ID NO: 215769 - DNA, 735 bp, synthetic construct
  misc_feature 1..735: note = Description of Artificial Sequence: Synthetic coding sequence
  source 1..735: mol_type = other DNA
atggagcccaatgattctacatctaccgctgtggaagaaccagattctctagaagttctggtgaaaacactcgacagtcaaacgcggacctttatagtcggcgcacagatgaacgtcaaggagtttaaagaacacatcgcggcttcagtgtccatccctagcgagaaacaaaggctgatctaccagggacgggtgttacaggatgataaaaagttacaggagtacaacgtgggtggtaaggtgattcacttggtggaacgggctccaccccaaacacacttaccatctggcgcttcatccggcaccggttcagcaagtgccacccatggcggaggatctcctcctgggacaagagggccaggagcttccgtgcatgaccggaatgccaactcttacgtgatggtgggcacttttaacttgccttcggagcccagggtgcgacttgttatggcccagcacatgatcagggacatccagaccctcctgagtagaatggaatgtagaggaggaccgcaaccccagcacagccagcctccccctcaaccaccagccgtcactcctgaacctgtggctctcagtagccagacgtctgaacctgttgagtcagaggcaccacctagggaaccaatggaggccgaggaggtggaagaaagagcaccggctcagaatcccgaacttacacccggacctgcgcctgccggaccaacacccgctcctgagaccaacgcgccttag

SEQ ID NO: 215770 - DNA, 3381 bp, synthetic construct
  misc_feature 1..3381: note = Description of Artificial Sequence: Synthetic coding sequence
  source 1..3381: mol_type = other DNA
atggagcccaacgattctacgtctacggccgtcgaagagccggattcactcgaagtgctggtgaaaactctggacagtcaaactcgcacatttattgtgggtgcccagatgaatgtaaaggaattcaaggagcacattgccgcatctgtctccattcccagcgaaaagcagcgcctaatttatcagggtcgtgtgctgcaggacgacaagaagctacaagaatataacgtgggcggtaaggtcatacacctggtcgagcgcgctcctccccagacccatctgccctccggagctagcagcggaactgggagtgcaagtgctactcatggagggggatcacctccaggtaccagaggtcctggagccagtgttcatgatcggaatgccaacagctacgtgatggtagggacattcaatttgcccagcgacgggtccgcagtggacgttcacataaacatggagcaggcccctattcagagcgaaccacgggtgagattggttatggcccagcacatgattcgcgacatccagaccctgctctctagaatggagtgtcgtggcggacctcaaccccagcacagccagccgcctccccagcccccagccgttacccccgagcctgtggctttgagttcccaaacgagcgagccagtcgaaagcgaagcaccgccacgggaaccgatggaagccgaagaagttgaagagagggcccctgctcaaaatcctgagttgacccccggtccagcccctgcaggccctactcccgctcctgaaacaaacgctcctaaccatccatctccagcggagtacgtcgaggtgctccaggaattgcagcgcctggaatcccgcctgcaaccattcctgcaacggtactatgaggtgttgggagctgcggctacgactgattacaataacaaccacgagggacgggaagaagatcagcgcctgattaaccttgttggggagtccctgcgtctgttgggcaatacctttgtcgcactgagcgacctcagatgtaatctggcatgcactccgccacgccacttgcatgtggttaggcccatgagccattatacaactcccatggtgctgcagcaggcagccatcccgattcaaatcaacgtgggtactacggtgacaatgactgggaacggcacccgccctccgccaactcccaatgcggaggcacccccacctggccctgggcaggctagttccgtggcaccgtcaagtaccaacgtggagagcagcgccgagggagccccacctcctgggccagcgcctccacctgctaccagccaccctagagtgattcggatatcccaccagtccgtagaacccgtggtgatgatgcatatgaatattcaggattccggaactcaaccgggaggcgtgccctccgctccaacaggcccactgggacccccaggacatgggcaaacccttggccaacaggtgccaggcttccccactgcccctacccgggtagtgattgcacgacccactccacctcaagcccgtccatcccatcctggcggacctcccgtttcaggaaccctgcaaggggcaggcctggggaccaacgctagcttggcgcagatggtatcaggtctggtagggcaactgctaatgcagcctgtgcttgtcgctcagggaactcccggaatggctcccccacctgctcccgctacagcctctgcaagcgcaggaactaccaatacagcgacgacagctggaccagccccaggagggcctgcacagccacctccgaccccacagcctagcatggctgacctccagttcagtcagctgctgggcaacttgctcggtcccgctggccctggcgctggcggacccggagttgcttctcccacaatcactgtggctatgccaggggttcctgcattcctacaaggaatgacagatttcctgcaggccacccagactgcgccacctcctccaccccctccacctccccctcctcctgctccagaacagcaaacaatgccaccacccggatccccaagcgggggagccggatcacccggtggtttgggtctagagtcacttagcccagagttctttactagcgtcgtacagggagtcctcagctctctgcttggctctcttggcgcacgtgcaggaagctcagaatccatcgccgcttttatacagagactctctggttcaagtaacatcttcgagcccggtgccgatggggcactcggctttttcggggctcttttgtccctgttgtgtcagaatttctcaatggtcgatgtcgtcatgctgctgcacggccatttccaacctctgcaaaggctgcaaccccaattgcgtagcttttttcatcagcactacctgggaggccaggaacccacgccatccaacatccgtatggcaacccacaccctcatcacagggctggaagaatatgtccgtgaatcattctcccttgtgcaagtacagccaggagttgacattataagaactaacctcgaatttcttcaggagcagttcaatagtatcgccgcacatgtgcttcattgcactgattctggtttcggtgcccgactgcttgaactctgtaatcaaggtctctttgagtgcctcgcacttaacctgcattgcctaggtggacagcagatggagctggcagccgtaatcaatgggaggatacggagaatgtcccgaggagtgaacccgtcactcgtgagctggctaaccaccatgatgggtctgaggctgcaggtcgtgctggaacacatgccagtcgggccagatgctattctcagatacgttcgcagggttggagatcccccacagccgcttcctgaggaaccaatggaagtacaaggagcagaaagagcaagcccagagccgcagcgagagaatgcctcacccgctcccggaacaaccgctgaggaagccatgagccgcggacctcctccagctcctgagggagggtccagagatgaacaagacggtgcgagcgctgagaccgagccttgggccgcagcggtgccccctgaatgggtccctatcatccagcaggacattcagagtcagcgcaaggtcaaaccccagccacctctaagtgatgcctatctgtctggcatgccagctaagagacggaaaacaatgcaaggagaagggccacagttactcttatctgaggctgtctcacgagcggctaaggccgcaggggctaggccgcttacatctccagaatcactgagccgcgacctagaagcccctgaagtgcaggagtcttaccgccagcagttgcggtccgacattcagaaacggctgcaggaagatccaaattacagtccgcagcggttccccaacgctcagcgcgctttcgccgacgatccctag

SEQ ID NO: 215771 - DNA, 411 bp, synthetic construct
  misc_feature 1..411: note = Description of Artificial Sequence: Synthetic coding sequence
  source 1..411: mol_type = other DNA
tagcgtatgtcaaggggtgtcaacccatctctggtgtcatggctcacaaccatgatggggcttcggctgcaggtggtgctcgagcacatgccagtcgggcctgacgcaatactgcgatatgtgcggagagtgggtgatcctcctcaacccctgccagaggagccgatggaggtgcagggagccgagcgagcatcgcctgagcctcaggagtgggtgcccattatccaacaggacatccagagccaacggaaagtgaagccacagcccccattgtctgacgcttatttgtcaggaatgccagctaaacggaggaagctgcggtccgacatccaaaagaggctgcaagaggaccctaactatagtccgcagagattcccaaacgcacagcgcgctttcgccgacgatccgtag

SEQ ID NO: 215772 - DNA, 648 bp, synthetic construct
  misc_feature 1..648: note = Description of Artificial Sequence: Synthetic coding sequence
  source 1..648: mol_type = other DNA
atggagccaaacgatagtacatcaaccgccgtggaagagccggactcactcgaggtgctggtgaagactctcgattcacagacccggaccttcattgtgggtgcacagatgaacgtgaaggagtttaaagagcatatcgcagctagcgtgagcattcccagtgagaagcagagattgatttatcagggtcgagtgctgcaggacgataagaagctccaggaatacaatgtggggggtaaagtaatccacctcgtcgagagagctccgcctcagactcacctgccgtcaggtgcgtcatctggaaccggatccgcttctgccacacatgggggaggctcaccacctggtactagggggcctggcgcatctgtgcatgatcggaacgcgaactcttacgtcatggttggaactttcaatctccccagcgagcccagagtgcgtctggtcatggcgcagcacatgattcgcgatattcagactctgttatccagaatggagtgtcgcggtggacctcaaccgcagcattcccaaccgcctccccagccacctgctgttactccagagccagtggcgctgtcctcccagactagcgaacccgtggagtctgaagctccccctcgcgaaccgatggaggcagaggaggtttag

SEQ ID NO: 215773 - DNA, 594 bp, synthetic construct
  misc_feature 1..594: note = Description of Artificial Sequence: Synthetic coding sequence
  source 1..594: mol_type = other DNA
atggaacctaacgattcgacgagtaccgcagtcgaggaacctgattctttggaggttctcgtgaagactctcgatagtcagaccaggacctttatagtcggcgcacagatgaacgtaaaagaattcaaggaacatatagcagcctccgtgtccataccatctgaaaagcagaggctgatctaccaggggcgagtcctgcaggatgataagaagcttcaggagtacaatgtaggaggcaaggtgatccatctggttgagcgggctcctccccagacgcatttacccagcggggcaagttcagggacagggtccgctagcgcgacccacgggggaggctctcccccaggaacccggggacccggtgctagcgtgcacgacaggaacgccaatagctatgtgatggttgggacttttaacctgccctcggacggctctgcagtcgacgtccatattaatatggagcaagcgccaatccagagcgagcccagagtgagacttgtgatggctcagcatatgattagggatattcagactcttctttccaggatggagtgtaggggcggaccccagccccagcattcccagcccccatag

SEQ ID NO: 215774 - DNA, 1548 bp, synthetic construct
  misc_feature 1..1548: note = Description of Artificial Sequence: Synthetic coding sequence
  source 1..1548: mol_type = other DNA
atggaacctaacgatagcacctctacagccgtggaagagcccgactcgctggaggtgctggtcaagacacttgattcccagacacgtactttcattgtgggcgctcagatgaatgtgaaagaattcaaagagcacatcgctgcctctgtatccattccatcagaaaagcaaaggctgatataccaagggagggtgctgcaggatgataagaagctccaagagtataacgtgggtggcaaggtcatccatctcgtggagagggcccctcctcagactcacctgccctccggagcatcctcaggaacaggaagtgcctccgccacacatggaggcggttcgcccccagggacccgaggaccaggcgcatctgtgcacgaccggaatgccaactcttacgtaatggtaggtactttcaacctaccgtctgatggctcggctgtcgacgtgcacataaatatggagcaggcacctatccagtctgagccacgtgtcagattagtgatggcacagcacatgattcgcgatatacagacactactttcaaggatggagtgccgcggaggaccccagccccaacactcgcagccgccaccacagcctccagcagtgacgccagaacctgtcgctctcagtagtcagacgagcgaacccgtagagtcggaagctccccctagagagccaatggaggcggaggaagtggaggagagagctccagcccagaatcctgagttaacaccagggcctgctcctgccggtcctacaccagcacctgaaaccaatgcccctaatcaccctagccctgcagagtacgtggaagtattgcaagagttgcaaagactggagtcacggctgcaaccattcctccagagatactacgaagtgctcggagccgcagcgaccacagactacaacaacaaccatgagggaagggaggaggaccagagattgattaacttggtcggagaaagtcttagacttttaggcaataccttcgttgctttatctgacctgcgctgcaacctagcctgtaccccaccgagacatctgcatgttgtcaggccgatgtcccactatactaccccgatggtgcttcagcaggcggctattcctatccagataaatgtcggcaccacagtgactatgactggaaacggcacacgccctccacccaccccaaatgcggaagctccaccaccaggaccgggacaggcaagttcagtcgcgccaagctctacaaatgtggaatcctcagcagaaggagccccaccacctggtcccgcacccccacctgccacctcccacccacgcgtcatcagaatcagccaccagagtgtggaacccgtggtcatgatgcatatgaatattcaggattccggcacccagccagggggagttccctcagctccaactggaccactggggcctcccggacacggacagaccctggggtccacactgatccaactgccctctctccctcccgagttcatgcacgcggttgctcaccagattacccatcaggccatggttgctgccgttgcttcctag

SEQ ID NO: 215775 - DNA, 738 bp, synthetic construct
  misc_feature 1..738: note = Description of Artificial Sequence: Synthetic coding sequence
  source 1..738: mol_type = other DNA
ccgcctagacatctgcacgttgtgcgcccaatgtcccattacaccacgcctatggtcctgcagcaggcagccataccaattcagatcaacgtggggacaacagtcacaatgactgggccagcacctccacccgcaaccagtcatcctagagtgatccggatctcccaccagagtgtcgagccagtagttatgatgcatatgaacatccaggacagtggcacccaaccgggaggtgtgccatccgccccaactggccctctcgggcctcctggtcacggtcagactctaggtcaacaggtgccaggtttcccaaccgcgcctactcgcgtggtaatagcaagacccacacccccacaggccaggccgtcccatcccggaggacccccagtgtcaggtacgctgcagggcgcaggcttagggacaaacgccagtcttgcccaaatggtgtctggactggtgggccagttgttgatgcagcccgtactggtagcacagggcacgcccggtatggcgccaccacctgccccagctacagctagtgcatcggctggcaccactaatactgctactaccgcaggtcccgctcccggaggccctgcacagccaccgccaacaccacagcccagcatggccgaccttcagttctcgcagctgctaggaaacctactgggacccgctgggccaggcgctggaggtccaggagtggccagccctactataacagtggcaatgccatag

SEQ ID NO: 215776 - DNA, 738 bp, synthetic construct
  misc_feature 1..738: note = Description of Artificial Sequence: Synthetic coding sequence
  source 1..738: mol_type = other DNA
cctcctcggcatctgcacgtggtgagacccatgtctcactatacaacacctatggttctacagcaggcagcaatcccgattcagatcaacgttggcaccactgtgacaatgaccggcccagcccctcctcccgcaacttcccatcccagggtcatcagaattagtcaccagtcagtggagccagtcgtaatgatgcacatgaacattcaggactccgggacacagcccggtggagtgccaagtgccccaacgggaccgctaggaccccctgggcacggccagactctggggcagcaggttccgggattccctacagcccctacccgagtcgttatagcaaggcctactcctccacaggcacggccatctcaccctggaggcccacctgtttctgggactctccagggggctggcctgggtaccaatgcatctctggcccagatggtctctgggttagtcggccaactcctgatgcagcccgttctggtagcccagggaacacccggtatggctccccctcccgcacccgctaccgcatccgcaagcgctggtactaccaacacagctactacggccggacccgctcctggtggacccgcacagcccccaccaactccgcagccatctatggctgacctccagtttagtcagctcctcggcaacctgttaggccctgccggaccgggtgctgggggttcaggagtcgccagtccaactatcaccgtcgctatgccatag

SEQ ID NO: 215777 - DNA, 777 bp, synthetic construct
  misc_feature 1..777: note = Description of Artificial Sequence: Synthetic coding sequence
  source 1..777: mol_type = other DNA
atggagccaaatgactcgacatccacagcggtcgaggagccagattcattggaggtgctagtaaagaccctcgattctcaaaccagaacttttattgtgggcgcacagatgaacgttaaagaatttaaagagcacatcgcagctagtgtgagcatccccagcgagaagcagcgcctgatttatcagggtcgtgtacttcaggatgacaagaagctgcaggagtacaacgtcggtggcaaagtgattcatctggtggagcgtgcacccccacaaacacatctgccttcaggggcatcctcaggtacgggcagcgcctctgccacacacggcggaggctcacccccaggaactagaggaccaggtgcatcagtgcacgaccggaacgccaacagttacgtgatggtcggcacattcaatctgcctagcgacggaagtgcggtggacgtgcacatcaatatggagcaggccccaatacagagtgagcctcgcgtgaggctcgtgatggctcagcacatgataagggatatccagaccctgttgtcccgcatggagtgccgaggtggacctcagcctcaacactcacaaccaccacctcaaccgcctgctgtaactccagagccagtggccctgagcagccaaacatctgagcctgtagagtctgaagcaccaccaagggaaccaatggaggctgaagaagtggaggagcgcgcaccagctcagaatcctgagctgacacccggacccgctcccgctgggcctacccctgctccggaatag

SEQ ID NO: 215778 - DNA, 789 bp, synthetic construct
  misc_feature 1..789: note = Description of Artificial Sequence: Synthetic coding sequence
  source 1..789: mol_type = other DNA
atggagccgaatgacagtacctccactgccgtggaggaaccagatagcctggaggtgcttgtgaaaaccctggactcacagacgaggaccttcattgtgggggctcagatgaacgtaaaggagttcaaagaacacattgccgcaagtgtgagcattccttccgagaagcaacgcctcatctatcagggaagggtgttgcaggatgacaaaaaactccaggagtataatgtaggtggtaaagtgattcatctggtggagcgggctccgccacagactcatttgcctagcggcgcatcatctggcactggatctgccagcgccactcacggtgggggtagcccgcctggcacgagaggccctggggcaagcgtgcacgataggaatgcaaactcctatgttatggtcggaacctttaatctaccatcggatggttcagcagtagacgttcacataaatatggaacaggcacccattcaaagtgagccacgagtccgattagttatggcacaacacatgattagggatatccaaacactgctttcacgcatggagtgccggggagggcctcagcctcaacacagccagccaccccctcagcctcccgctgttacaccggaacccgtagctctaagctcacagacttcagagcctgttgaaagcgaggcaccacccagagagcctatggaagctgaggaggtggaggaaagagcccctgcccagaacccggagctgacaccgggtccagcacctgctggccctacaccagctccagagacgaatgctccttag

SEQ ID NO: 215779 - DNA, 2232 bp, synthetic construct
  misc_feature 1..2232: note = Description of Artificial Sequence: Synthetic coding sequence
  source 1..2232: mol_type = other DNA
atggaacctaacgactcaactagtacagccgtggaggaacccgattcccttgaggtgttggtcaagactctagattctcagacccggacattcattgtgggtgctcagatgaatgtgaaggagttcaaggaacacatagcagctagtgtgtctatccccagcgagaaacagagactcatctatcagggtcgcgtgctgcaggacgataaaaaactccaggagtacaacgtggggggtaaggtgattcacttggttgaaagggccccacctcaaacccacctgcctagtggtgcatccagcggtaccggttctgcctctgctacacacggaggcggttcccctccgggtactcgcggtcccggtgcttccgtgcatgacagaaatgccaattcctatgtgatggtgggcacctttaacttgccaagcgatggatccgccgttgatgtccatataaatatggaacaggcacctatccagtcggaaccgagagttaggctggtgatggcgcagcacatgattcgggacatacaaacgcttctcagcagaatggaatgtcgcggaggcccacaaccccaacattcacagcctcctcctcagccacccgcagtgacacctgaacccgtcgccttaagctctcaaacctccgaacctgtggaatccgaggctcccccaagagaaccgatggaggcggaggaggtggaggagcgagcccctgctcagaatccagagctaacccccggtcctgcgcctgctggtcccacacccgcaccggagacaaacgccccaaaccacccatcccccgcagagtacgtggaagtgctccaagagttgcagcgcctggaatcaagactgcagccttttctacagcgctactatgaggttctaggagcagcggcaaccactgattacaataataatcatgaggggagggaggaagaccagagattgatcaatctggtgggggaatcacttaggctgctgggcaacacttttgtggccctctccgatctgaggtgtaatctggcctgcaccccaccccgacacctgcacgtcgtccggccaatgagtcactatacaacacccatggtcctccagcaggctgccatccccatacagatcaatgttggcaccaccgtcaccatgactgggaacgggacacgcccaccacccacccctaacgcagaagcacctccacctggacccggtcaggcatcctccgtcgcaccatcttcaaccaacgtagaaagtagtgcagagggggcacctccgcctggccctgcacctcccccagccacttctcaccccagggtcatccgaatatcccaccagagtgttgaacctgtggtgatgatgcacatgaacatccaagattcaggaactcagcccggtggcgtcccatccgcccctaccgggcctcttggccctcctggtcacggacagaccttgggcagcacactcatacagctgccttccctgccaccagaatttatgcacgccgtcgcccatcagattactcatcaggcaatggtcgctgcagtggcttccgccgctgcgggacagcaagtgcccggattccccacggcacctacaagggtggtcatcgcaagacctactcccccacaggcaagaccttcacaccccggaggccctcctgtgtctggtaccctgcagggggctgggcttggcactaatgctagtcttgcccagatggtgagcgggctggtcggtcagcttctaatgcagccggtcctcgtggcccagggcactcccggaatggcgcctccacctgccccagccaccgcgagtgccagtgcaggaacgacgaacaccgctactacagcaggcccagctccaggtggccctgcgcagccgcctcctacacctcagccaagcatggccgatctgcagttctctcagcttctgggaaatctgctgggtcccgctgggccaggtgctggcggtagcggagttgcatcaccgaccattacagtagctatgcctggagtgcccgctttcctgcagggtatgactgattttctccaggcaacacagacagctccaccccctcctcctccacctccgccacctcctccagctcctgagcagcagactatgcctccaccaggatcacctagcggaggggctggctcacccggaggattgggcctggagagcctcagtccagaattctttacttcggtagtgcagggagtactctctagcctgctttag

SEQ ID NO: 215780 - DNA, 777 bp, synthetic construct
  misc_feature 1..777: note = Description of Artificial Sequence: Synthetic coding sequence
  source 1..777: mol_type = other DNA
atggagccaaacgactctactagcacggctgtggaagagcctgatagcctggaggtgctcgtcaagacccttgactcacagactcggacattcatcgtgggagcgcagatgaatgtgaaagagttcaaggaacacatcgccgcaagcgtgagcataccctctgaaaaacaaagattaatataccaggggagagtgctgcaggacgacaagaagctgcaggaatacaacgtggggggtaaagtcattcacctggtcgagcgtgcgccaccacaaactcacctgccaagtggtgcctcctccgggactggatctgctagcgccactcacggcggtgggtccccacctggaacaagaggtccaggggcttcagtccatgataggaacgccaacagctacgttatggtcggtaccttcaacctgcccagtgatggtagcgccgtcgacgtccacatcaatatggaacaagcaccaattcagagcgaacctagggtgagactggtgatggcgcagcacatgataagggatatccagacactgttgagtagaatggagtgccgcggaggcccacagccgcagcacagccagcccccaccccagccaccggctgttactccagagcccgtcgcgctctcaagccaaacttcagagccagtggagtccgaggctcccccacgggaaccaatggaggccgaagaagtagaggagagggctccggctcaaaatccagagctgacccccggacctgccccagccggacctacccctgctccagagtag

SEQ ID NO: 215781 - DNA, 558 bp, synthetic construct
  misc_feature 1..558: note = Description of Artificial Sequence: Synthetic coding sequence
  source 1..558: mol_type = other DNA
taattagcatgtacaccgccacgccatctgcacgtggtcaggccgatgtcccactatacaactcccatggtattgcagcaagccgcaatacctatccagattaacgtaggtacaaccgtcacaatgaccggcaatggtaccaggcccccacccactccaaatgccgaggccccacctcctggcccagggcaggcttcttccgtagccccttcctcaacaaatgttgagtccagcgcagaaggcgcaccacctcctgggccagctcccccacccgcaacctcccatcccagagtgatccggatcagccatcagagcgtggaaccggtagtgatgatgcacatgaacatccaggggcagcaagttccagggttcccaacagctcctacccgagttgtcatagcccgtcctacaccaccacaggcgagaccgagccatcccggagggcctccagtcagtggtactctgcagggcgctggccttggcaccaacgcgtcccttgcacagatggtttccgggctcgtcggccagctgctgatgcagcctgtcctcgtcgcatag

SEQ ID NO: 215782 - DNA, 648 bp, synthetic construct
  misc_feature 1..648: note = Description of Artificial Sequence: Synthetic coding sequence
  source 1..648: mol_type = other DNA
atggaacccaacgatagcacatccacggctgtcgaagagccagacagtctcgaagtgctggtgaagactctggatagtcagacacgtacattcattgttggcgctcagatgaacgtcaaagaatttaaggaacacattgcagcctccgtgtccattcctagtgaaaaacaaaggctgatctaccagggcagagtgttgcaggatgataaaaaattacaggaatataacgtaggaggtaaagttattcatttggttgaacgagcaccaccacagacccatctgccttctggcgcatctagtggcactggctccgcatcagcaacccacgggggaggatcaccccctgggactcggggacccggagcgagtgtccatgataggaacgctaactcctacgtgatggttggaacttttaaccttccatctgagccaagagtgcgattggtgatggcccagcacatgatacgcgatattcaaaccttgctgagcaggatggagtgcaggggaggccctcagcctcaacatagccagccccctccccaaccacctgccgtgacgcccgagccagtcgcgctctcctcccaaacaagcgaaccagtggagagtgaagcccctcctagagagccaatggaggcagaggaagtatag

SEQ ID NO: 215783 - DNA, 780 bp, synthetic construct
  misc_feature 1..780: note = Description of Artificial Sequence: Synthetic coding sequence
  source 1..780: mol_type = other DNA
atggaacctaacgattctacgagcaccgccgtagaagaaccagactccctcgaggttctcgtcaaaacccttgactcacagacacgaaccttcattgtcggcgcacaaatgaacgtcaaagagttcaaggaacatattgctgcatcagtgtccataccttcagagaagcagcggttaatctatcagggtagagtgcttcaggacgataagaagttgcaggaatataacgtcgggggaaaggttatccatctagtggagagggctcctccccaaactcacctcccctctggtgcatcctcgggcaccggaagtgcttccgccacacatgggggtgggagcccgccaggaacccgcggacccggtgcgtcagtacacgacagaaatgctaacagttatgtcatggtaggaacatttaacttgccctcggatggctcagccgtggacgttcacatcaacatggagcaggctcccatccagtccgagcccagagttaggctcgtaatggcccagcatatgattcgcgacatccagactcttctttcccgaatggagtgtcgtgggggtccccagcctcagcattctcagcccccacctcagccacccgctgttacaccagaaccagttgcactgagctcacaaacaagcgaacctgttgagagtgaggctccgccaagagagcccatggaggccgaagaggtggaagaaagggctccagctcagaaccccgagttgacacccggaccagctcccgctggtccaaccccagcccctgaaacatag

SEQ ID NO: 215784 - DNA, 477 bp, synthetic construct
  misc_feature 1..477: note = Description of Artificial Sequence: Synthetic coding sequence
  source 1..477: mol_type = other DNA
atggaacctaacgatagcacctcaactgccgtcgaagaacctgattcactggaggtgctcgtgaaaactttagactctcagacgaggacctttatagtgggcgctcagatgaacgttaaagagtttaaggagcatattgccgcttccgtcagcataccctccgagaaacagcgcttaatctatcaaggtagagtgcttcaggacgataaaaagctccaggaatacaacgtgggtggcaaggtaattcacctcgtggagagggctcccccacaaacccatctgccttcaggggcaagctctggaacaggaagcgcaagtgcgactcacggcggtggttcccctccgggaaccagaggcccaggggcatccgtgcacgatagaaacgctaacagctacgttatggtggggacctttaacttgccctccgacggttctgccgtcgatgtccacatcaatatggagcaggcccctatttag

SEQ ID NO: 215785 - DNA, 621 bp, synthetic construct
  misc_feature 1..621: note = Description of Artificial Sequence: Synthetic coding sequence
  source 1..621: mol_type = other DNA
atggagcccaacgactctacctcaactgccgtggaggaacccgacagtcttgaggtcttggtcaagactctcgacagtcaaaccagaacattcatagttggggctcagatgaacgtcaaggaatttaaggaacacattgcggcttctgtcagcatcccgagcgagaaacaacgactgatttatcagggtcgagtcctccaagacgacaagaaactccaggaatacaatgtcggagggaaggtgatccacctcgttgagcgtgctccacctcagacccatcttccatcaggtgcaagctctggaaccggatctgcttcagccacgcatggtgggggatccccacctgggactcggggtcccggtgcctctgtccatgacagaaacgccaatagttacgtgatggtgggcacttttaacctcccctccgaacctagggtccgtctggttatggcccagcatatgatccgtgacatacagacgctactctctagaatggagtgcagagggggacctcagccccaacattcgcaaccgcctccacagcctccggcagttacaccagaaccggtcgcactgtccagccagacctccgaaccagtggagagcgaagcacccccttag

SEQ ID NO: 215786 - DNA, 2232 bp, synthetic construct
  misc_feature 1..2232: note = Description of Artificial Sequence: Synthetic coding sequence
  source 1..2232: mol_type = other DNA
atggaacctaatgacagtacctctaccgcagtggaagaaccagatagcctagaggttttagtaaagactctcgattcccagacccggacctttatcgtaggtgcccagatgaacgtgaaggaatttaaagagcatatcgcagcctctgtctcaatacctagcgagaaacaacgcctgatttaccaggggagagtgcttcaggacgataagaaactgcaggaatacaacgtgggcggaaaggtgatacatctggtcgaacgggcaccacctcagacacacctcccttccggcgctagctctggaactggctcagcctccgcaactcacggcggaggcagtcccccaggtaccaggggtccaggggcatccgttcatgaccgcaacgccaattcttatgttatggtaggcacattcaacctgccgtccgacggctccgcagtggatgtgcacatcaacatggagcaggcccctattcagagcgaacctagagttagattagttatggcccagcacatgatccgagacatccagaccctgttatccagaatggagtgtcgcggaggcccacagccacagcatagtcagccaccgccacagcccccagccgtgacacctgaaccagtggccttgtcatctcagacatccgagcctgtcgaaagtgaggcgccacccagggagcctatggaggccgaagaagtggaggagcgtgcccctgcgcaaaacccggagcttacccccggtcctgccccagcgggacctacacccgctcctgaaaccaatgctcctaatcaccctagtcctgccgagtatgttgaggtcctgcaggaattacaacggctggagagcaggcttcagccattcttgcaaagatactacgaagtcctgggtgctgcagccacaacagactataataacaatcacgaaggccgtgaagaagaccaacgtctcatcaatttagttggcgagagcctcaggctcctgggtaatacattcgttgcactgtccgacctccgatgcaacctagcttgcacgcctccacgacatctgcatgttgtacggccaatgtcccactacaccacacccatggtgctgcagcaagcagctattcccatacaaattaatgtaggcaccaccgttacgatgaccggaaatggcacacgtccccctccaactccgaatgccgaggctcccccacctggccctgggcaggcttcctcagtcgcaccaagcagcacaaacgtcgagagcagcgccgaaggagcccctcccccaggtccagcccctcctcccgctacttcccatcctagagtaatcaggatctcccaccagtccgtggagcctgtggtcatgatgcacatgaatatccaggatagcggcactcagcctggcggagtgccatccgcccctaccggccctctggggcctcccggacacggccaaacattggggtctaccctgatccagctgccctcgctcccacccgagttcatgcacgcagtggcacaccagatcacgcaccaggccatggttgctgcagttgctagcgcagccgctggtcagcaggtgccaggttttcctactgctcccactagggtcgtaattgctcggcctactccaccccaagcgagacctagccaccccggaggccctcctgtctctggaacactgcagggggctggtcttggtaccaatgcgtccctggcacaaatggtgtccggactggtgggacaactgcttatgcagcccgtgcttgtggctcagggtactccaggtatggctccaccccctgcgccagccacggccagcgcctccgccggtactacaaatacagccaccactgcaggacctgcacctggaggccctgctcagcctcccccaacccctcagccaagtatggcagatctacaattttcacagctcctgggcaacctgcttgggccagctggaccgggagcgggaggcagcggtgtcgccagcccgaccattaccgtggccatgcccggagtgccagcctttctccaggggatgactgacttcctgcaggccacacagacagcccctccccctccccctccacccccacctcctccaccggctcctgaacagcagaccatgcctccgccaggctcacctagtggaggcgcaggatctcccggtggcttgggccttgagtccttgagtcccgaatttttcacgagcgtggtacagggagtactcagctcgctgttgtag

SEQ ID NO: 215787 - DNA, 681 bp, synthetic construct
  misc_feature 1..681: note = Description of Artificial Sequence: Synthetic coding sequence
  source 1..681: mol_type = other DNA
taatccggcttcggagcccgactgctggagttatgtaaccaggggctgttcgagtgcctggccctgaatctccattgcttggggggacagcagatggaactagctgctgttataaacggcaggatcaggcggatgagcagaggggtcaatccttccttggtgagttggttgacaaccatgatgggcctcaggttacaggtcgtgttagagcatatgcccgtcggccctgacgccattctgcggtatgtgaggagagtcggcgacccccctcagcctctccccgaagagcccatggaagtgcagggcgcagaacgggctagtcctgaacctcagcgcgagaacgctagtccagccccaggcacaaccgccgaagaggccatgtcacggggacctccacctgcaccagaaggcggaagtagagacgagcaggacggggctagcgctgagactgagccgtgggccgctgccgtgccaccggagtgggtccctattatccagcaggatatacagtctcagcgaaaagtgaaacctcagccacccctttccgacgcctacctgtccggaatgcccgcaaaacggcgaaagctgaggtccgacattcagaaacgcctgcaggaggatcctaactattctccgcaaaggtttccaaacgcacagcgagctttcgccgatgacccttag

SEQ ID NO: 215788 - DNA, 594 bp, synthetic construct
  misc_feature 1..594: note = Description of Artificial Sequence: Synthetic coding sequence
  source 1..594: mol_type = other DNA
atggagcccaacgacagcacttctaccgctgtggaggagcctgattcgctcgaggtcctcgtcaaaacgcttgactctcagacccgcacctttatcgtcggcgctcagatgaacgtcaaagagtttaaggagcacatcgccgcttccgtgagtatccccagcgaaaaacagcggctgatttatcaagggagagttctacaagatgacaaaaagcttcaagagtacaacgtaggcggaaaggtcatacacctggtggagcgcgctcctccccaaactcacctcccttcaggagcctcatccggcacagggtccgccagcgccacccacgggggtggatcccccccaggtacacgagggccaggtgcgtctgtgcacgatagaaatgccaattcttatgtaatggtaggaaccttcaacctcccgagcgatggcagtgctgtcgacgtgcacatcaatatggagcaggcccctatccagagcgagcccagggtgaggttagtgatggcccagcacatgatcagagatatccagacgttactttctcgtatggagtgcaggggcggaccccagcctcaacactcacaaccaccttag

SEQ ID NO: 215789 - DNA, 717 bp, synthetic construct
  misc_feature 1..717: note = Description of Artificial Sequence: Synthetic coding sequence
  source 1..717: mol_type = other DNA
agctctgctgaaggggcacccccacccggtccagcccctcctccagctacttcacatcctagggtcatccggatttcacatcaaagtgtcgagcctgtcgtgatgatgcacatgaacatccaggggccactgtccctatcaccttgtccagacagtgggacccagccaggaggcgttccgagtgctcccacagggccacttggcccaccaggacacggtcagacgctggggcagcaggtgcctggattccccaccgccccaacgcgggtggtcattgcaaggcccacccccccacaagcaaggcctagccaccctgggggtccacctgtaagcggaaccctgcagggcgcaggacttggaactaatgcatccttagcacagatggtgtcaggattggttggacagctgttgatgcaacctgtcctcgtggcgcagggcacgcctggaatggcacctccacccgcacccgcaaccgctagtgcaagcgctggcactaccaatacggccacgacagctgggcctgctcccggaggacccgctcaacctccccctacgcctcaacccagtatggccgacctgcagttttcccagctcttaggtaacctgctgggccctgctgggcctggcgcaggcggatcgggggtagcctcgccaaccattactgtcgctatgcccggtgtgcctgcttttctccaaggcatgacagatttcctctag

SEQ ID NO: 215790 - DNA, 735 bp, synthetic construct
  misc_feature 1..735: note = Description of Artificial Sequence: Synthetic coding sequence
  source 1..735: mol_type = other DNA
atggaacccaatgacagtacctctactgctgtcgaggaaccggatagtttggaggtcctggtgaagactctggatagtcagaccagaacgttcattgtgggggctcagatgaacgtgaaggagtttaaagagcacattgctgccagcgtttctatcccctcagagaaacagaggcttatctatcaaggtcgggttctgcaagacgataagaagctgcaggagtacaatgtgggtggaaaggtgattcacttggtagaacgagctcctccacagacccacctgccctcaggggcttcttccggcacagggtccgcttccgcaacacacgggggtggctcccccccaggcacaaggggtcccggtgcatcagtgcacgaccggaatgcaaacagctacgtgatggtgggaacgtttaatttgccatcagaaccacgagtgcgactggttatggctcagcatatgataagagacatccagaccttgctgagccgcatggaatgccgcggagggcctcagccacagcactcccaaccaccaccacagcctccagcagtgacacctgaaccagtagcgttgagctctcaaacaagtgaacctgtggaaagcgaagcccctcctagggagccgatggaagcagaggaggtggaggaaagagcccctgcccagaatcccgagctgactcctgggccagccccagccggaccaacccccgcacccgaaacgaatgcaccttag

SEQ ID NO: 215791 - DNA, 789 bp, synthetic construct
  misc_feature 1..789: note = Description of Artificial Sequence: Synthetic coding sequence
  source 1..789: mol_type = other DNA
atggagcccaatgactccacatcaaccgcagtggaagaaccagactcgctggaagtcctggtgaagactctagacagtcagactagaacatttattgttggagctcaaatgaacgtaaaggaattcaaagaacacattgccgcaagcgtgtcgataccatccgaaaagcaacggctcatataccagggacgggttctccaggacgacaagaaacttcaggagtataacgtcggaggaaaagttatacatttggttgaacgggcaccgcctcagacacacctcccctctggagcctcttccggaactggctccgccagcgcgactcatggtggtgggtcccctccaggaaccagagggccaggcgcaagtgtgcatgatcgcaacgccaacagttatgtgatggtcggcacttttaacctcccgagcgatgggtctgccgtggacgtccacataaacatggagcaggccccaatccaatccgaacccagagttcggctggttatggcccagcatatgataagggatattcagaccttgcttagtcgtatggagtgtagagggggacctcagccccagcatagccagcccccaccacagcctccggctgtcactccagaacctgtggcattatctagtcagacttcagagcccgtggagagcgaggccccaccacgtgagcccatggaggccgaggaagtagaggagcgagcgcctgctcagaatcctgaactcactccaggcccagcacctgccggacccacaccggcacccgaaaccaatgcaccatag

SEQ ID NO: 215792 - DNA, 2232 bp, synthetic construct
  misc_feature 1..2232: note = Description of Artificial Sequence: Synthetic coding sequence
  source 1..2232: mol_type = other DNA
atggaacctaatgatagtacatctacagccgtggaggagcccgatagtctggaggtacttgtgaagaccctggattcacagacacggaccttcatagttggggctcagatgaacgtgaaagagtttaaggaacatatcgctgccagtgtcagcataccttccgaaaaacagagacttatctaccaaggtagggtcctgcaggatgacaaaaaactgcaggagtacaacgtgggaggcaaggtgatacacctggttgagcgcgctccgcctcagacacacctgccttcgggtgcttcatctgggactggatcagcttcagccactcacggtggcggatctcccccagggactcgcggacctggtgcgtcagtccacgaccgaaatgccaacagttatgttatggtgggaacctttaacctgccttcagatggctctgccgtggacgtgcatattaacatggagcaggccccaatccagagtgaacccagagtcaggctggtgatggcacaacacatgattagagatattcagacgttattaagtcgaatggagtgcagaggtgggcctcagcctcagcactcccagcccccaccacagccgccagccgtcactccagagcctgtcgctctgagttcccagacgagtgaacctgtggagtctgaggccccaccccgtgagcccatggaggctgaagaggtggaagagagagccccagcccagaaccctgaacttacccccggaccagcacctgccggacccaccccagccccagagacaaatgcaccaaaccacccctctcccgctgagtacgtggaggtgctgcaagagctgcagcgcctcgaatctcggctacagccctttctacagaggtactacgaggtgctgggggcagctgccacgactgattacaataataatcatgagggtagggaggaagatcagcggctgataaatctcgttggtgagtccctgcgactcctggggaacacgttcgttgcactctctgacctgagatgtaaccttgcctgtactccaccccgacacctgcatgtggtgcgacccatgtcccattacacaacccccatggtgctccagcaagctgctattcccattcagataaacgtgggaaccaccgtgacaatgacaggtaacggaactcgccctcctcccacccctaacgctgaggctccaccccctggcccaggccaggcgtcaagcgttgcaccctcttctaccaacgtagagtctagcgctgagggagctcccccaccaggaccagccccaccacccgctacctcccatcctcgcgtcatccggatcagtcaccaatctgtagagccggtcgtgatgatgcatatgaacattcaggactctggcacccagcctggtggagtccctagcgcaccaaccgggccactgggtcctcccggacacggtcagacactgggctcaacactcatacagttgccgagcctgccaccggagtttatgcacgccgtggctcaccagatcacacatcaggctatggtcgccgcagtggcttctgcagcggctggacaacaggtaccgggattccctacagctccaactagggtggtgatcgcaagacccacacctccgcaggctcgtccttcccatcctgggggtcccccagtgtcaggcactctgcaaggggcaggtctgggcacaaatgccagtctggcccagatggtctcaggcctggtgggccaactgctgatgcaaccggttcttgtagcacagggcacaccagggatggcccctccccctgcccctgcaacagcttccgctagcgcaggaaccactaacacagcgacaaccgccggtccagccccaggtggtcctgctcaacccccaccaacccctcaacccagcatggctgatctgcagttttctcagctcctgggaaacctcctgggtcctgccggacctggcgcaggagggccaggtgttgcgagtcctacaatcacagtcgcaatgcctggtgttcccgctttcttacagggaatgaccgacttcctacaggctacccagacagcccctcctccccctccaccacctcccccacctcctcccgcaccagagcaacaaactatgccccctcccggtagcccttccggaggcgctggatcaccgggtggactgggacttgagagtctaagtccagagttcttcacctcagtagttcagggggttctttcctctctcctgtag

SEQ ID NO: 215793 - DNA, 735 bp, synthetic construct
  misc_feature 1..735: note = Description of Artificial Sequence: Synthetic coding sequence
  source 1..735: mol_type = other DNA
atggaaccgaacgattccactagtactgcagtagaggaacccgattctctggaagtgttagtaaaaacactggatagtcagacacgaacatttatcgtgggcgcacaaatgaacgtgaaggagttcaaggaacacattgccgcttctgtatcaataccatctgagaaacagaggttgatttaccagggcagggtactgcaagacgacaagaaactgcaggaatacaatgtcggaggaaaggttattcatttagtagaacgggcacctcctcagacccatctgcctagcggagccagctccggcaccggcagcgcctcagccacacatggaggcggatcccctcccggtactaggggacccggtgcttccgtccacgaccggaacgccaattcttacgtgatggtcgggacttttaaccttccgtccgaacctcgcgtcaggttagtcatggcacagcacatgatcagagacatacagacccttctgtcacggatggagtgcagaggagggcctcagccccagcactctcagcctccaccacagcctccagccgtgactccagaacccgtcgctttgtcttcacaaacttcggaaccggttgaaagcgaagctcctccacgcgaacccatggaagctgaagaagtagaagaacgcgcaccggctcagaatcccgaactcactccagggcctgctcctgctggcccaacccctgccccagagacaaacgccccttag

SEQ ID NO: 215794 - DNA, 789 bp, synthetic construct
  misc_feature 1..789: note = Description of Artificial Sequence: Synthetic coding sequence
  source 1..789: mol_type = other DNA
atggagcccaatgatagcacttccacagctgtggaggaaccagattctcttgaagttttggtgaaaacacttgactcccagactcggacattcatcgtcggggcacaaatgaatgtcaaggagtttaaggagcatatagcagcatctgtgtccattccgtcagaaaaacagcggttaatttatcagggcagggtgctgcaggacgataaaaagctacaggaatataacgtgggcggtaaagtgattcatctcgtagagcgggcacctccacagacccacctaccctctggggcaagtagcggtacgggctcggctagcgcgacacacggcggaggtagccccccaggcacacggggaccaggagcctccgttcacgaccgcaacgctaattcgtacgtcatggttggcaccttcaatctgccaagtgatggttccgccgttgacgtacacattaatatggaacaggcaccaattcagtcggagcctcgggtgagactcgtgatggcccaacacatgatccgggatattcagacactgctatcccgcatggagtgccggggaggtccccagccacagcacagccagccacccccacagccgccagccgtgactcctgagcccgtggctctcagtagccagacctccgagcctgttgagtcggaagcccctccaagggaaccgatggaggcagaggaagttgaagaacgggcacctgcacaaaaccctgagctcactcctggccctgccccagcaggcccaaccccagctcccgagaccaacgccccatag

SEQ ID NO: 215795 - DNA, 2712 bp, synthetic construct
  misc_feature 1..2712: note = Description of Artificial Sequence: Synthetic coding sequence
  source 1..2712: mol_type = other DNA
atggaacccaatgactctacttctacggcagtggaggagccggattctctggaagtcctggtgaagacactcgacagccagacacggacattcattgttggagcccagatgaatgtcaaagaattcaaggaacacatcgctgcctccgtgagcattccaagcgagaagcagaggctcatctatcaagggagggtcttgcaggatgacaaaaaactgcaggagtataacgttggaggtaaggtcatccaccttgtcgagcgcgctcccccacagacgcatttaccaagcggtgcgtcctcaggcaccggatcagcctctgctactcacgggggaggaagcccccctgggacccggggtccaggagcaagtgtgcacgaccgaaacgcgaacagctacgtaatggttggcacatttaatttaccaagtgatggatctgctgtcgatgtgcacattaacatggagcaggctccaatccagagtgagccacgtgtgcgcctggtcatggcccagcacatgatccgggatattcaaaccctgttgtcccgcatggaatgtcggggtggtcctcaaccacagcatagtcagcctccaccgcagccacccgcagtgacccctgagcccgtggcactttcgagccagacctctgagcccgtggagagcgaggctccccctagggagcccatggaagcagaggaggtagaagagagggcgccagctcagaacccagagcttactcctggtcccgctcctgcaggccctacaccagccccagagaccaatgcaccgaatcaccctagtcccgctgaatatgtggaggtcttgcaggaactgcagagactagaaagtcgcctgcagccatttctgcagcggtattatgaagtgctcggtgcagccgctaccacagactacaataataaccatgagggcagagaggaagaccaaaggctcatcaacttggttggagaaagtctgcgactgctgggaaacaccttcgttgccctgtcagatctgcggtgtaatcttgcctgcaccccgccaaggcatcttcacgtggttcgcccaatgtcacactataccacacccatggttcttcagcaggccgctattcccatccagatcaacgtgggaaccactgtcacgatgacggggaatggcactcggcctccccctactcccaacgccgaagcccctccccctggcccaggacaggcctctagtgtggctccgtcttcaactaatgttgagagtagtgcggagggagccccaccacctgggccagcccctccgccagccaccagtcaccctcgggtgattagaatttctcaccagtccgtggaacctgtggtaatgatgcacatgaatatccaagacagtggtacccaacccggaggcgtccccagtgcccctacaggacctctgggaccacctggtcacggccagaccttaggccagcaggtgcctgggtttcctacagctccgacaagggtggttatcgctcgccctacgcctcctcaagccagaccttcacacccgggagggcctccggtctcaggaacacttggcgcaggcctgggaaccaatgcatctctggcgcagatggtgtcggggctggtgggccaactcctgatgcagcccgttctggtagctcaagggaccccagggtcaccgggagggctcggtctggagtctttatcaccggagttttttacaagtgtggtgcagggcgtactcagtagcctcctgggatctctgggagcgagggccggtagcagtgagtctatcgcagcctttatacagcgcctctcaggatcgagcaacatttttgagcctggggctgacggcgctctaggatttttcggggcactattgagtctgctctgtcagaacttttccatggtagacgttgtgatgctgctgcatgggcacttccagccccttcaaaggctgcagccccagctacgttccttctttcatcaacattatctgggcggacaggagccgaccccttctaatatccgcatggctactcacacactgataactggattggaagagtatgtgcgggagtctttctctctggtgcaagtccagcctggagtggacatcataaggaccaatctggagttcctccaagagcagttcaacagcatagccgcacacgtccttcactgtactgacagtggatttggagccaggctgctggaactgtgtaaccagggtctttttgagtgtttagcactcaatctgcattgtctgggcggacagcaaatggagctggcggcagtgattaatggtagaattaggaggatgagccggggtgtgaatccctcactcgtttcatggctgactaccatgatgggcttacgcctgcaggtagttctagagcatatgcctgtgggccctgatgccatcctcagatacgtgcgcagggtgggcgatccaccacaaccactgcccgaggagccaatggaggttcagggtgcggagcgcgcttccccagagccccaggagtgggtcccaattatccagcaggacatccagtcccagcgcaaggtgaagcctcagccccctttgagcgacgcgtacctctctgggatgcccgctaaaaggcgcaagttgcgcagcgacatccagaaaagactgcaagaggatcctaattactcacctcagcggttccccaacgcccagcgagcgttcgcagatgacccttag

SEQ ID NO: 215796 - DNA, 558 bp, synthetic construct
  misc_feature 1..558: note = Description of Artificial Sequence: Synthetic coding sequence
  source 1..558: mol_type = other DNA
taactcgcttgcacaccgccacggcatttgcacgtggtgcgcccaatgtcgcactataccacacctatggtcctacaacaggcagccatcccaatccagatcaatgtgggaactacagtcacaatgacaggaaatggcacaagacctcccccaaccccaaacgcggaagcccctcctcccggtcccggtcaggcgtcttccgtcgctccctccagcactaatgtagagtcttctgccgaaggcgcaccaccaccaggaccggcaccacctccggcaactagccatcctcgcgtgattagaattagtcaccagtcagttgagcctgtggtgatgatgcatatgaacatccaaggccagcaggtgcccggatttccaaccgctcctactagagtagtgatcgcgcgtccaaccccacctcaggccagaccttcccatccaggcggtcctcccgtgagtggaaccctccaaggggcagggcttgggacaaatgcctctcttgctcaaatggtgagcgggcttgtcggtcaactgctaatgcagccagtccttgtggcttag

SEQ ID NO: 215797 - DNA, 789 bp, synthetic construct
  misc_feature 1..789: note = Description of Artificial Sequence: Synthetic coding sequence
  source 1..789: mol_type = other DNA
atggaaccaaatgactccactagtaccgcagtggaggagccagattctcttgaggttttggtgaagacactcgattcccagacgcgcacgttcatagtgggcgcacagatgaacgttaaagagtttaaggaacacattgccgcaagcgtgtccattcccagcgaaaagcagcggctcatttaccagggtcgggtgctgcaggatgacaaaaagcttcaggagtacaacgttggtggtaaggtaatacatttggtggaacgggcaccaccacagacgcacctacctagcggtgcttcgagtggaacaggctccgcaagtgctactcacgggggagggtcaccgcctggcacgcggggacccggagccagtgtacacgatcgaaatgccaatagttatgtgatggtcggcacatttaatttaccctcagacggcagcgcggtagacgtgcacattaatatggagcaggcacccatacagtcagagccaagggtccgactggtgatggcgcagcatatgattagagacatccagaccctgctatctagaatggaatgtcggggaggaccccagcctcagcacagccaaccccctccccagccaccggctgtcactcctgagcccgtagccctttctagtcagacatctgaacctgtcgagtcggaggccccacctcgggaacctatggaagctgaggaagtggaggaaagggcccctgcccagaaccccgagttgactcccggacccgctccagcaggccctacaccagctcctgaaaccaacgcaccctag

SEQ ID NO: 215798 - DNA, 621 bp, synthetic construct
  misc_feature 1..621: note = Description of Artificial Sequence: Synthetic coding sequence
  source 1..621: mol_type = other DNA
atggagccgaatgattccacctcaacagctgtggaggaacctgactcactggaagtgttggtgaagacattagattcacagacacgcacatttatagtaggagcgcagatgaatgttaaggagttcaaggaacatatcgccgcatccgtgtccatcccttcagagaagcagcgcctgatctaccagggcagggtgttgcaggatgacaaaaagctacaagagtataacgttggtgggaaggtgattcacttggtggagagagcgccaccgcaaacacatcttccgtccggggctagttcgggcaccggttctgccagtgctactcatggagggggttctccccctggaacccggggtccaggagcatcagtgcacgatcggaacgctaatagctatgtaatggttgggacctttaacttgccatccgaacctcgcgttaggctggttatggcacagcacatgataagagatattcaaacattgctgagtcggatggaatgtagaggtggccctcagccgcagcactcccagccaccaccccagccccctgcagtgacccctgaaccggtcgctctgtcttctcagacctcagaaccagttgaatcagaggcacccccatag

SEQ ID NO: 215799 - DNA, 681 bp, synthetic construct
  misc_feature 1..681: note = Description of Artificial Sequence: Synthetic coding sequence
  source 1..681: mol_type = other DNA
tagtccggattcggggctcgcctgctggaactatgcaatcagggtttgttcgaatgtcttgctctgaacctgcattgtttaggcggacagcagatggagttggcagctgtgattaacggaagaatccgcaggatgtctagaggggttaatccttccctggtgtcctggttgaccactatgatgggactgagactgcaggtggtacttgaacatatgcctgtgggcccagatgccattctaagatacgtgcgcagggttggtgatcctccgcaacctcttcccgaagaaccgatggaggtgcagggggcagaacgagcatcccccgaacctcagagagagaacgcctcaccagcaccaggcaccaccgcagaagaggccatgagtagggggccaccgccagcgcctgagggaggttctcgggatgaacaggatggcgctagcgccgagaccgagccctgggctgcagctgttccccctgaatgggtccctatcatccagcaagacattcagagccagcggaaggtaaaaccacagccacctctcagcgacgcgtacttgtccggaatgcccgctaagcggcgaaaactgcgctccgacattcaaaaaaggctgcaggaggaccctaactacagtcctcagaggtttcctaatgcccaacgcgcatttgctgatgatccctag

SEQ ID NO: 215800 - DNA, 780 bp, synthetic construct
  misc_feature 1..780: note = Description of Artificial Sequence: Synthetic coding sequence
  source 1..780: mol_type = other DNA
atggaaccaaatgatagcacttccactgcagtagaagaaccggactccttggaggtactggttaagacactggattcgcaaacacggacgtttatcgtgggggcacagatgaatgtgaaggagttcaaagaacacatcgcggcatctgtgtccattccttccgaaaagcagcggcttatctaccaggggagagtccttcaagacgacaagaagcttcaggagtataacgtgggcggaaaagttatacacctggtggaacgggctccgccacagacccaccttcccagtggagcaagttcaggaaccggctctgcatcagctacacacggcggtggttcaccccctggcactcggggacccggagcttcagtacacgatagaaacgcaaattcatacgtcatggtggggacatttaatctcccatcggacggcagtgccgtggacgttcatattaatatggaacaggcacctatacagtccgagcctcgagttcggctagtgatggcccagcatatgattagagatattcaaacgctcctctccagaatggaatgtcgcggtggcccacagccgcagcacagtcagcccccaccccagcctcctgctgtgacacctgagcccgtggccttatcctcccagacttcggagccggtggagtccgaggcaccccctagagagccgatggaggcagaagaggtcgaagagcgggcacctgcccagaaccccgagctaactcctggcccagccccagctggccctacccccgcaccagaaacatag

SEQ ID NO: 215801 - DNA, 777 bp, synthetic construct
  misc_feature 1..777: note = Description of Artificial Sequence: Synthetic coding sequence
  source 1..777: mol_type = other DNA
atggagcctaacgattcaacatccacagctgttgaggagcccgactcactagaggttctcgtaaaaactctcgactcccagacaagaaccttcatagtgggtgcccagatgaatgtcaaagagtttaaggaacatattgctgcatcagtctcaattccaagcgagaaacaaaggctgatctaccagggaagggtcctgcaggacgataagaagctgcaggagtacaatgtagggggaaaagtgatacaccttgtcgagagggcaccgccacagacacatctgccgtctggtgcaagctcgggaaccggcagcgcttcagctacccacgggggaggtagccctccagggacaagaggacctggcgcaagcgtacatgacagaaacgcgaactcatacgtgatggtggggaccttcaacttgccgagcgatggttcagcggtcgacgtgcacatcaacatggagcaggccccaattcagtccgaaccacgggtcaggctggtgatggctcaacacatgatccgcgatatccagacacttctctccaggatggaatgtaggggagggccacaacctcagcactctcagccccctccacagccaccggcagtcacgcccgagcccgtcgcactctcttcacagacatctgagcctgtggagtctgaagcccctccacgagaacctatggaagctgaagaagtggaggagcgggctccagcccaaaatcccgagctgacaccagggcctgccccagctggcccaacgcctgcgcctgagtag

SEQ ID NO: 215802 - DNA, 477 bp, synthetic construct
  misc_feature 1..477: note = Description of Artificial Sequence: Synthetic coding sequence
  source 1..477: mol_type = other DNA
atggagccgaatgacagcacatccactgcagtcgaggagccagattccctggaggtgttagtgaagaccctcgatagccagacacgtacatttatagtgggagcgcagatgaacgtgaaggagttcaaagagcacatcgccgcaagtgttagcattccatcagagaagcagagactgatctatcaaggcagggtcctccaggacgataagaagctccaggaatataacgtggggggaaaggttattcatttagtcgagagggctccacctcaaacacacctcccatccggtgcaagtagcggaacagggagtgcaagtgctacccatggaggtggcagcccgcctggaacgcgaggccctggcgcatcagtgcatgatcggaacgcaaacagttacgtgatggtggggaccttcaacctgcccagcgatgggtctgcagtggatgtacacatcaacatggagcaggctccgatctag

SEQ ID NO: 215803 - DNA, 735 bp, synthetic construct
  misc_feature 1..735: note = Description of Artificial Sequence: Synthetic coding sequence
  source 1..735: mol_type = other DNA
atggaaccaaatgattccacctccacagctgtagaagagcctgattctctggaagtgctggtgaagaccctggattcacagactcgcacttttatagtgggggcacaaatgaacgtgaaggagtttaaggagcacattgccgctagcgtttctatccctagcgaaaaacagagactgatctatcagggtcgcgtactccaggacgataagaaactgcaggagtacaatgtggggggaaaggtgatccacctggttgaaagagcccctccccagacgcacttaccatcaggagctagtagcggaacggggagtgcgagtgctacacatggcggaggatctccacccggaactcggggtccaggcgctagtgtccacgaccgtaatgctaatagctatgtgatggtgggcacatttaacttgccaagtgaaccccgagtccggctagtgatggctcaacatatgatcagggatatacagactctgctgagccgcatggagtgtagagggggtccacaaccgcaacatagtcagcctccccctcagcccccagccgtgacccctgagccagtggccctgtcatcgcagactagtgaacctgtggaatccgaagcccctcccagagaacctatggaggcagaggaggtcgaggaacgcgcacctgcacagaatccagaattgacgcccggaccagcacccgcaggaccaactcctgcccctgaaacaaatgccccatag

SEQ ID NO: 215804 - DNA, 3381 bp, synthetic construct
  misc_feature 1..3381: note = Description of Artificial Sequence: Synthetic coding sequence
  source 1..3381: mol_type = other DNA
atggagcctaatgatagcaccagcaccgcggttgaggaacctgactcgctcgaggtcctggtcaagaccctggatagtcagaccagaaccttcatcgttggtgctcagatgaacgtgaaagagtttaaagagcacattgctgcctctgtgtcaattccctccgagaagcaacgcctgatataccaggggagagtcttgcaagacgacaaaaagctgcaggaatataatgtagggggaaaagtcatccacctggtggagagagctccaccccaaacacatctgccaagcggtgcctcctctgggaccggcagcgcctccgcaacccatggaggtggctctccacctggcacacgcggtcctggcgctagtgtccacgacagaaatgccaactcatacgttatggtgggcacctttaaccttccatctgacgggtccgcagtggacgtgcacatcaacatggagcaggcacctattcaatctgagcccagggtccgactggtgatggcacaacacatgattcgtgatattcaaacattactttcacggatggaatgtaggggtggcccacagcctcagcactcgcaaccccctccgcagccacccgctgtgacacccgaaccggtggcccttagcagtcaaaccagcgagcctgtggagtctgaggccccaccacgggagcccatggaagcagaggaggtggaagagagggcgccagcacagaaccccgaactgacacccggtcctgccccagccggaccaacgcctgctccggaaaccaatgccccaaatcatcccagccccgcagaatacgttgaagttttacaggagctgcagaggctcgagtcgaggcttcaacccttcctgcagagatactacgaagttcttggggctgccgcaacaaccgattataacaacaaccacgaaggccgagaagaggatcaacggctcatcaacttggtgggggagtctcttcggctactgggaaatacgttcgtcgccttgagtgacttacgttgtaaccttgcgtgcacaccccctcgacatttacacgtcgtccgcccaatgtcccactacacaaccccaatggtgctgcaacaagctgctataccgatccaaatcaacgtagggaccacagtgaccatgaccgggaacggaacacgtcctcctccaacccctaatgctgaggcacctccacccggacctggccaagctagttctgtcgcaccatcctcaaccaacgttgaatctagcgccgagggcgctcccccacctggaccagcaccgccaccggctacttcacaccccagagtgattcgcattagtcatcagtctgttgaacccgttgtaatgatgcacatgaatattcaggactctggaacccagccgggtggcgtcccttccgccccaaccggtccgctgggacccccaggccacgggcaaacactgggtcagcaagtccccggtttccccaccgctcccaccagagtcgtgattgctaggcctactccccctcaggctagaccatcccatcctggcggacccccagtctctggcacactgcagggagccggtctgggaacaaatgcatcactggcccagatggtgagtggtcttgttgggcagctcctgatgcaacctgtgttggttgcacagggaaccccaggcatggcccctcccccagcccctgccactgcctccgctagtgccggaacaactaacactgccacgactgcgggaccagccccaggcggacctgcacaacctcccccaactccgcaaccttctatggcagacctgcaattcagccagctgttggggaacctgcttgggcctgctggccctggggcaggcggaagtggcgtggcaagccctaccataaccgtagcgatgccaggcgtacctgcatttctgcaaggtatgacggattttctccaggctacccagaccgcacccccaccacctccccctccccctccgcctcccccagccccagaacagcaaacaatgccaccccctggttcccccagcggtggcgctggtagtcctgggggattgggactggagagcctgagcccagaatttttcactagtgtggtccagggcgtgctgtcgtcactgctcggaagcctgggcgcacgtgcaggttcctctgaaagtatcgctgcatttattcagaggttgagcggctcctccaacatattcgagccaggcgcagacggcgctctgggattcttcggcgctctgttgtcactgttgtgccaaaatttcagcatggtcgacgttgtgatgctgcttcacggacattttcagccactacaaaggctgcaacctcaactgaggagcttctttcaccagcactacctcggcggacaggagccaactccatccaacatccgaatggctacccacactttgataaccggcttagaagagtatgtgcgggaaagcttttcgttagtccaggtgcagcctggcgtcgacatcataagaacaaatctggagtttttgcaagagcagtttaatagcatcgcagcccacgtactgcattgtaccgattctggtttcggcgctagactgctcgagctttgcaaccaggggctgttcgagtgcctggctttgaacctccattgtctgggcggacagcagatggagctggcagcggtgatcaatggcagaatcagacgaatgtccaggggcgtcaaccctagccttgtttcgtggctgacaactatgatgggcctgcggctccaggttgtcctggaacacatgccagtagggcctgacgcaatccttcggtatgtaagacgggtgggggatccaccccagcctctgccagaggagcccatggaggttcagggagccgagagggcctctcctgagcctcagagagagaatgcctccccagctcccggaacgactgccgaagaagcaatgtctcgcggtcccccaccagcgcctgaaggcggaagccgagacgaacaagacggcgcaagtgcagagactgagccctgggcagctgctgtgccccctgaatgggtgcctattatccagcaggacatccaaagccagcgtaaggttaaaccacaacctcccttgtctgatgcatacttgagcgggatgcctgcaaaaaggcgaaagacgatgcagggtgagggacctcaattgctcctatctgaggccgtcagtagggctgcgaaagccgctggagcacgccctctgaccagtcccgagtcactgagtcgggacctggaagccccagaggtgcaggaaagttaccggcaacagctgcgaagcgacattcaaaaaagactccaggaagatcctaattactctcctcaacgctttccgaatgctcagcgcgcattcgccgacgacccctag

SEQ ID NO: 215805 - DNA, 735 bp, synthetic construct
  misc_feature 1..735: note = Description of Artificial Sequence: Synthetic coding sequence
  source 1..735: mol_type = other DNA
atggagcctaacgactctacctccactgccgtagaagaacctgattctctggaagttctagtgaaaacactggattcccagacccgaactttcatcgtaggagctcagatgaacgttaaggaatttaaagaacacattgcagcatccgttagcattccttctgaaaagcagaggctcatatatcaaggtcgggttctccaagatgacaagaagctgcaggagtacaacgttggcggtaaggtcattcatcttgttgaacgcgctccccctcagacccacctcccaagcggagcatcaagcggtaccggaagcgcaagtgcaacacatgggggaggctctccaccgggtactaggggcccaggagcttcggttcacgatagaaatgccaactcatacgttatggtgggcacctttaatctgccttcggagcctcgtgttcgcctcgtgatggcgcagcacatgatcagggatatacagaccctgttgagccggatggagtgtcgtggaggccctcagccgcagcatagtcagcctcctccacagccgcctgccgttacacccgagcctgtcgctctgtcatctcagacctctgagcccgttgagtccgaggcaccacctcgggagccaatggaggctgaggaagtggaagaacgggctcccgcacagaatcctgagctaactcccggaccagcccctgccggtcccacgcccgcaccggagactaatgccccttag

SEQ ID NO: 215806 - DNA, 1548 bp, synthetic construct
  misc_feature 1..1548: note = Description of Artificial Sequence: Synthetic coding sequence
  source 1..1548: mol_type = other DNA
atggagcctaacgacagcacatctacagctgtagaggagccggattcgctggaggtgctcgttaagacgctcgattcccagacaagaacattcattgtgggggcacaaatgaacgtgaaagagttcaaggagcacatagctgcctccgtgagcattccttctgaaaaacagagattgatttatcaggggcgagtgctgcaggacgataaaaaattgcaggagtacaatgtgggcggtaaagtgatccacctcgtggaacgcgcaccaccccagacacacctgccttccggggcatcaagcggcactggaagcgcctcggccacacacggcggtggcagtccgcctggcacaagggggcctggtgcctctgttcacgaccggaatgctaactcttatgtaatggtgggtacgtttaatctgccctctgacggctccgcagtggacgtgcacattaatatggagcaggctcccattcagtccgagcctcgcgtacgcctcgtcatggcccagcacatgatccgagatatccagactcttctcagccgaatggaatgtcgtggagggccacaaccccaacacagtcagccccctccacagccccctgccgtgacgccagaacccgttgccctgtcaagtcagacttctgagccggtggagtccgaagctccccctagagagccgatggaggccgaggaggtcgaggagcgggcaccagcccaaaatccagagctcacccccggacctgctcctgccggtccaacaccagcccctgagactaacgccccaaaccatccaagcccagcagagtacgtggaagtattgcaagaactccagcgcttggagtcacgacttcagccgtttctgcagcgatactatgaggtacttggagctgccgctacaaccgattataacaataaccacgagggccgagaagaagaccagaggttaatcaacctcgtaggagaatccttgcggctcctgggcaacaccttcgtcgctctaagcgatctacgctgcaatctcgcctgtacgcccccaaggcacctccacgtcgtgagacccatgagccattacactacacccatggtgcttcagcaggccgctatcccaattcaaattaacgttgggactacggtgactatgactggaaacggcacaagacccccaccaacaccaaacgccgaagctccccctccgggtcccggtcaagcttcttccgtggctccgagttcgacaaatgtggaaagttctgctgagggcgctcctcccccaggacccgcaccgcctcccgcaacctcacacccgagggttatcagaatcagccaccagtcagtggagcccgttgtgatgatgcacatgaacatacaggactctggaacacaacctggtggggtacccagtgcacccacgggcccactcggcccaccagggcatggtcagacgttgggaagtactctgatacaactaccatcactccccccagagttcatgcacgccgtggcacatcagatcacccaccaggccatggtcgccgctgtggcatcatag

SEQ ID NO: 215807 - DNA, 3381 bp, synthetic construct
  misc_feature 1..3381: note = Description of Artificial Sequence: Synthetic coding sequence
  source 1..3381: mol_type = other DNA
atggaaccgaacgacagtactagtacggctgttgaagagcccgattcactggaggtgctcgtgaaaaccttggattcccagactaggacgttcattgtcggcgcacagatgaatgtcaaagagtttaaggagcacattgcagctagcgtgtctattcccagcgaaaagcagagactgatataccagggcagagtgctacaggacgacaagaaactgcaggaatacaacgtcggcggtaaggttattcacctcgtggagagagcacctccacagactcatctgccctcaggggcttcgtctggcaccggatccgcttccgccacccacgggggtggaagtcctccaggtacgaggggacccggagccagcgtgcatgacagaaacgctaattcatacgtgatggtggggaccttcaacctccccagcgacggcagcgccgtggacgtccacatcaatatggaacaggcaccgatccagagtgaacccagagtgaggctggtcatggcacagcacatgattagagacatccagacgctcctctcacgcatggagtgtcgagggggtccgcagccccagcactctcaaccaccgcctcagccacccgcagtgactcctgagcccgtggctctatcctcccagacctctgaaccggtggaaagcgaagccccacctagggaacctatggaagcagaagaagtcgaagagagagccccagcccagaaccccgagctgaccccaggcccagcacctgccggtcccaccccggcacccgagactaatgctcccaaccatccgtcgcccgctgagtatgtggaggtgttacaggagctacagagactggagagccggttacagccgttccttcagcgctactacgaggtactcggcgcagctgcgacaaccgattataacaataaccatgaaggcagagaggaggatcagaggctgatcaacctggtaggcgagtcactcagactactcggaaacaccttcgtcgcactgtcagatcttcgatgcaatctggcctgcaccccaccccgtcatctgcacgtcgtgcggcctatgtctcattacaccacacctatggtcttgcagcaggctgcgatcccaatacagataaatgttgggacaacagtgacaatgacaggcaatggaacgcgcccacccccaactcctaacgccgaggccccacccccaggacccggacaggccagctcagtggccccaagttctactaatgtggagagcagtgctgagggcgcaccccctcctgggcctgcccctcctcccgcaacgtctcacccacgtgtgattcggatctcacaccaatctgtagagccagtggtgatgatgcacatgaatatccaagacagcggcacccaacccggtggcgttcccagtgcccctactggacctctgggcccaccgggtcacggacagaccttgggccagcaagtaccgggattccctacggctcccacaagggtggtaattgcgaggccaacacccccacaagcccgacccagccacccaggcggtcctcccgtcagcggcaccctacaaggcgctgggttaggcactaacgcatctctcgcacagatggtgtcaggtctagtgggacagcttctgatgcagcctgtgctggtggctcaaggcacccctggaatggctcctccaccggcacccgctacggcatctgcatcagccggaacaacaaacaccgctacaactgccggacccgctccaggcggacctgcacaaccaccccctaccccgcaacctagcatggccgacttacagttctctcagcttctcggcaatctacttggcccagccggaccgggagcagggggatctggcgtcgcatcacccacaataacagtcgcgatgcccggtgtgcctgcttttctgcaaggtatgactgattttttgcaggctactcaaactgctcccccacccccaccgccaccgccaccccctccccctgctcccgaacaacagaccatgccaccccctggttccccctccggtggcgctggaagcccaggaggacttggcctggagtcactgagccctgagttctttaccagcgtggtgcagggcgtgcttagctctttactggggtctcttggggcacgtgccggatctagcgaatccattgccgctttcatccagcgactttctggatcatctaatatctttgaaccaggcgctgacggggctctaggatttttcggggctttgcttagcctactttgccagaactttagcatggtggatgtcgtcatgctcctccacgggcacttccagcccctgcagcggctacaaccgcagcttagaagcttttttcaccagcattacctcggcggacaggagccaacaccctcaaacatacgcatggcaacgcacaccctcatcaccggcctggaggagtacgtccgcgaaagcttctctcttgttcaggtccaacccggtgtggacattatccgcaccaacctggagttcctgcaagaacaatttaattctatcgcggctcacgtgttacactgcactgacagcggattcggagctagattgcttgagctgtgcaaccagggactgtttgagtgtttagccctgaatttacattgtctggggggtcagcagatggaactggccgcagtgattaatggtcggatacggcgaatgtcacgcggtgtgaatcctagcctcgtctcttggctgactactatgatgggcctcagactgcaggtcgtcctggagcatatgcccgtaggtcctgacgctatcctgcggtacgttcgaagagtaggcgacccgccacagcctcttcccgaggaacctatggaagttcagggcgctgagagggccagtccagagcctcaacgagagaatgcatcgcccgctcctgggacaaccgctgaagaagccatgagccggggaccccctccagcacccgaagggggtagccgcgacgaacaagatggagccagcgctgaaaccgaaccttgggcagccgctgtgccccctgagtgggtaccaattattcagcaggacatccagtcacagagaaaggttaaaccccagccgcctttgtcagatgcctatctgagcgggatgcctgccaagcgcagaaaaacaatgcagggcgaaggaccccagcttttgctctcagaggccgtgagccgagccgctaaggctgcaggggcaaggccacttaccagtcccgaaagtctgtccagggatctcgaggctccagaggtgcaggagtcttaccggcagcagctgcggtctgatatccagaagcgactacaggaagaccccaattattctcctcaacgttttcccaatgcacaaagggcattcgccgacgatccctag

SEQ ID NO: 215808 - DNA, 411 bp, synthetic construct
  misc_feature 1..411: note = Description of Artificial Sequence: Synthetic coding sequence
  source 1..411: mol_type = other DNA
tgacggatgtcccggggtgtcaatccttcacttgtctcttggcttacaaccatgatgggccttaggctgcaagtggtgctcgagcatatgcccgtaggccctgacgctattctaagatatgtgcgcagggtaggggatccacctcaacctcttcccgaggagccaatggaggttcaaggggcagagcgggcaagtccagagccccaggagtgggttccaatcattcagcaagacatccagtcccaacgcaaagtgaagcctcagccacctctgtccgatgcgtacttaagtgggatgccagcgaagcgcagaaagctcagaagtgatatccagaaaagattgcaggaggatcctaactattcaccccagaggtttcccaatgcacagagagctttcgcagatgacccgtag

SEQ ID NO: 215809 - DNA, 3399 bp, synthetic construct
  misc_feature 1..3399: note = Description of Artificial Sequence: Synthetic coding sequence
  source 1..3399: mol_type = other DNA
atggaacctaacgatagcacctctacagctgttgaggagccggattcactagaagtattagtgaagaccctagatagtcagacacggacgttcattgtcggcgctcagatgaacgtgaaggagtttaaggagcacatagcggcaagcgtctccatccctagtgaaaagcagaggctgatctaccagggtagggtattgcaggatgacaaaaagttacaggagtataacgtgggaggaaaggtaatacacctggtggagcgcgctccaccacaaacccatctgccaagcggagcatcttccggaactggctccgcttctgccacccatgggggagggagccccccaggcacgagaggacctggagcctcagtccacgacaggaacgccaatagttatgtgatggtgggcaccttcaacctgccatctgatggctctgctgtcgacgttcatattaatatggagcaagcgccaatccagtccgaacctcgggtgagactggtgatggcacagcatatgatccgggatatccaaactttactgtcgaggatggagacattgccgtaccttcagtgcagaggcggtccgcagccccaacatagccagccacctccccagcctcctgccgtcaccccggagcccgtggcgctttcatcccagacaagtgagcctgttgagagcgaggctccccctcgtgaaccaatggaggcagaggaggttgaggaacgcgcacctgcccaaaaccctgagctgactcctggacccgctcctgccggacccacccctgcacctgaaacaaatgccccaaatcaccccagtcctgctgagtatgttgaggtgctgcaggaactgcagcgtctcgagagcaggctacagccgttcctccagaggtactatgaagtgttaggagccgcagccactactgattataacaataaccacgagggtcgcgaggaggatcaacgtctgattaatctggtcggcgagtcactgagactgctcgggaacacctttgtcgctttgagcgaccttaggtgcaacctggcctgcactccgcctcgacatctgcatgtggtcagacctatgtctcactataccactccgatggtgttgcagcaggcggcaattcccattcagatcaacgtcggaaccacagtaacaatgactggaaatggtacacgccctcctccaacccctaacgccgaagccccacccccaggcccagggcaagcaagcagcgtagcaccatccagtaccaacgtggaaagcagtgccgagggagcacctccccctgggcctgcaccacctcccgcaaccagccatccccgtgttatccgcattagccatcagagcgtggagccagtggtcatgatgcatatgaacatccaggactcaggaacacagcctggcggagtcccatccgccccaaccgggcctttggggccacccggacatggtcagaccctcgggcagcaagtccctgggttcccaactgctccaactcgggtcgtgatagctcggcctactccccctcaggccaggccttcacacccagggggtcctccagtgtctgggaccctgcagggagccggtctagggaccaatgctagtctagcccaaatggtgtctggactcgtcgggcagctcttgatgcaacccgtgctggttgcccaaggtactcctggaatggcaccccctccggctcccgctaccgcttccgcttcagccggtaccacaaacacggcgaccaccgccggaccggctcctgggggaccagcccaacctcctccaactccccagccttcaatggcggatctccagttctcacagctgctcggcaaccttctcgggcctgctggtcctggtgctggaggaccaggggttgccagccctaccattactgtagccatgcccggagtgcctgcttttttgcagggcatgactgactttcttcaagcaacccagaccgcccctccccctcctccccctcctccgccacccccacccgctcctgagcagcagacaatgccacctccaggcagcccttccggcggagctggctcccctggcggattgggcttagaaagcctgtctccggagttctttaccagcgtggtacagggtgttctaagttccctccttggcagcctgggggctagggctggaagcagcgagtccatcgccgcatttattcagcgcctgtcgggttcaagcaacattttcgaacctggggcagacggggctcttggattcttcggggcactcctatctctcctctgccaaaatttctctatggtggatgtggtgatgctcctacatgggcacttccaacccttgcagagactgcagccacaattacggtccttttttcatcaacattatcttggaggccaagagcctacacctagtaacatcaggatggcaacccacaccctgatcactggcctggaggaatatgtcagagaaagcttctcccttgtgcaagttcagccaggggttgatataatccgcactaacttggagttcctgcaggagcagtttaattccattgctgctcatgtgctccattgcactgattcgggtttcggagcgaggttgctcgagctttgtaaccagggtctattcgaatgtctggctttgaatctccactgcctgggcggtcaacaaatggaacttgcggcagttatcaacggtcgaatccgccgtatgagtaggggcgttaacccctctctagtgtcttggttaaccaccatgatgggcctgagactgcaggtggtgctggagcacatgccagtgggccctgatgctatactccgatatgtacgtagagttggcgacccgccacagcctcttcctgaagaacccatggaggtgcaaggcgctgagcgggctagtccagagccacagagagagaacgcatctcctgccccaggcaccacagctgaagaggctatgagccgcggaccgcctcctgccccagaaggcggaagcagggacgagcaggatggcgctagtgccgaaaccgaaccctgggcggctgccgttcccccagagtgggtccccatcattcagcaggacatccaatcgcaacgtaaagtgaaacctcagcccccattatcagatgcctatctttccggaatgcccgcaaaacgacgaaagaccatgcagggtgagggcccacagctgctcctttcggaggcggtgagccgagccgctaaggctgctggcgctcggcctctgacctctccagagtcactgtcacgggatttggaggcacccgaggtccaggagagctaccggcaacagctgaggagcgatatacagaagcgattgcaggaggatccaaattatagcccccagcgtttccccaatgcacaaagagcattcgccgacgacccctag

SEQ ID NO: 215810 - DNA, 702 bp, synthetic construct
  misc_feature 1..702: note = Description of Artificial Sequence: Synthetic coding sequence
  source 1..702: mol_type = other DNA
atggaacctaacgactctacttccactgcagtggaagagcctgactctctggaggtgctggtaaagacgctggactctcagacacgaacgtttattgttggggcacagatgaacgttaaggagtttaaggagcacatcgcagccagtgtctctatccctagtgaaaagcagaggttgatttaccagggtagagtgctccaagacgataagaagctgcaggagtacaacgtgggcggaaaggtgattcatcttgtcgaacgagcccctccccagacccacctgccatccggggcatcgtcgggcacagggagtgctagtgctactcacgggggaggaagcccgccagggacacgcggacccggagcttccgtgcatgacaggaacgcgaattcctacgtaatggtagggacgttcaacctgccttccgacggctctgcagtggacgttcacataaatatggagcaggcacctatccagagtgagcccagagttcgcttggtgatggctcagcatatgatcagggatattcaaacacttttaagcagaatggaaaccctaccctaccttcagtgccggggtgggcctcagccccaacactcccagccccctcctcagcctcctgctgtgactcccgaacctgtggctctatccagtcagacgtctgaaccagtcgagtcagaggcacccccaagggaaccctag

SEQ ID NO: 215811 - DNA, 558 bp, synthetic construct
  misc_feature 1..558: note = Description of Artificial Sequence: Synthetic coding sequence
  source 1..558: mol_type = other DNA
taactggcctgtacacctccaaggcatcttcacgttgtgagacctatgtcacactacacgactcctatggtgctgcagcaggctgcaattccaattcagatcaatgttggaacaaccgttaccatgacaggaaacggtacccgaccacctcccaccccaaacgccgaggctccccctccaggcccaggccaggcaagtagtgtagccccttcctctaccaacgtggaatcctcagctgagggagccccaccaccaggacccgctccaccacctgctactagccaccctcgggttattagaatcagtcatcagtcggtcgaacctgtcgtgatgatgcatatgaatatccaaggacagcaggtccctggcttccccactgcaccaactcgcgtggtcatcgcacgccctaccccgcctcaggctagaccaagccatccagggggtccacctgttagcgggaccctccaaggagccggactcggtacgaatgcaagcttagcccaaatggtgagtggactggtgggccagctccttatgcagccagtactcgtggcctag

SEQ ID NO: 215812 - DNA, 738 bp, synthetic construct
  misc_feature 1..738: note = Description of Artificial Sequence: Synthetic coding sequence
  source 1..738: mol_type = other DNA
cctccacgccatctacatgttgtgcgccctatgtcgcactatactacaccgatggtgctgcagcaggcggctatcccaatacagattaacgtagggaccacagtgacaatgacaggcccagcccctccacccgctacttctcaccctagagttatccgcattagtcaccaaagtgtcgagcctgtggtgatgatgcacatgaacatccaggatagcggaactcagcctggcggagttccgagcgcacctaccggaccactaggcccacctggacacggccagacgctgggccagcaagttccaggctttcccactgctccgactagggtggtcatagctcgccctacacccccacaagccagaccctcccacccagggggacctcctgtgagcggtacactccagggtgccggacttgggaccaatgctagtctcgcccagatggtgagtggcctagtcggtcagctcctcatgcagcccgtattagtcgcccagggaacacccggaatggcaccccctccagccccagcgactgcctctgcgagtgctgggacaacaaacaccgccaccacagcaggccctgccccaggtgggccagcacagcctccaccaaccccacagccttccatggcggatctgcaattctctcagttgctgggcaatttgttaggaccagccggacccggtgccggtggaccaggcgtcgcatcccctaccatcactgtcgctatgccttag

SEQ ID NO: 215813 - DNA, 702 bp, synthetic construct
  misc_feature 1..702: note = Description of Artificial Sequence: Synthetic coding sequence
  source 1..702: mol_type = other DNA
atggagcccaacgattctaccagcactgccgtagaggagccagactcactggaggttctcgtcaaaactctcgacagtcagacacggacttttatcgtaggggcacaaatgaatgtcaaagaattcaaagagcacatcgccgcaagtgtcagcattccttcagaaaagcagaggctgatttatcagggcagggtcctgcaagatgacaaaaaactacaggaatacaatgttggcggtaaagtgatccacctcgtggagcgcgcacctccacagacccacctgccaagtggcgcatcctccgggaccggaagcgctagtgccacccatggaggtgggtctccccctgggacacggggaccaggggcaagcgtgcacgataggaatgctaattcatacgtgatggttggtaccttcaatctgccatcggacgggtccgcagtcgatgttcatatcaacatggagcaagccccaattcagagtgaaccgagggtgcgcttggtgatggcccaacatatgattcgggatatccagacgttgttgtctcggatggaaaccctcccatatttgcagtgtcggggaggacctcagcctcagcactcccagccaccacctcagccacccgcagtgactcccgagcccgttgctctgagctcacagacctcagagcctgttgagtccgaggctccaccgcgagaaccttag

SEQ ID NO: 215814 - DNA, 780 bp, synthetic construct
  misc_feature 1..780: note = Description of Artificial Sequence: Synthetic coding sequence
  source 1..780: mol_type = other DNA
atggaacccaatgactccacaagtaccgcggtggaagaaccagactcattggaggtcctggttaaaaccctggactcgcagacacgaacattcatagtaggggctcagatgaacgtgaaggagtttaaagaacatattgccgctagtgtttccattccaagcgaaaagcagaggttaatttaccagggacgcgtattacaggatgacaagaagctgcaagagtacaacgtcggcggaaaggtaattcacctggttgaacgcgcacctccccagacccacctgccctccggagcaagcagcggcaccggtagcgccagtgctacccacgggggtggttcaccaccaggcactagagggcctggcgcaagtgtgcacgacaggaatgcaaacagctacgtgatggtgggtacatttaacttgccgagcgatggatcagctgtggacgtgcacatcaacatggagcaagccccaattcagtcagaacctcgtgtgcgactggtcatggcccagcacatgatccgggacatccagactctgttgagccgcatggagtgtagagggggtccacagccccagcacagtcagcccccaccacagccaccagccgtgacccccgaaccagtcgccctgtctagccagacaagtgaacctgtggagtcggaggctccaccaagggaaccgatggaagcagaagaagtcgaagagcgggcacccgcacagaaccccgagctcacccccggaccagccccagcagggccaactcccgctcccgagacttag

SEQ ID NO: 215815 - DNA, 702 bp, synthetic construct
  misc_feature 1..702: note = Description of Artificial Sequence: Synthetic coding sequence
  source 1..702: mol_type = other DNA
atggagccgaatgactctacttccacagcagttgaggaaccagatagcctggaagtactcgtgaaaactctagattcccagacaagaacatttattgtaggcgctcagatgaatgttaaggagtttaaggagcatatcgccgcatcagtgtctataccctcagagaaacaacgtttgatttaccagggtcgggtcctccaggatgacaagaaactgcaggaatacaacgttggtggaaaagtgatccatctggtggagcgcgctcctcctcaaacccacctcccatcaggcgcatcttctggcaccggcagcgcaagcgcaacacacggcggtggcagcccccctggtacacggggtcccggtgcctcagtgcatgatcgcaacgccaactcttatgtcatggtgggcacattcaacctgcctagtgacggatctgccgtggacgttcatatcaacatggagcaagctcccatccagtcggagccgagggttcggttggtgatggctcagcatatgatacgcgatatccaaacattattgagcaggatggagactctgccttacctgcagtgcagagggggtccacaaccgcaacattctcaaccccctccgcagcctcctgcagtcactccagagcccgtggccctcagttctcagaccagtgagcctgtagagagcgaagccccaccccgtgagccctag

SEQ ID NO: 215816 - DNA, 1548 bp, synthetic construct
  misc_feature 1..1548: note = Description of Artificial Sequence: Synthetic coding sequence
  source 1..1548: mol_type = other DNA
atggaacctaacgactccacaagcaccgccgttgaagaaccagactccctcgaggtccttgtgaaaactttagactcccaaacaaggacttttattgttggtgcccagatgaacgtaaaagagttcaaggagcacatcgctgcctctgtttctatcccctccgagaaacaacgattaatataccagggtcgggttctgcaggacgataagaaacttcaagagtataacgtaggcggaaaggttatacatctggtggagcgcgctccacctcaaacccatctgccctctggtgcttcttctgggactgggagcgcctcggctacccacggaggcggaagccctccgggaactcgcggtccgggtgcatctgtgcacgatagaaatgcaaactcctacgtaatggtgggcactttcaaccttcctagtgacggctcagctgtagacgtgcacatcaacatggagcaagcacccatccaatccgagccgcgagtgagactcgtcatggctcagcacatgatccgggacattcagaccctcctaagcaggatggagtgtcgaggagggccacagccacaacattcacaaccccctccgcagcctccagccgttacacctgaacccgttgcactctcttcacagactagtgaaccggtcgaatcagaggctcctccacgcgagcctatggaagccgaggaggtggaagagagggctccagcgcagaacccagagctgactccgggacctgctccagccggacctacccccgctcccgaaaccaacgcacctaatcacccatcgccagccgaatacgtggaggtacttcaggagttgcagcgtctggaatcccgcctacagccttttctacagagatactatgaggttctgggagccgcagcaactaccgactacaacaacaaccacgaggggcgtgaggaagaccaaagactaattaatttagtaggtgagtcccttcgacttcttgggaatactttcgtggcgctatccgacctcagatgcaatctggcctgcacccccccaaggcacctacacgtggtgcggcctatgagccattacacgacccccatggtactccaacaggctgccattccaatccagataaatgtcggcaccactgttactatgacaggtaacggcacgcgccctccgccaacgcccaatgctgaggctcctcctcctggcccaggccaggcatcctctgtggcgcctagcagcacgaatgtggagtcttccgccgaaggcgctccacctcctggtcccgcaccacccccagccaccagccatccccgtgtgattcgaatcagtcaccagtccgtggaaccagttgtcatgatgcatatgaatattcaggatagcggaacccagccgggaggggtcccttccgccccaacaggtccactcggcccaccaggccatggccaaaccctcggttctaccctgatacagctgcctagtctgcctcccgaattcatgcatgcagtggctcaccagattactcatcaggctatggtcgctgctgtcgcctcttag

SEQ ID NO: 215817 - DNA, 477 bp, synthetic construct
  misc_feature 1..477: note = Description of Artificial Sequence: Synthetic coding sequence
  source 1..477: mol_type = other DNA
atggagcctaatgatagcacaagtaccgctgtagaggagcctgattcgctggaagtactcgtaaaaacactcgattcgcaaacgagaactttcatagtgggtgctcagatgaatgtgaaggagttcaaagagcacattgccgcttcggtttccattccctccgaaaagcaaagactgatttaccagggcagagttctgcaggatgacaaaaagcttcaggagtataacgtcggcggtaaagttattcacctggtggaaagagctcccccacagacacacctgccctcgggcgcaagcagcggcacagggtccgcttctgcaacccacggcggaggatcccctcctggcacaaggggacctggcgcaagtgtacacgatcgcaatgctaactcctacgttatggtgggtactttcaacctccctagcgatggatcagcagtggacgtgcatatcaatatggaacaagctcccatttag

SEQ ID NO: 215818 - DNA, 702 bp, synthetic construct
  misc_feature 1..702: note = Description of Artificial Sequence: Synthetic coding sequence
  source 1..702: mol_type = other DNA
atggagcctaacgactctacctccacagcggtggaggaacctgacagcctggaggtgttggttaagactctagacagccaaaccagaacgttcatcgtcggcgctcaaatgaacgtgaaagaattcaaagagcacatcgctgcttccgtgtcgattccgtctgagaagcagaggctgatataccaaggtcgggttctgcaggatgacaaaaagctacaagagtacaacgtgggaggtaaagttatccatttggtggaacgggcacccccacagactcacttgcctagcggcgcatctagtggtacaggatctgcatccgctacccatggaggagggtcccccccaggaacaagaggccctggggcttccgtgcacgatagaaatgctaactcatatgtcatggttggcacctttaatcttccatccgatggatccgccgtggatgtgcatataaatatggagcaggctccaattcagtctgaaccacgggtgcggttggtgatggcccagcacatgattagggacattcagacccttctctcacgcatggaaacactcccctacctgcagtgtagagggggaccccagccacagcatagccagcctccaccccagccacccgcagtgaccccagagcctgtcgctctgtcatcccaaactagtgagcctgtggaaagcgaagcccctcccagggagccatag

SEQ ID NO: 215819 - DNA, 735 bp, synthetic construct
  misc_feature 1..735: note = Description of Artificial Sequence: Synthetic coding sequence
  source 1..735: mol_type = other DNA
atggaacccaacgacagtacctccacggctgtggaggagcccgattcactggaggtcttggtcaaaacactggatagccagacccggacattcatcgtcggagcccagatgaatgttaaggagttcaaggaacacatagcggcttcggtctccatccccagtgaaaagcagagactcatctatcagggacgggtgctacaagatgacaaaaagctgcaggaatacaatgtcggaggaaaggtgattcatctcgtggagcgcgctcccccacaaactcacttgccgtccggcgcaagctctggaacagggtccgccagcgccacccacgggggtggttcaccaccagggacccgcggaccaggcgctagcgttcacgaccgcaatgctaactcgtacgtgatggtaggaacctttaatttacctagcgagccccgtgtgagactggtaatggcccagcatatgattcgtgatatccagaccttgctctctagaatggagtgtagggggggaccccaaccgcaacattctcaacctccgcctcagcctcctgcagtgacccccgagcctgtcgctctgagttctcagacctcggagcccgtggaaagcgaggcaccacctcgagagccgatggaagcagaagaggttgaggagcgtgcccctgcccaaaacccagagctcactccaggcccagcccctgcagggccaaccccggcaccagaaactaacgctccatag

SEQ ID NO: 215820 - DNA, 3399 bp, synthetic construct
  misc_feature 1..3399: note = Description of Artificial Sequence: Synthetic coding sequence
  source 1..3399: mol_type = other DNA
atggagcccaatgactcgacgtccacggccgtggaggaaccagactcactcgaggtcttagtgaagacacttgatagtcagacgagaacatttattgtgggtgcacagatgaacgtgaaagagttcaaggagcacatcgccgcttccgtttctatccccagtgagaagcaacgtttgatataccaaggacgcgtgctccaggacgataagaagttgcaggagtataacgttggcggaaaagtcatccatctggttgagcgggctcctccacaaacgcatctaccgagtggcgcttcctccggtacaggctctgcaagtgcaacgcacggaggaggaagcccacccggtaccagaggccctggcgctagtgtccacgatcgtaacgcaaatagctatgtcatggttgggacttttaatcttcctagcgacgggagcgccgtggatgtgcatatcaacatggaacaagctccaatccaaagcgaacccagagtccgactagttatggcccaacacatgatcagggatatccagaccctccttagccgtatggagacgctgccatacctgcagtgccggggtggaccgcagcctcagcattcgcaacccccacctcaaccccctgcagtgacgccagagcccgtagctctttctagccagacctctgagcctgtcgagagcgaagcgcctccaagggagccaatggaagcggaagaagtcgaggaaagggccccagcgcagaacccagaactgacaccaggcccagcccctgccggacctaccccagcgcctgaaactaacgcccctaaccacccgtcccctgccgagtacgttgaagtcctgcaggaactccagaggctcgaaagcaggctgcaaccctttctccaacggtattacgaggtgctcggtgcggctgccacgacagattacaacaataatcacgagggccgagaggaagatcagcggctgattaatctggtgggtgaaagtttgcgcctgttaggtaacacattcgtggcgctgtccgacctcaggtgtaatctggcctgtacacctcccagacatctccacgtggtccgccctatgtcacactatactactccaatggttctccagcaagcggctatcccgatccagatcaatgtggggacgacagttacgatgactgggaacggcactcgccctcccccaactcctaacgcggaggcccctccaccaggccctggtcaagcaagttcagtagcaccttcctctaccaatgtggagtcttccgcggagggggctcccccacctggtcccgcaccacctccggcaaccagtcatccaagggtgatacggatcagccatcagtccgtggaacctgtcgtaatgatgcacatgaatatacaggacagtgggacacaacccggaggtgtgccctcggcgcctacaggacctctcggtcctccaggacacggacagaccctgggccagcaggtacctggtttcccgacggcccctacgagagtggtgatagccaggcctactcctccacaagcacggccatcccacccaggtgggccacccgtgagcggaactctgcaaggcgctgggctcggaaccaacgcaagtctcgcccagatggtgtcggggctggtgggtcagctgctgatgcagcccgtactggtcgcccagggtacacctgggatggcgcctccccctgctccagccacagccagcgcctccgcaggtactacaaacacggctactaccgccggtccggcaccaggcggaccagctcagccccctccaaccccccagccctctatggctgatctgcagttctcccagctactcgggaatctcctggggcctgccggaccaggtgcaggcggaagcggagtagcctcacccacaatcaccgtcgcaatgccgggtgtccctgcttttctacaggggatgactgactttcttcaggccacacagactgctccccctccaccaccacccccaccccctccccctcctgcacctgaacagcagacaatgcccccacccggatccccttctggcggagcaggcagtcctgggggactagggctcgagtcacttagtcctgagtttttcacatccgtcgtgcagggagtgctgtcatccctactcggtagcttgggagccagggcaggctcaagtgagtccattgcagcgtttatccaacggctcagtggcagttcgaacatctttgaacctggagcggatggggcactgggttttttcggagccctgctttccctgttgtgccagaacttctcaatggtagatgtagtgatgttgctgcatgggcacttccagccactgcagcgcttacagccacagttaagaagctttttccaccagcactacctgggcggacaagaaccaacaccaagtaacattcgcatggcaacacatacccttatcacaggactggaagagtacgttcgggagtcattctccctagtgcaggtgcagcccggagtagacataataaggacaaatctagaattcctgcaggaacaattcaatagtattgcagcacatgtccttcactgcactgactcgggattcggcgcacgactgttagaactgtgcaatcaggggttgttcgaatgcctggctctgaaccttcattgtcttggaggtcagcagatggagttagctgcagttatcaatggacgcatacgccgtatgtcccgcggtgttaaccctagtctggtcagctggttaactaccatgatgggcctaaggctccaggtggttctcgagcacatgcctgtcggtccggacgccatacttcggtacgtccggagggttggggatccccctcagccgctccccgaagagcctatggaagtccagggcgctgagcgcgcttcccccgagcctcaacgggagaatgcctccccagctccaggcacaactgccgaagaggcaatgagtagaggcccaccaccagccccagaaggcggatccagagacgagcaagatggcgcatccgccgaaacagagccatgggctgctgcagtgccccctgagtgggttccaataattcaacaggatatccagagccagcggaaagtaaaaccacagccaccgctgtccgacgcctacctgtctgggatgcccgctaaacgccgaaagaccatgcagggagaagggcctcagcttctactaagcgaggctgtgtcgagggcagctaaggctgcgggtgccagaccccttacttctcccgaaagcttgtccagagacctggaggccccagaagttcaggagagctataggcaacaactccgatctgacattcagaagaggctgcaagaagaccctaactactccccccagcggttccctaacgcccagcgtgcctttgctgacgacccctag

SEQ ID NO: 215821 - DNA, 1548 bp, synthetic construct
  misc_feature 1..1548: note = Description of Artificial Sequence: Synthetic coding sequence
  source 1..1548: mol_type = other DNA
atggaacccaacgacagtaccagcaccgctgtcgaggagccagattccctggaggtgctcgtgaaaactttggattcacagactcgaacctttattgtgggcgctcagatgaatgttaaggaatttaaagaacacatcgccgcaagcgtcagcataccatccgaaaagcaaagactaatttaccagggtcgcgtactgcaggacgataagaagctccaggagtataacgtaggcggtaaggtaatccacctggtagagcgagcacctcctcaaacacacctaccctcgggcgcaagcagtgggacgggaagcgcatcagccactcacggcggagggtcgcccccaggtacccgaggccctggcgcttccgtgcacgacagaaatgctaatagctacgttatggttggcacctttaacttgccatcggatggcagcgctgtggatgttcacattaatatggagcaggccccaatccaatctgagcccagagtaaggcttgtgatggctcagcacatgatccgcgatatccaaaccttattgtcacggatggagtgtcgcggtggtccacaaccacagcactctcaacctccaccccagccccctgctgtgacaccagagcccgtggctctctcttcccaaacatccgaacctgtcgaaagtgaggccccaccacgggagccgatggaagccgaggaagtcgaagagcgtgcacctgcacagaatcccgaattgacccccggacctgcgcctgccggtccaacacctgccccagaaaccaatgcccctaaccacccatcccctgcagaatacgtggaagttctccaggagctccagagacttgagtctcggttgcagcctttcctccagagatactatgaggtgctgggagcggcagcaacaaccgactataacaataaccacgaggggcgagaggaggatcagaggttgatcaacctggtgggcgagtcactgcggctcttagggaatactttcgttgccctttccgatctgcggtgtaatctagcatgcactccaccacgtcatctccatgttgtgcggccaatgagccactatacgactccaatggtgcttcagcaggccgcaattcccattcagatcaatgtggggactacagtcacaatgactggcaacggcactaggcctccacctacaccgaacgctgaggcacccccaccaggcccaggtcaagcctcgtctgtcgccccttcatccactaacgtggaaagctccgcagagggagcgccacctcctgggcctgctccaccacctgcaactagccacccacgcgtaatccggatctcgcatcaatccgtagaacctgtcgtgatgatgcatatgaacatccaggacagcggaacacagcctggtggggtgccctctgcacccacaggccctctcggccctccagggcatgggcagacgctgggcagcacgctgatacagctgccttctttgccgcctgagtttatgcacgccgtggcacatcaaataacacatcaggctatggtggcagcagtcgcctcttag

SEQ ID NO: 215822 - DNA, 735 bp, synthetic construct
  misc_feature 1..735: note = Description of Artificial Sequence: Synthetic coding sequence
  source 1..735: mol_type = other DNA
atggagccaaacgatagtaccagtaccgccgttgaggaacctgatagtctagaggtgttggtgaagacgctcgatagccagactagaacctttatcgtaggcgctcagatgaacgtgaaggaattcaaggagcacattgctgccagcgtgtccattccaagcgagaaacagcgtctgatctaccaggggagggtcctgcaggacgataaaaaactccaggagtataatgtaggtggcaaggtcattcatctggtagagcgagctccccctcagactcacctgcccagcggagccagctcgggaacaggttccgccagtgcaactcacggagggggatcacccccaggaacgcgcggacctggggctagcgtgcatgatcggaacgccaattcgtacgtgatggtcggcactttcaacctaccatccgagcccagggtgcgactggtaatggctcagcacatgatccgcgatattcagacactcctctcccggatggagtgtcgtggcggtccccagccacaacatagccagccacctccccagccgcctgcagtgacacctgaaccagtggcacttagcagtcagactagcgaaccggtcgaatccgaagcccctccaagggagcctatggaagcagaggaggttgaggaacgagcgccagcacagaacccagaactgacacccggtcccgcacctgccggtcccacccccgctccagagacgaacgccccatag

SEQ ID NO: 215823 - DNA, 2232 bp, synthetic construct
  misc_feature 1..2232: note = Description of Artificial Sequence: Synthetic coding sequence
  source 1..2232: mol_type = other DNA
atggagccaaacgactctacctctacagctgtggaggagccagactctcttgaggttctggttaagactctggattctcagacgcgcacattcatcgtcggggcacagatgaacgtcaaggagtttaaggagcacattgctgcgtcggtgtcaatcccatctgaaaagcagaggcttatctatcagggaagagttcttcaagatgacaagaagctgcaggagtacaatgttggcggtaaagtcattcacctggtggagcgtgcaccccctcaaacccatctcccctcaggggcttcctcaggtacaggctcagcctcggcaacccatggagggggatctccgccaggtactaggggcccaggtgcttcagtgcatgaccgcaacgcaaatagctatgtgatggtgggtacattcaatctgcccagcgacggctcagccgtcgatgtgcatattaacatggagcaggcaccaatccaaagcgaacccagggttcgactggttatggcacagcacatgatcagggacatccagaccctcctgtcccgcatggagtgccgtggaggtccccagccccaacattcacagcctcctccccagcctcctgccgtcactcccgaacctgtagcattgtcaagccaaaccagcgaaccagtcgagtcggaggccccacccagggagcccatggaggcagaggaggtggaggaaagagcgccagcccaaaaccccgagcttaccccaggtcctgcccctgctggaccgacccccgctcccgagacgaatgccccaaatcacccgagccccgctgaatatgtggaagtgcttcaggaactccagagactcgagtcacgcctgcagccatttctgcagcgttactacgaagtgttaggggctgctgccactaccgattacaacaataatcacgagggacgggaggaggaccagcgactcatcaatctggtgggggagtcattaaggttactggggaacactttcgtggcgctctctgatctccgctgcaacctggcatgcaccccccctaggcacctgcatgtggtgcggcctatgagtcactacaccacacccatggtcctgcaacaggccgctatacctattcagatcaatgttggcaccaccgtcaccatgaccggaaatggcacacgtcctccacccactcctaatgccgaagctcctccaccgggtccaggacaagcatcttccgtggccccaagctcaaccaacgtcgagagcagtgcagagggagcaccacctccaggtccagccccaccaccagccacaagccacccgcgagtaatccgcattagtcatcagtctgtcgaacctgtggtcatgatgcatatgaatatacaggactcaggcactcagcctggcggagttccctccgccccaaccggccctctgggcccacccggacacgggcagacactaggttcaacactcatccaattaccatcgctgccacctgagttcatgcatgccgtcgcgcaccagataactcatcaggctatggtcgctgcagttgccagtgcagctgcaggacaacaggtccctggctttccaaccgcacccaccagagtggtgattgctagacctactcctcctcaggctaggccctcccatcccggtggaccacccgtgagcggaaccctacagggagctggtcttgggaccaatgctagtttagctcagatggtaagcgggttagtgggacagctgcttatgcagcctgtgttggtcgctcaaggcaccccagggatggccccaccgcctgcaccagcaacagcaagcgccagtgcaggtaccacgaataccgcaacaactgccggtcccgctccaggaggtcccgcacaaccaccaccaaccccgcagccatcaatggccgatctgcaattttctcagttactcggtaatctactgggtccagcaggacctggcgcaggagggcctggtgttgcctctccgaccatcacagttgctatgccaggcgtcccggcattcctccaggggatgaccgactttctgcaggcaacccagaccgcccctccaccaccccctcccccaccacctcctccgcctgcccctgagcagcagacaatgcctccaccaggctcgccgagtggtggggctggtagtccagggggactggggctcgagtctctgtctccggagttctttacgagtgttgtccaaggcgtcctgtcctccctgttgtag

SEQ ID NO: 215824 - DNA, 735 bp, synthetic construct
  misc_feature 1..735: note = Description of Artificial Sequence: Synthetic coding sequence
  source 1..735: mol_type = other DNA
atggagcccaatgactccacttccaccgccgtggaggaaccggattccctcgaggtactggtcaagaccctggatagccaaacacggacctttatcgtcggagcccagatgaatgttaaagagtttaaggagcatatcgctgcctccgtgagcataccgtctgagaagcagcggcttatatatcagggcagggtcctgcaggacgataagaagctgcaagagtacaacgtgggcggaaaggtgatacacctggtggaaagagcccctcctcaaacacatctgccatctggcgcatccagcggaacaggcagtgcttcagctactcatggcggaggttcccctccaggtactagggggccaggcgcttctgtgcacgatcgtaatgctaattcatacgtcatggttggcactttcaatctgcccagcgagccacgcgttcggctagtgatggcacagcatatgattagagatatccagaccctgctgtcccgaatggagtgcagagggggtccgcagccccagcactcccagccccctccccaacctcctgccgtgacgcccgagcctgtggcgctttcctcccagaccagtgaaccagttgagtccgaagcccctcctcgcgagcccatggaggcagaggaggtggaagagcgcgctccagctcagaaccccgagctgacacccggacctgctcccgcagggccaacccctgcccctgagacaaacgcaccctag

SEQ ID NO: 215825 - DNA, 735 bp, synthetic construct
  misc_feature 1..735: note = Description of Artificial Sequence: Synthetic coding sequence
  source 1..735: mol_type = other DNA
atggagccgaacgactccaccagtactgcagtcgaggaaccagactccctggaggttctcgtaaagacacttgacagtcagacacgcactttcattgtgggggcacaaatgaatgttaaggaatttaaagaacatatcgctgcatccgtgagcatcccgtccgaaaagcagagactaatttatcagggtcgcgtgttacaggacgataaaaagttgcaggaatataacgtaggaggcaaggttattcacttggtggagagagctcccccacagacccatctgccaagcggcgcaagctccggtactggatcagcatccgctacccacggcggaggctcacccccaggcaccaggggacccggtgccagcgtccacgacagaaacgccaatagttacgtgatggtcggcacattcaatcttccctctgagcccagagtgcgacttgtcatggcccaacatatgatacgggatatccagacccttctctctcgtatggaatgcaggggcggaccacaacctcagcattcgcaacccccaccgcaaccgcctgcagttaccccagaaccggtcgccctgtcgtctcagacatcagaaccagttgaaagcgaagccccacccagggaacccatggaggctgaggaggtggaggaaagggcacctgcccagaatcctgagttaactcctgggcctgccccagctgggccaacgccagcccctgaaactaacgcaccatag

SEQ ID NO: 215826 - DNA, 3399 bp, synthetic construct
  misc_feature 1..3399: note = Description of Artificial Sequence: Synthetic coding sequence
  source 1..3399: mol_type = other DNA
atggagccaaacgactctacctccaccgcagtcgaggaacccgatagtctcgaggtgctggtgaagactctcgactcccagactaggactttcatagttggcgctcaaatgaatgtgaaggaatttaaagaacacatcgcagcatctgtgtccatccctagcgagaagcagcggcttatctatcaaggccgagtactgcaagatgacaaaaaactccaggaatataacgtgggcggtaaggtcatacacctggtggagcgtgctccccctcagactcatctgccaagcggagcaagctccggcaccggaagcgcttctgccacacacggtggtggaagtccacctggcacaagggggcctggtgcatctgttcacgaccgtaatgccaactcgtacgtgatggtcgggacctttaatcttccctcggacggctcagccgtcgatgtgcatattaatatggaacaagcccctatccagtccgagcccagagttcgcctcgtgatggcccagcatatgatccgcgacatccagacactcctgtcccggatggagactctcccttacctgcagtgccgtggtgggcctcagccacaacacagccagccaccgccacagccccctgctgtcaccccggagccagtggctctgagctctcaaacctcagagcctgtcgagagtgaagccccaccgagagaacctatggaggcggaggaggtggaggagcgcgctcccgcacagaatcccgagcttacccccggtcccgctcccgcaggcccaacacctgcccctgagactaacgctcctaatcacccgtcccctgccgagtacgttgaggtactgcaggagctccagcgcctcgagagccgtctgcagcccttcctgcaaagatattacgaggttctgggggctgccgctactacagattacaataataaccacgagggcagggaggaggaccagagactgattaacctggttggcgaatctcttaggctgcttggcaacactttcgtagccctgagcgacctgagatgcaacttggcctgtaccccccctaggcatttgcacgtggttagaccaatgtctcactacacaacaccaatggtgctacagcaggctgctatcccaatccaaattaatgttggcactacggtgactatgaccggaaatggcacccgaccccctccaacccccaatgccgaagccccacctccaggtccgggacaggctagctccgtagcccctagctcaacgaatgtggaaagtagcgcggagggggctccccctccaggcccagcccctcctcccgctacaagccatccccgtgtgatccggatttcccaccaaagcgtggagcctgtagtcatgatgcacatgaatatccaggattcggggacacagccagggggagttccatctgctcctactggtcccctgggtccccctggtcatggccagacacttgggcagcaggtgccagggttcccgacggctccaacacgcgttgttatcgctaggccaacaccgcctcaggccagaccgagtcacccagggggtccgccagtttccgggaccctgcaaggcgcagggttgggcaccaatgcctcgctggctcagatggtgtcaggcttggtggggcagctgttgatgcagccagtacttgtggcccagggcaccccgggtatggcccctccaccggcaccagccaccgcaagcgccagtgctggcaccacaaataccgcgaccacggcagggccagcaccaggcggaccagctcagccacctccaactccgcagccaagtatggcagatctccaattttcccagcttttaggcaacctgttaggacctgcaggcccaggggctggcggaagtggcgtggcgtcaccgactatcacggttgccatgcccggagttccggcatttctccagggcatgaccgattttctgcaggccacacagacagcacccccaccccctccacctcctccaccgccaccacccgctcccgaacagcagacgatgccacctcccggaagtccctcaggcggtgcgggttctcctggcggattgggcctcgaatcccttagcccagagtttttcaccagcgtggtccaaggagtactctcctccttactggggtccctgggggcaagagcgggaagctctgaatcaatcgcagccttcattcagagactctccggaagctcgaacatattcgaaccaggagccgacggcgcactgggatttttcggtgctttattatccttgctttgccagaacttttctatggtcgacgttgtcatgctactgcacgggcatttccagccgcttcaacgtctccagccccagttgagaagttttttccaccagcactatttagggggtcaggaacccacaccctccaatattaggatggccactcacacccttattacagggctagaagagtacgtcagggaaagttttagtctcgttcaagtccagccaggggtcgacatcattcggaccaatcttgaattcctgcaggaacaattcaacagtatcgcggctcacgtccttcactgcactgactctggtttcggcgcaagactcctggagttgtgtaatcagggattattcgagtgcctcgccctcaatctgcactgcctcgggggacagcagatggaacttgccgctgtcatcaacggcagaatacggagaatgtctcgcggtgtcaaccccagcctcgtctcatggctgacaaccatgatgggccttcggctccaggtggtcctcgagcatatgcccgtaggcccagacgccattctgcggtatgtgagacgggtcggagatccccctcagccactccccgaagaacctatggaagtccagggcgctgaacgcgcatcccccgagccccagagggaaaatgcttccccagccccaggcacaacagcagaggaagcaatgagccggggtcccccaccggcaccagaggggggtagcagagacgagcaagatggtgcatctgcagagacagagccctgggctgcagcagtgccccctgaatgggtccctatcattcagcaagatattcagtcccagcgcaaggtgaaaccccagcctccccttagtgacgcgtacctttctgggatgccagccaagcggagaaaaaccatgcagggagagggccctcaactgctcctttcagaagctgttagcagagcagccaaggccgcaggagcccgtcctctgacaagccccgaaagtttatcgcgcgatctggaggcccctgaagtgcaggagtcttaccgccaacaactgcgctctgacatacagaagcgcctacaggaagacccaaactattctccccagagatttccaaatgctcaacgcgcttttgctgatgacccgtag

SEQ ID NO: 215827 - DNA, 738 bp, synthetic construct
  misc_feature 1..738: note = Description of Artificial Sequence: Synthetic coding sequence
  source 1..738: mol_type = other DNA
cctcctcgacaccttcacgttgtcagaccaatgtctcactataccacacccatggtactgcagcaagccgcaattccaatccaaataaatgtagggactaccgtgaccatgacggggccagctcccccacccgcaacctctcatcccagggtgatcagaatatctcaccagtccgtcgagcccgttgtcatgatgcatatgaatatccaagactctgggacccaaccgggaggggtgccgtccgccccaaccggcccattagggcctccaggtcatggacagaccctagggcaacaggttcctggttttcccaccgcccctacccgggtcgtcatcgcacggcctacacctccgcaggctaggccatcacatccagggggacctccagtcagcggtactcttcagggcgcaggtctgggaactaacgccagtctggctcagatggtttccggactcgtgggacaactgttgatgcaacctgtgctcgtggctcagggaactccgggaatggccccaccaccagctccggcaacagcctctgcctccgccggtaccaccaatactgctactacagccggaccggctcctgggggaccagcgcagccacctcctaccccacagccaagtatggctgacttacagttctctcaactactgggcaacctcttggggccagcagggcctggggcaggcggacctggagtggcctcgcctacgatcaccgtggctatgccttag

SEQ ID NO: 215828 - DNA, 777 bp, synthetic construct
  misc_feature 1..777: note = Description of Artificial Sequence: Synthetic coding sequence
  source 1..777: mol_type = other DNA
atggagcctaatgactccaccagcacagctgtggaggaacccgatagccttgaagtgctcgttaagacgctagatagtcagaccaggacctttattgtaggagcacaaatgaacgtgaaagagttcaaggaacatatcgctgcctccgtttccatccctagcgagaagcaacgcttgatataccagggaagagttctgcaggatgacaaaaaacttcaggaatataacgttggcggaaaagtgatacaccttgtcgagcgggcaccaccgcagacgcatttgccttccggggcttctagcggcaccggctcagcatccgccactcacggcggaggatccccgcctggtacacgcggacccggagctagtgtccatgaccggaacgcaaactcatacgttatggtgggaaccttcaacttaccttctgacggttctgcagtggacgtccatatcaacatggagcaggctccaattcaaagtgagcccagggtgcgtttagtaatggcacagcacatgatccgtgacatccagactctgctttcacggatggagtgccggggagggccacagccacagcactcccagcccccaccgcagccccctgctgtaacaccggagcctgtggccctgtcttcacagacatcagagccggtggaaagcgaagcccctcctcgggaacctatggaggccgaagaagtcgaagagcgggcaccagcgcagaacccagagcttacccctggcccagcccctgccggaccgactcctgcgccagagtag

SEQ ID NO: 215829 - DNA, 789 bp, synthetic construct
  misc_feature 1..789: note = Description of Artificial Sequence: Synthetic coding sequence
  source 1..789: mol_type = other DNA
atggagcctaatgacagcacaagcaccgctgtggaggagccagatagccttgaagttcttgtgaagacattggactcccagacgagaaccttcattgtcggtgcccagatgaacgttaaagagttcaaagaacatatcgcggcttcagtcagcatcccgagcgaaaagcagaggttgatctaccaaggcagagtcttgcaggacgataagaagctgcaagaatataacgtaggcggtaaggttatccacctggtggagagagcccctccccaaacccatctcccatccggagcttcttctggcaccggtagcgccagtgcaactcacggcggaggaagcccaccgggtactagagggccaggagcctcagtccacgaccggaatgccaactcatatgtgatggtggggacctttaatctcccttccgatggaagtgctgttgacgtccatattaacatggaacaggctcccatccagagcgagccacgcgtgcgtctggtcatggcccagcatatgattcgcgacatccagaccctgctctccagaatggagtgtagaggcggaccacagcctcagcactctcagccaccacctcaaccaccagccgtgacacctgagcctgtggctctgtcgtcccagacaagtgagccagtcgaaagcgaggcaccaccacgggagcctatggaggctgaggaggtggaggagcgcgctccagcacagaacccagaacttactcctggtcctgcgccagctggcccaaccccggctcccgaaactaacgcaccctag

SEQ ID NO: 215830 - DNA, 789 bp, synthetic construct
  misc_feature 1..789: note = Description of Artificial Sequence: Synthetic coding sequence
  source 1..789: mol_type = other DNA
atggagcccaatgacagcacctctaccgcagttgaggaaccagatagtctggaggtattagtcaagactctcgactcacagactaggactttcatcgtgggtgcgcaaatgaatgtgaaggagttcaaggagcatatagcagcgtccgtgtccattcctagcgaaaaacagcgcctgatatatcaggggcgagtcctgcaagacgataagaagctacaagaatacaacgttggcggtaaagtcatccacttggtggagagggcgccaccccagactcatctcccaagcggcgcttccagcggaacggggtctgcaagcgccactcatgggggaggaagcccgccaggaaccagagggcctggagcctcagtgcacgaccggaatgccaactcctatgtgatggtgggcaccttcaacctgccttctgatggcagtgctgttgatgttcatatcaacatggagcaggccccaatccaatccgaacccagggttcgcctcgttatggctcagcatatgatacgcgatattcagaccctgctgtccagaatggagtgtaggggcggtccccagcctcaacactctcagccacccccacagcctcccgcagttacacctgagccagtggcactttcatctcagacatcagagcccgtggaatcagaggcccctcccagggagccaatggaagctgaagaggtcgaagaaagggcccctgcccagaaccctgagctgacgcctggccctgcacccgctgggccaactccagctcctgagaccaatgctccttag

SEQ ID NO: 215831 - DNA, 738 bp, synthetic construct
  misc_feature 1..738: note = Description of Artificial Sequence: Synthetic coding sequence
  source 1..738: mol_type = other DNA
ccacccaggcacctgcacgtcgtcaggcctatgtcgcattataccacccccatggtgctgcaacaggcggctattccaatccagattaatgtgggaactacagtaacgatgacgggacctgctccccctccagcgaccagccatccccgtgtaattcgaatcagccatcagagcgttgagcctgttgtgatgatgcatatgaacatccaggattccggcacgcagcccggtggtgttccatccgccccaaccggccctttaggaccgccaggacatggacaaaccttaggacagcaggtgcccggatttccaacggccccaacccgtgtcgtaatcgccagaccaacgcctcctcaggctcggccaagccaccctggcggtcctcctgtctcagggacgctgcaaggagcaggccttggaactaacgcttcacttgctcagatggtttcaggattggttggccagctactaatgcagccagtgcttgtggcacagggaacacccggaatggctcccccacccgcacctgccactgcctctgcttcagcaggtacaactaatactgccactaccgcaggtcccgcacctgggggtcctgcacagcccccaccaaccccccagccctctatggccgacctgcaattttcgcagcttctcggaaatctgctgggtccagccggacccggtgctggcggatcaggagtggccagtcctaccataactgtggccatgccatag

SEQ ID NO: 215832 - DNA, 648 bp, synthetic construct
  misc_feature 1..648: note = Description of Artificial Sequence: Synthetic coding sequence
  source 1..648: mol_type = other DNA
atggagccgaacgatagcacctcgactgccgttgaggaaccagactcgctggaggtcctcgttaagacccttgacagtcagacaagaacatttatagttggagcacagatgaatgttaaggagttcaaggaacatatcgctgcatctgtgtcgataccaagcgagaagcagagactgatctatcaggggagagtgctccaggatgacaagaaactccaggagtataacgtgggaggcaaggtgatccacttggttgaacgagcccctccccaaacccatttaccttctggggcatcaagcggcaccggctccgcctcagcaacacatggaggcggatcacccccagggacgcggggtcctggcgcaagtgtgcatgacaggaatgccaatagctatgttatggtcggaacctttaacctgccatccgagccacgtgtgcgcctagttatggcccaacatatgattagggacattcagacactgctgtctaggatggaatgccgtggcggtccgcagccccagcactctcagccccctccgcagccacctgcagtaaccccagagcctgtggcgctgagctcccagacctccgagcccgtggagagcgaggctcctccacgagaacctatggaagccgaggaggtttag

SEQ ID NO: 215833 - DNA, 735 bp, synthetic construct
  misc_feature 1..735: note = Description of Artificial Sequence: Synthetic coding sequence
  source 1..735: mol_type = other DNA
atggaacctaacgattccaccagtaccgcagtggaagagcccgatagtttagaggtgctggtcaagaccctggatagccaaacgcgtacatttatagttggagcccaaatgaacgtgaaagagtttaaggaacacattgctgcatcagtcagcatccctagtgagaaacagaggctcatttaccaagggagggtactacaggacgacaagaagttgcaggagtacaatgtgggaggcaaagtgatccacctggtcgagagagcgcctccacagacccacctgccctctggagcctcttcaggtactggctctgcctccgccacccacggcggaggatcaccccctggaacaagaggtcccggagcctctgtgcacgatcggaacgccaactcctatgtgatggtgggcacgtttaatcttcctagcgagccaagggttcggctcgtgatggcccagcacatgatccgggatattcaaaccctcctgtctcgaatggaatgccgtggtggcccacagccccagcatagccagccaccaccccagccacctgctgtgacaccagagcctgtggctctttcaagccagacctccgagcctgtggagagcgaggcacccccaagggagcccatggaggccgaggaggttgaagagagggcccctgctcagaaccccgaacttacacctggaccggctcccgcagggccaacaccagctccagaaacgaacgccccttag

SEQ ID NO: 215834 - DNA, 558 bp, synthetic construct
  misc_feature 1..558: note = Description of Artificial Sequence: Synthetic coding sequence
  source 1..558: mol_type = other DNA
tgactggcctgcaccccaccgagacacctgcacgtggtgagacccatgtcacattacactactccaatggtgcttcagcaggccgcaattcctatccaaattaacgtagggaccactgttactatgacaggcaatggcacacgacctcctcccacacctaatgcagaggctccccctccaggtcccggacaggccagttccgttgccccaagctcaaccaatgtggagagctctgcggagggtgctccacccccaggtcctgcaccgccacctgctacatcacatccacgcgtcatcagaatttcccaccagtccgttgagcccgtggttatgatgcatatgaacatccaggggcagcaggtgccagggtttcccactgctcccactagggtggtgatcgccaggcccactccccctcaagcgagaccttcacacccaggcggaccacccgtatccggcacactgcagggcgctgggctcggtacaaatgccagcctggctcagatggtgtccggcttagtcggacagctactcatgcagcccgttctggtcgcctag

SEQ ID NO: 215835 - DNA, 780 bp, synthetic construct
  misc_feature 1..780: note = Description of Artificial Sequence: Synthetic coding sequence
  source 1..780: mol_type = other DNA
atggagcctaatgactcaacatctaccgccgtggaggaacccgacagcctggaggttctcgtgaagactctcgatagccagactagaactttcattgtgggagctcaaatgaatgttaaggagttcaaggagcacatcgctgcttcggtatctattcctagtgaaaagcagcgcctcatctaccagggcagggtgttgcaggacgacaaaaagctccaggagtataacgttgggggtaaagttatccatctggtggagagggcaccaccccaaacacatctacccagcggcgctagtagtggtacggggtctgcatccgccactcatggcggtgggagccctcccggtacccggggaccgggtgcctccgtgcacgatagaaatgctaactcctacgtcatggtcggcaccttcaatctgcccagcgatggttccgccgttgatgtccatataaatatggaacaggcgcctattcaaagtgagccaagagtccgtttggtgatggcccagcacatgatccgggatatccagaccctactttctcgcatggagtgcagaggcggacctcagcctcaacatagccagccgccaccacagccgccagctgtcacacctgaacccgtagctttgtcatcccagacaagcgagccggtggaatccgaggcgcctccccgtgaaccaatggaggccgaagaagtcgaagaacgggctcccgctcaaaaccctgagctgactcccggacctgcccctgctgggccaacacctgcccctgaaacatag

SEQ ID NO: 215836 - DNA, 477 bp, synthetic construct
  misc_feature 1..477: note = Description of Artificial Sequence: Synthetic coding sequence
  source 1..477: mol_type = other DNA
atggagcccaatgacagcacgagcaccgccgtcgaggagcctgacagcctcgaggtgctggtgaagacgctcgattcccaaacccgaacatttatcgtgggagcacagatgaacgtgaaggagtttaaggagcacattgctgccagcgtctctatcccatccgagaagcagaggcttatctaccagggcagagtcctgcaagacgacaaaaaactgcaagaatacaacgtcggagggaaggtgatccatcttgtagaaagggcccctcctcagacccacctgccatccggggcttccagcggtactggcagtgcgagtgctacccatgggggtggaagccccccagggacccggggacccggtgccagtgttcatgataggaatgctaatagttacgtgatggtaggaacattcaacttgccctcagatgggagcgccgtggacgttcacatcaacatggaacaggcacctatctag

SEQ ID NO: 215837 - DNA, 621 bp, synthetic construct
  misc_feature 1..621: note = Description of Artificial Sequence: Synthetic coding sequence
  source 1..621: mol_type = other DNA
atggagcccaacgatagcaccagcaccgccgtggaggagccggattccttggaggtcctggtgaaaaccctggactcacagacacgtactttcattgtgggggctcagatgaacgttaaagagttcaaggaacatattgccgcatctgttagcatcccttccgaaaaacagcgtcttatttatcagggtagagtcctccaggacgacaaaaagctgcaggaatataacgtcggtggaaaagtgatccacttggtggaacgggctcctccacagactcacttgcccagtggcgcatctagtggaaccggatcagcatccgctacacacggcggaggatcacccccagggacccgcggacccggtgcgtcagttcacgaccgtaatgctaacagctacgtgatggtagggacatttaatctgccctccgaacctcgcgttagattagtgatggcccagcatatgattagggacatccagacactgctgtctagaatggagtgccggggaggtccacagccgcagcacagccagccccctccccagccaccagccgtcactcccgaaccagtagccctgtcctcccagacttccgagccagtggagagcgaggccccaccgtag

SEQ ID NO: 215838 - DNA, 3399 bp, synthetic construct
  misc_feature 1..3399: note = Description of Artificial Sequence: Synthetic coding sequence
  source 1..3399: mol_type = other DNA
atggagccgaacgattcgaccagcaccgccgtcgaggagcctgattccctggaagtcctagtgaagacattagatagccagacaaggacgtttatcgtcggcgcacagatgaacgtcaaggaattcaaggagcatatagcagcttcagtgtccatcccatccgaaaaacaaaggttgatctatcagggtcgcgttctgcaggatgacaaaaaacttcaggaatacaacgtcggcggaaaggttattcatctggtcgaacgggctcctcctcaaacccacctgccaagcggtgctagctctggcacaggcagtgcctctgcaacccacggaggcggaagcccacccggaacaaggggcccaggcgcaagcgtgcatgatcggaatgccaatagctatgtgatggtggggacctttaatcttcccagtgatgggtctgctgtagacgtccatataaacatggagcaggctcccattcagagtgaaccccgagtgcgcctggtgatggctcaacatatgattagggatattcagacactcctctctcgcatggaaacactcccatatctgcagtgccggggtggaccacaaccgcaacactcccagcctcccccacaacctcctgcggtgacccccgagcccgtggctctgtcgtcccagacctctgaaccggtcgagagtgaggcgcctcctcgggagccaatggaggctgaagaggtggaggagagggcgccagctcagaatccagagcttacaccgggacccgcacctgccggtccgacccctgcccctgagactaatgcaccgaatcatccatcacctgccgaatatgtcgaggtgttacaggagctccagcgactcgaatcacgcctgcaacccttcctgcaaagatactatgaagtgctaggggcagccgcaacgacagactataacaataaccatgaggggcgtgaggaagaccagcggctgatcaatctagtcggggagtcactgcgcctcctggggaatacattcgtcgcactttcagatttacgctgtaacctcgcatgcaccccgcctcggcatcttcatgtagtgcgccctatgtctcattacactacgcccatggtgttacagcaggcagctattccaatacagattaacgtgggcactacagtgacaatgactgggaacgggactcgtccacctccaacacctaacgccgaagctccaccacctgggccagggcaagcctcttcagtcgcccctagcagcactaacgtggaatctagcgctgaaggagctccacccccagggccagcacccccacccgctactagtcacccacgcgttatacgaatctctcaccagtccgtcgagcctgtggtgatgatgcatatgaatattcaggattcagggacacagcccggtggggtgccttcggcccctactgggccactgggcccacccggtcacggccagacactggggcagcaggtccccggtttcccgactgcccctacaagagtggtgatcgccaggcccacccctccacaggccaggcccagccatccagggggaccgcctgtttcgggaactctgcagggggcagggctcggaacaaatgctagcctggctcagatggtcagtggattggtcggacagttactcatgcagcctgtgctggtcgctcagggtacaccaggcatggccccacccccagctccagcaactgcctcagcatcagcaggcaccaccaatactgctacaactgctgggccagcgccaggcggtcccgctcagccccctcccacaccacagccttctatggcagatctgcagttttcacagctgttgggtaatctccttggccctgccggacctggcgctggtggacccggagtcgcctcaccgaccatcaccgttgctatgccaggtgttcctgcttttctgcagggcatgactgacttcctgcaggccactcagacagctccccctccgccaccccctcccccaccgccacctcctgcccctgaacagcaaacaatgccgccacccggaagcccctcaggtggagccggatctccgggtggactgggcctggaatccctgagccctgagtttttcacttctgtcgtccagggagtcctgtcctcactcctcggaagtcttggcgcaagggccggatcatccgaaagtatagcagcatttatccaacggctctcgggcagctctaatatttttgaacccggagccgacggtgcccttggattcttcggcgctcttctgagcctcctttgtcagaacttcagcatggttgacgtggtgatgttgctccatggacactttcagcctctccagcgcctgcagccgcaactaaggtcctttttccaccagcactatctggggggtcaagagccaactccctcaaacattcgtatggctacgcacacacttatcaccggccttgaggagtacgtgcgggagtctttcagcctggtacaagttcaacctggcgtcgatattatcagaaccaatctggaattcctgcaggagcaattcaactccatcgccgctcacgtgctccattgtaccgattccggctttggggctcgattacttgaactctgcaaccagggcttgttcgagtgcttagcccttaacctccattgtctgggtggtcaacagatggagctggcagccgttatcaatggccgaatcagaaggatgtcacggggtgtaaacccttcactggtgtcatggctaaccactatgatggggctcaggctgcaagtggtgctagaacacatgcccgtcggccctgacgccatcctccggtatgtgcggcgagtaggggaccccccacagcctctgccggaagaacctatggaggtgcaaggggctgaaagagcttctccagagccccagcgcgagaatgcatctcccgcaccaggaactaccgcggaggaagctatgtctagaggccctccccctgcccctgagggcggaagccgggacgagcaagatggggcatccgccgagactgagccttgggctgctgcggtcccgccagagtgggttcctataattcagcaggacatccagagtcagcgaaaagtcaagcctcaaccacccctgtccgatgcctacttaagtggaatgcctgctaaacgtaggaagacaatgcaaggggaaggccctcagctcctcctgtccgaagccgtttcaagagccgctaaagccgcaggcgcaaggcctctgacctcaccagagtctctctcccgggatctggaggccccagaggtccaggaatcataccggcagcagttaaggagcgatattcagaagagattgcaagaagaccctaactacagcccccagcgctttcccaatgctcagagagctttcgctgacgacccttag

SEQ ID NO: 215839 - DNA, 717 bp, synthetic construct
  misc_feature 1..717: note = Description of Artificial Sequence: Synthetic coding sequence
  source 1..717: mol_type = other DNA
agtagcgccgagggagcacctccacccggtccagcacctcccccagctacaagccacccaagagtgattcgaatcagccaccagagtgttgaacctgtggtaatgatgcacatgaacatacaaggccctttatcactctctccatgcccggactctggtacccagccagggggtgtgccgtctgcaccaacggggccattggggccacctggacatggacaaacacttggacagcaggtccctggcttccccacagctccaacaagggtcgttatagctcggccaactccacctcaggcccgaccatctcatcccggtggccctcccgtttcagggacactgcagggggctggactgggaactaatgcgtcgctcgctcagatggtgtctgggcttgtcggccagctattaatgcagcctgtgcttgtggcccagggaaccccaggtatggcccctccaccagcaccagcaactgcctcggccagcgcaggaacgaccaacacggccacaactgcaggcccagcccctgggggtcctgctcagccccctccgacaccccaaccttccatggccgatctccagtttagtcagctccttggtaatttgttgggtccagccggaccaggagctggtgggagcggagtggcaagccctaccatcaccgttgcaatgccaggtgtgccagcctttctgcaagggatgacagactttctttag

SEQ ID NO: 215840 - DNA, 621 bp, synthetic construct
  misc_feature 1..621: note = Description of Artificial Sequence: Synthetic coding sequence
  source 1..621: mol_type = other DNA
atggagcctaacgactcaacttccaccgccgtggaagaaccagatagcctggaggtgttggtgaagacattggattcccaaacaaggaccttcattgtgggagcgcagatgaatgtgaaggaattcaaggaacacattgctgcttctgtcagtatccctagcgaaaagcaaaggctcatctaccaaggcagggtgttgcaggacgacaagaaactgcaggagtataacgtcggcggtaaggtaattcatttagtcgaacgcgctccacctcagactcacttaccgagcggggcaagcagtgggacaggaagtgccagcgccacccatgggggtggtagcccaccaggtacacgaggcccaggggcttcagtacatgacagaaacgcaaactcttatgttatggtggggaccttcaatctgccaagcgagcctcgagttagactggtgatggcccagcacatgatcagggatatccagacattgctgagccgcatggaatgcagaggcggtccacagcctcaacacagtcagccccctccccagccccctgctgtgacgcccgagccggtagccctctcttctcaaacctctgagccagtggaaagtgaagcccctccttag

SEQ ID NO: 215841 - DNA, 558 bp, synthetic construct
  misc_feature 1..558: note = Description of Artificial Sequence: Synthetic coding sequence
  source 1..558: mol_type = other DNA
taactggcatgcacaccacctagacatctgcacgtagtccggccaatgtcacattacacaactcccatggtactgcaacaggcagccataccaatccaaatcaatgtcggcactaccgtaacgatgacaggaaacggtaccaggcctccacctacgccaaacgcagaagctcctcccccaggccctgggcaagcctcgtccgtggcacctagctccaccaatgtggaaagctctgctgagggcgctcctcccccaggcccagctccgccacctgccacgtcacatccccgtgtgatccggataagccatcagtctgtcgaaccggtggtcatgatgcacatgaacatccagggtcagcaggtgcccggatttcccactgcacctactcgggtggtgatcgcccgacccacgccaccccaggcgcgtccttctcaccccggaggacctccggtttctggcacactgcagggtgccggtctgggcacaaacgcatctctagcccagatggtttctggcctcgtgggccaactgctgatgcagcccgtgctggtcgcctag

SEQ ID NO: 215842 - DNA, 648 bp, synthetic construct
  misc_feature 1..648: note = Description of Artificial Sequence: Synthetic coding sequence
  source 1..648: mol_type = other DNA
atggagccaaatgatagcacttctaccgccgttgaagagcctgactctctcgaggtcctggtcaaaaccctcgactcccagactaggacatttatagtgggagcccagatgaatgtcaaggagttcaaggaacacatcgcagcctccgtttctattcccagcgagaaacagcggctgatctatcaagggcgtgtgcttcaagacgataaaaaattacaggagtacaatgtggggggaaaagtaatccacttagtggagcgggcaccaccccagacccacctgccaagtggagcctcctctggtaccggttcagctagcgcaacacatggtggagggtcacccccaggtacacgtgggccaggagctagtgtacacgaccgcaacgcaaatagttacgtgatggtggggacgtttaacctgccttctgaacccagagttcgccttgtgatggcacaacacatgattcgggacatacagaccttgctcagccgcatggaatgccgcggtggccctcagccccagcactcgcagcctccgcctcaaccacctgctgtgacacctgagcccgtcgctctgtctagccaaacctcagagcccgtggagtccgaggctccacctagagagcccatggaggcagaagaggtgtag

SEQ ID NO: 215843 - DNA, 789 bp, synthetic construct
  misc_feature 1..789: note = Description of Artificial Sequence: Synthetic coding sequence
  source 1..789: mol_type = other DNA
atggaaccaaacgactccacctcaacagctgtagaagaaccagatagccttgaggtgcttgtcaaaactctggactctcagaccaggacctttatcgtcggcgctcagatgaatgtgaaggaatttaaggagcacatcgctgccagtgtatccataccctctgaaaagcaacggctgatataccaaggacgggttttacaagacgacaagaagttacaggagtacaatgtcggcggaaaagttatacacctggtcgagcgggctccgcctcagacccacctgccatcaggcgcatccagtggaactgggagcgcctccgcaactcacggtggtggtagtccgcctggtaccaggggtcccggagctagcgtccatgataggaatgctaattcatacgtgatggtggggaccttcaacctgccgtctgatggctctgctgtcgatgtgcacatcaacatggagcaggctcccatccaatctgaacctcgtgttaggctggtaatggcccagcatatgattcgcgacattcagacactcctctcgcggatggagtgtcgaggcggaccgcagccccagcattcccaaccccctcctcaaccccctgccgttaccccggaacccgttgcgttgtcctcacagacatccgagccagtagaaagtgaggccccacctcgcgaaccaatggaagccgaggaagtggaagagcgagctccggcacagaaccctgagctgacaccgggaccggctcctgctggcccaacccctgcaccagagaccaatgccccttag

SEQ ID NO: 215844 - DNA, 594 bp, synthetic construct
  misc_feature 1..594: note = Description of Artificial Sequence: Synthetic coding sequence
  source 1..594: mol_type = other DNA
atggaacctaatgatagcacaagcactgccgtggaagagccagatagccttgaggtgcttgtcaagaccctggattcacaaacgcgaacctttatcgtgggagctcagatgaacgtgaaagaatttaaggaacacatcgctgcgtccgtatctatccctagcgaaaaacagcgccttatttaccaagggagggttttgcaggacgataaaaagctgcaggagtacaacgtaggtgggaaggtgattcatctggtcgaacgggcaccaccacagacccacctcccatccggagcatcgtctgggaccgggtctgcaagcgcgacacacgggggtggaagcccaccaggtactagaggacccggtgcatccgtgcacgaccgaaatgcgaattcgtatgtgatggtgggtacttttaatctgccaagtgatggatctgcagtggacgtgcatatcaacatggagcaggcacctatacagtccgaaccccgagtccggctggtgatggcccagcatatgattcgagatatacaaacgctcctgagcaggatggaatgccgcggaggtccccaaccccaacacagtcagcccccttag

SEQ ID NO: 215845 - DNA, 735 bp, synthetic construct
  misc_feature 1..735: note = Description of Artificial Sequence: Synthetic coding sequence
  source 1..735: mol_type = other DNA
atggagccaaacgactctacatctaccgcggtggaggagcctgatagcttagaggtgctcgtgaaaactcttgactctcagacacgtacctttatcgttggagctcagatgaatgtgaaggagtttaaggaacacatcgcggcaagtgtttccattccgagcgaaaaacaaaggctgatctatcaggggagagtccttcaggatgataaaaagcttcaagagtacaacgtcggcggtaaggtaatccaccttgtcgaacgggcacccccacaaactcacctgccgagcggagcttcttctgggaccggttctgcttccgccacccacggtggaggttcaccgccaggaacgcggggtccaggagcctcagtccatgaccgcaatgctaacagctatgtcatggttggaacgttcaatcttccttcagagcctcgggtccggcttgtcatggcccagcacatgatcagagatattcaaaccctcctctctagaatggaatgtcgaggcggaccacagccccagcatagccagcctccacctcagcctcccgctgtgacacctgagcctgtggccctgtcttcccagacctcagagcccgtggagagcgaagctcctcccagggaacctatggaggccgaagaagtcgaagaacgggctcccgcacagaatcctgagcttactcccggaccagctccagcaggtccaacccctgctcctgaaacaaatgcaccctag

SEQ ID NO: 215846 - DNA, 681 bp, synthetic construct
  misc_feature 1..681: note = Description of Artificial Sequence: Synthetic coding sequence
  source 1..681: mol_type = other DNA
tgaagtggcttcggtgctcggctgctcgagctctgtaatcaaggtctctttgaatgtctggcgctcaatttgcactgtctgggaggacagcagatggagctcgccgcagtcatcaacggtagaatccgcagaatgtcacggggtgtgaacccttcactggtgagttggttaaccacaatgatgggcttaagattacaagttgtgctcgagcatatgcccgtcggtccggatgcgatcttaagatacgtgcgacgggttggggaccctccccagcccctcccagaggaacccatggaggtgcagggagctgagcgcgctagtccggagccacagagagagaatgcgtcccctgctcctggcaccaccgcagaggaggctatgtcccggggtcctccacccgcacccgagggcggttctcgggacgagcaggatggggcatccgctgagactgaaccctgggctgctgctgtgcccccagagtgggtgcctatcattcagcaggatattcagagtcaacgcaaggtgaaacctcagcccccactttccgacgcatacttgagcggaatgcccgcaaagcggaggaaactccgcagcgatattcaaaaacggctccaggaggaccccaattattccccccagaggtttcccaatgcccagcgggcttttgctgacgatccgtag

SEQ ID NO: 215847 - DNA, 738 bp, synthetic construct
  misc_feature 1..738: note = Description of Artificial Sequence: Synthetic coding sequence
  source 1..738: mol_type = other DNA
cccccaagacatttgcacgtggtaagacccatgtcccactacacaacgcccatggtgctgcagcaagctgccatccccatccagattaatgtggggaccaccgtgacaatgaccgggccagcccctcccccagctaccagccaccctcgagtgatccggattagccaccagtccgtggagccagtcgtgatgatgcacatgaacatccaagactctgggacacagcccggtggcgtgcccagtgcgccaacaggcccattaggacctcccggtcacggccagaccctagggcagcaggtgcctggctttcctactgcaccaactcgtgtagtgatcgccaggcccacaccccctcaagccagacctagtcacccaggagggcctccagtgtctggcactttgcaaggagcgggtctggggacgaacgcgagcctcgcacagatggtctctggtttagtggggcagctccttatgcagccagtgttagtagctcagggcacacctggaatggccccaccacccgctcctgcaactgcttccgccagcgccggtaccacaaacacagcgactacagctggaccagcgccaggtggacccgcacagcctccccctacaccccagccaagtatggccgatttgcagtttagtcaattgctgggtaatcttctggggcctgccggacccggagctggaggtagtggagttgcatcgcccacgatcacagtggccatgccctag

SEQ ID NO: 215848 - DNA, 681 bp, synthetic construct
  misc_feature 1..681: note = Description of Artificial Sequence: Synthetic coding sequence
  source 1..681: mol_type = other DNA
tgaagtgggttcggagcgcgtttgttggagctatgcaaccaaggtctcttcgagtgcctagctctcaatttacactgcttgggcggacagcagatggagttggctgccgtcattaacggacgcatccgaagaatgtcccgcggagtgaaccctagcctggtaagctggctgactactatgatgggcctgcgccttcaagttgtcctcgaacacatgcccgtggggccagacgctattctgaggtatgtccggagagttggcgatccaccccagccattacccgaagagcctatggaggttcaaggcgcagagcgcgcatcccccgagcctcagcgcgaaaacgcaagccccgcaccaggtacaaccgctgaggaggccatgtctcgtggccctccaccagcccctgaagggggatcacgggacgagcaagacggagcttctgccgaaacagagccatgggctgcggcagtgccacccgagtgggttccaattattcagcaggatatacagagccagaggaaggtaaaaccccagccacctctgagcgatgcgtacctctctgggatgcctgccaagaggaggaagttgaggagcgatattcaaaaacgcttgcaggaggatccaaattatagtccccagcggtttccaaatgcacaaagggcctttgctgatgatccttag

SEQ ID NO: 215849 - DNA, 681 bp, synthetic construct
  misc_feature 1..681: note = Description of Artificial Sequence: Synthetic coding sequence
  source 1..681: mol_type = other DNA
taaagcggtttcggagcgaggctcctggagttgtgcaaccaagggctgttcgagtgtctggcgctgaacctgcactgtctgggaggtcagcagatggagcttgctgccgtcatcaacggtcgcatacggcgtatgagtcggggtgtcaacccatccttggtctcgtggctcacaactatgatgggcctgcgactgcaagtggtgttagaacacatgcccgttggcccagacgctatattgcggtacgtacggagggtgggcgatccccctcaaccgttgcctgaggaacctatggaagtccagggtgcagagcgtgcatcccccgagccacaacgggagaacgcctcccctgccccaggcacaacagccgaagaagccatgtcacggggtcccccacctgcccctgaaggcggaagccgcgacgagcaggacggtgcaagtgctgagacagagccatgggcagctgccgttcccccagagtgggtccctataatccagcaggacatccaatctcaaaggaaagtgaaaccccagcctccactctctgatgcctatctctcagggatgccagcaaagagaaggaagctccggagcgatatccagaagcggctccaagaggaccctaactatagtccgcaacggttcccgaatgctcagagggcctttgctgacgacccttag

SEQ ID NO: 215850 - DNA, 777 bp, synthetic construct
  misc_feature 1..777: note = Description of Artificial Sequence: Synthetic coding sequence
  source 1..777: mol_type = other DNA
atggaaccgaatgattcaacctctactgctgtcgaagagccagattctctggaggtcctcgtgaagacgttggatagccagactaggacctttatcgtcggagcacagatgaatgtgaaagaattcaaagagcacattgcggcttctgtctctattccttcagagaaacaaaggctcatctatcagggtagggtgctccaggacgacaaaaagctacaggaatataacgtaggaggtaaagtcatccacctggttgagagagctccaccacagacacaccttccaagtggggctagcagcggcacaggttcggcatccgccactcacgggggtggtagcccaccagggaccagagggccaggcgcttcagtacatgatcgcaatgcgaactcgtacgtcatggtcggtacattcaatctcccctctgacggtagcgccgttgacgttcacattaatatggagcaggccccaatacagtctgagcccagggtcaggctggttatggctcagcacatgattagagacatccaaacgctactgtcccgtatggagtgtagaggcggtcctcagccccaacactcccagccgccaccccaaccacccgctgtgaccccagagcctgtcgcgctaagctcccagacctctgagccagtcgagagtgaggcgcctcctagggaacccatggaagcagaagaagtggaggagagggcacctgcccagaatccggagttgacccccggaccggctcccgctggaccaacgccggctcccgagtag

SEQ ID NO: 215851 - DNA, 411 bp, synthetic construct
  misc_feature 1..411: note = Description of Artificial Sequence: Synthetic coding sequence
  source 1..411: mol_type = other DNA
taaagaatgtctagaggagtgaatccgtccctggtctcttggctgacaaccatgatgggcctgcggctgcaggtggtcttggagcacatgcccgtgggccctgacgccatactgcggtatgttagaagggtcggcgaccccccacagcctcttcccgaggagcccatggaggtccaaggagccgaacgggcaagccccgaaccccaagagtgggtgccaattattcagcaggatatccagagtcagcgtaaggtgaagccacagccacctctgtcagatgcttatctttctggaatgcctgccaaaagacgcaagcttagatctgacattcagaaacggctccaggaggaccccaattattcaccgcagaggtttcccaatgcacagagggcattcgcagatgacccttag

SEQ ID NO: 215852 - DNA, 3489 bp, synthetic construct
  misc_feature 1..3489: note = Description of Artificial Sequence: Synthetic coding sequence
  source 1..3489: mol_type = other DNA
atggagcctaacgattctaccagcacagctgttgaggagcctgattcccttgaggtgctggtgaaaacacttgattcccagacccgcacctttatcgttggggctcagatgaacgtgaaggagtttaaagagcacatcgcagcaagtgtgagtatcccgtccgaaaagcagcgcttgatctaccagggtagagtgttgcaggacgacaaaaagttgcaggaatacaatgtaggcggtaaggttatccacttagtagagagggcccctcctcagacgcatcttccatcgggcgcttcttccggaactggctcggcaagcgccacacacgggggaggcagcccccctggaaccagagggccaggggcttctgtgcacgatcggaacgcaaactcatacgttatggttgggacatttaatttaccttctgatggttccgctgttgatgtacatatcaacatggagcaggccccaattcagtcggaaccacgcgttagacttgtcatggcccaacatatgatcagagatattcagacactcctaagtcggatggagtgcaggggtggtccacagccacaacactctcaaccccctccacagccaccagctgtcacgcctgaacctgttgccctgagctcccagacatccgagccagtggagtccgaggcaccacctcgggaacctatggaggctgaggaggtcgaggagcgcgctcctgcccagaatcccgagctgacacctgggcctgcacctgccggacccacgcctgctcctgagaccaatgctcctaatcacccatcacccgctgaatacgtcgaggttctgcaggagctgcagcgactggagagccgcctgcagccatttctacagaggtactatgaagtgttgggtgccgcagccacaacagattacaataataatcacgaggggcgagaagaagatcagcggctgataaacctcgtaggcgaaagcctcaggctcttaggaaatactttcgtggccttatcggacctgcgatgtaacctcgcatgcacaccgccaaggcatctgcacgtcgtgagacccatgtcacactacaccacccccatggtactccagcaggccgcaatacctattcagattaatgtcggtacaactgtcacgatgaccgggaacggaacacgtccacctcctactcctaacgcagaagcaccgcctcccggtcccggtcaggctagttccgtcgcacccagttccactaatgtggagagttcagccgaaggggcaccccctcccggacccgcacccccaccggcaaccagccatccaagggtaatcaggattagccatcaatcagtagaaccagtagttatgatgcacatgaacatccaggactcggggacccagccagggggtgtgccttcagcgcctacaggacctctgggacccccaggacacggccagactctgggatctactttgatccagttgccaagtctgccacctgagtttatgcacgcagtggctcatcaaatcacacaccaggctatggtggctgccgttgccagtgctgcagccggtcagcaggttcctgggtttcccaccgcccctacccgcgtcgtgattgccagaccaacaccaccacaggcccgtccctcccatcccggtggtccacccgtatcaggaacactccaaggggcaggcctcggcacgaacgcctcgctggcacagatggtcagcggactcgtggggcagctgttgatgcagcccgtactggtggctcaagggacccccggtatggcgccaccacccgcacctgctaccgcttcagccagcgcgggaacgactaataccgcgacgaccgcgggtcccgctcctggaggtcctgcgcagccaccaccaacaccccagccaagcatggctgacctccagttcagccaactgctcggcaatctgctcggacccgcaggccctggcgctggcggacccggagtggcttcacctaccatcacggttgcaatgcctggcgtgccagctttcctgcagggaatgaccgatttcctgcaagccacccagacagctccaccaccacctcccccaccaccacccccaccaccggctcctgagcagcagacaatgccccctcctggctcaccgagtggaggggctggaagtccgggtggtctgggccttgaatcactgtcccccgagtttttcacctcggttgttcaaggcgtgctgtctagcctgttgggctcgttaggcgcacgcgctggttcctccgaatccatcgccgctttcatacagcggctctccgggtcgagcaatatctttgagcctggtgcagatggggctctcgggttcttcggggctctcctcagtctgctatgccagaattttagtatggtggatgtggtgatgctgcttcatggtcatttccaacccttgcagcggctgcagccacaactcaggagtttctttcatcagcattatctaggcggacaggagcccactccgtccaacattagaatggccactcacactctgatcacaggtctcgaggaatatgttagggagtcattctctcttgtgcaggtccagcccggagtggatattatacggactaacctggagtttctgcaggaacagttcaattccatcgccgctcacgtccttcactgcacagactcaggctttggagcacggctcctggaactgtgtaaccagggattatttgagtgcctggccctaaacctacactgcctcggcggacaacagatggagctggccgcagttatcaatggcagaatcaggcgcatgagtcgaggagttaatcccagtctagtttcctggttgactactatgatgggacttcggcttcaggttgtcctcgagcacatgcctgtcggacctgacgccattcttcgctatgtaagacgggttggagacccaccacagcccctgcccgaagaacccatggaggtccagggggctgaacgggcatctcctgagccccaacgcgagaacgcgtctccagcaccagggacaacagctgaggaggcaatgtctagaggaccgccaccagccccagaaggtggcagccgggatgaacaggatggggcttccgcagaaacagagccttgggccgctgcggtgccacccgagtgggtacccatcattcaacaggatatccagagccaacgtaaggtgaaaccccagccacccctgagcgacgcctatctctcagggatgccagcaaagcgcaggaagaccatgcagggcgagggcccacagctccttctttccgaggccgtgtcccgtgctgccaaagcagctggggcacgcccactgacaagccctgagagccttagtagagatctcgaagcccctgaagtgcaggaatcatacagacagcaacttaggtcagacatccagaaacgcctgcaggaggaccccaattacagcccccagagatttcctaacgcccaacgggcatttgccgatgacccatag

SEQ ID NO: 215853 - DNA, 2712 bp, synthetic construct
  misc_feature 1..2712: note = Description of Artificial Sequence: Synthetic coding sequence
  source 1..2712: mol_type = other DNA
atggagccaaacgattctaccagtactgctgttgaagaaccggatagccttgaagtgctggtcaagacactggatagtcagacgcggacctttatcgtgggagcccagatgaatgtcaaggagttcaaggagcatatcgccgcttcggttagtatacccagcgaaaagcaaagacttatttaccagggaagggtgctgcaggatgataagaaattacaggaatacaacgtaggtgggaaagtgatacatctagtggaacgggctccaccgcaaactcacctccccagcggcgcttcttcgggaaccggttctgcctccgccacccacggaggagggtccccacctggtacccgcggtcccggtgccagcgtgcatgacagaaacgccaattcctatgttatggtcggcaccttcaacctgccaagcgatggttcggccgtggatgttcacattaatatggaacaggcaccgatccagtccgaacctcgtgtgcgactagtcatggctcagcacatgatccgcgacatccagacactgctgtccaggatggagtgcagaggagggccacagcctcagcattcccagcccccaccccagcctcccgctgtgactcctgaacctgttgctctgtcctcacaaactagtgagcctgtcgagagcgaggctccaccccgtgagccaatggaggctgaagaggtagaggagagggcaccagctcaaaaccctgaactgactcctggtcctgcccctgccggacctacacctgcccctgagactaacgcgccaaatcatccgagccctgccgaatatgtggaagtgctccaagagctgcagagattggaaagtagattacaaccatttctgcagcggtattatgaggtcctgggcgctgccgcaacaacggactacaataataatcacgaaggcagagaggaggaccaacgcctgatcaatctggtgggagaatcgttacgtctgttgggaaatacctttgttgcccttagcgacctacggtgtaacctggcatgtacaccaccacggcatctacatgttgttcggccaatgagtcactatacaacgcctatggtcctgcagcaggctgcaataccaatccagatcaacgttggaactaccgtcaccatgactggcaacggcactcgcccacccccaactccaaatgctgaggcgccaccccctggcccaggtcaggcttcttccgtggctccctcgagtactaacgtggaatctagtgccgaaggagcccctcctccgggacctgcgccaccacctgctacttcacaccccagagttattcgcatttcgcaccagtcggtggaaccagtggtgatgatgcatatgaacattcaggactccggcacacagccaggcggagtcccctcagctcctactggacccctgggcccacctggtcatggccaaaccctgggacagcaggtccctggattcccgaccgcacctacccgtgtcgttatcgcgcgtcccaccccaccccaagcaagaccatcccaccccggtggtccaccagtaagtggcacgcttggcgctgggctggggaccaatgcctccctcgcccagatggtaagtggcctggtaggccagcttttgatgcagccagtcctggtcgcacagggaaccccgggatcacccggaggcctgggcctggaatctctgtccccggagttcttcacatcagtggttcaaggagtattgtcttcattgcttggcagtctgggtgccagagctggatcaagtgagagtatcgccgcttttatacaacgactgtctggcagctccaacatctttgaacccggtgcggacggtgctctgggatttttcggggctctgctgtccctgctctgtcagaattttagcatggtggacgtggtaatgctactacacgggcactttcaacccctgcaacggcttcagccacagttgcggtcattttttcatcagcactatctaggtgggcaggagccgactccctccaacattcgaatggcaactcacacgctgatcaccgggctggaagagtatgtcagagaaagctttagcttggtgcaggtgcaaccgggagtagacataattcgaacgaacctggaatttctgcaggagcagtttaacagcattgccgcacatgtgctgcactgtacagatagtggcttcggagccaggttgcttgaactgtgtaatcaggggttatttgaatgtctagcgctcaacctgcattgcctgggcggtcagcagatggaattagcagccgtgattaatggtagaattaggcgcatgtcacgcggagtaaatcctagtttagtgagctggctgactacgatgatgggacttaggctgcaggttgtcctggaacatatgccagtgggacctgacgccatcctgcgttacgttcgccgagtcggagatcctccgcagcccttgcccgaggagcctatggaagtgcagggcgcagagagggcgagcccagaaccccaagaatgggtacccataatacaacaggatatccaatctcaacgtaaagttaagccccagccccctctgtccgacgcctatctctccgggatgcctgccaagcggagaaagcttcgtagcgatatccagaagcgacttcaggaagaccccaactactctccacagcggtttccaaacgcccagagggcatttgccgacgatccttag

SEQ ID NO: 215854 - DNA, 2712 bp, synthetic construct
  misc_feature 1..2712: note = Description of Artificial Sequence: Synthetic coding sequence
  source 1..2712: mol_type = other DNA
atggagcccaacgattccacctcgactgccgtagaagagcccgactccctggaggtattggtgaaaactttggactcccaaacgcgcacatttattgtaggggctcagatgaatgtcaaggagttcaaggaacatatagcagcatcagtctccatcccatccgaaaagcagaggcttatctaccaggggagggtgctgcaggatgataaaaaactgcaggagtataatgtgggtggcaaggtgattcatctggtggagcgagccccaccgcagacgcatttgcctagcggcgctagctctggcacaggatctgcttctgccactcatggcggaggttctccaccaggcacccgcggacccggagcctcagttcacgaccgcaacgctaattcttatgtgatggtgggaacatttaaccttcccagcgatggttccgcagtagacgttcacattaatatggagcaagccccaattcagtctgaacctagagtcagactggttatggcacagcacatgatccgtgacattcagactctgctgagccgaatggagtgccgcggaggccctcagccacaacattcccaacctccacctcagcctcctgctgtaacacctgaaccagtcgccctgagttcgcaaacatccgagccagtggagtcagaggctcctccaagagagcccatggaggctgaggaggtagaggagcgggcacccgcacagaatcctgaactcacccccggtccagcccctgctggtcctacccccgctccagagactaatgcacccaaccatcccagcccagctgagtacgtcgaggtacttcaggagctgcaacggctcgaatctcgcctgcagccctttcttcaaaggtactatgaggtcttgggcgcagccgctaccacagattataacaataaccacgaagggagagaggaggatcaacggcttatcaacctagtgggggagtcgctgcgcctccttgggaatacttttgtggccctctccgacctcagatgcaacttggcctgtacaccaccgaggcatttacacgtggttcggcctatgagtcattatactacacccatggtgttgcaacaggctgcaatccccatccaaattaacgtggggaccacagtgacaatgactggcaacggaactcgcccaccccctactccgaatgccgaggcccctccccctgggcctggacaagcaagctccgttgcgccatcaagcacaaacgtggagagctctgccgagggcgctccaccacctggcccagcaccaccaccagccaccagccaccccagagttatccggatttcacaccaaagtgttgaacccgtggtcatgatgcacatgaatattcaagatagtggcacccagcccggaggggtcccctctgcacccacaggcccactagggccacccggtcatggtcagactctcggtcagcaggtccccggattccctaccgctcctacaagagttgtgatcgcgagaccaactccaccccaagcacgaccttcccatcctggtgggccaccggtttccggaaccttgggtgctggcctcggcactaacgcttccctcgcacagatggtgagtgggcttgtcgggcaactgttgatgcagcccgttctagtagcccaggggaccccaggatccccaggaggcctgggccttgagtcactttccccagagttttttactagcgttgtgcagggcgtgttgtcaagcctgcttggatctctcggggctagggccggttccagtgaatccatcgccgctttcatccagaggttgtctggctcgagcaatatatttgagccaggggctgacggagccctgggtttttttggagcactgctgtcgctcctgtgccaaaatttttctatggtagatgtcgtgatgctgctgcatggacacttccagccattgcagcgcctgcagcctcagttgcgttctttttttcaccagcattatctaggcggtcaggagccaaccccatccaatattcgcatggcaacccacaccctcattaccgggctcgaagagtatgttagagagtcttttagtctggtccaagtgcagccaggggtggatatcatcagaaccaatctcgagttcctccaagaacagtttaatagtatcgccgctcacgtgctgcattgcacagacagcggttttggagcacggctgttggagctgtgcaaccagggactcttcgagtgcctggcattgaacttgcactgtctaggcggacagcaaatggaattagccgctgttattaacgggagaatcaggcgcatgagcaggggcgtgaatccatccctggtttcgtggctgacaacaatgatggggttgcggctgcaagtcgtccttgagcatatgcctgtagggccagatgccatactccgatacgtgaggcgagtaggtgacccgcctcaacccctgcctgaggagccaatggaagtacagggcgctgagcgcgctagccccgagccccaggagtgggtaccaatcatccaacaagacatacagagtcagcggaaggtaaaaccccagcctcctctctctgacgcctacctctccgggatgcccgctaagcggagaaaactgcgaagcgatatccagaaacgccttcaagaggatccaaactatagtcctcaaagattcccaaacgcccagagggccttcgcggatgacccttag

SEQ ID NO: 215855 - DNA, 3234 bp, synthetic construct
  misc_feature 1..3234: note = Description of Artificial Sequence: Synthetic coding sequence
  source 1..3234: mol_type = other DNA
atggagcccaatgattcaaccagtactgccgtcgaagaacctgattctcttgaggtcttggtaaagactctggattcacaaacccgcacgttcatcgtgggtgcccagatgaacgtcaaagaatttaaggagcacatcgcagcctccgtatccatcccatccgaaaaacagcggcttatctatcaaggtcgggtcttacaggacgacaagaagctccaggaatacaacgtgggagggaaagttatccatctggtcgaacgagctcctccccagacccatctgcctagcggcgcatcaagcggcaccgggtccgcctccgcaacccacggagggggatcccctcccggaacccgagggcctggcgctagcgtacacgaccgcaatgctaatagctacgtgatggttggcacctttaacctcccctccgatggcagcgctgtggacgtgcatatcaacatggaacaagcccctatccagtcagaaccacgggtgcgcctcgtgatggcccagcatatgataagggacatccagacactactatcaaggatggagtgccggggtggacctcaacctcaacatagccagccccctccccaacccccagccgtaacgcctgaacctgttgccctgtcttctcagacctccgaaccagttgaatctgaggcaccaccacgagaaccgatggaagctgaagaggtcgaggagagagctccagcccagaacccagagctgactcccggtccagccccagccggtcccacacctgctcctgagaccaacgcaccaaaccatccaagtccagcagagtatgtggaggtcctgcaggagctgcagcggctcgaaagccggcttcagccctttctccagagatactatgaagtgctgggagctgccgctaccaccgattacaataataatcatgagggccgagaagaggatcagcggttaatcaacctggtgggggagagcttacgtctcctgggaaatacctttgtcgctctttctgatctccgctgtaacttggcctgcactcctccccgacacctgcacgtggtcagacctatgagtcactacacaacaccgatggtactgcaacaagcggctattcccatccaaattaatgtcggcactacggtgacaatgacaggcaatggcacccggccacccccaacgccgaacgcagaggccccaccacccggacccggtcaggcttcaagtgtagctccatcttccacaaacgttgagagtagcgccgaaggagcccctcccccaggcccagcaccccctcctgcgacatctcacccccgtgtcattcgaatttcgcaccagtctgtggagccagtggtcatgatgcatatgaatatccaggattcgggaactcaacccggaggtgtgccgtccgcccctactggcccactcggtccccctggacacggtcagaccctggggcagcaagttccaggcttccctacagcccctacgcgggtggtgattgctcgcccaacccctcctcaggccagacctagtcatcccggaggccctcccgtttccgggactctccagggagccggactcggcactaacgcatccctggcccagatggtatcaggtcttgtggggcaactgttaatgcaacctgtcctcgtcgcccaaggaaccccaggaatggcacccccacccgctccagccactgcgtctgccagcgccggaactaccaatacagcgacgacggccggtcccgctccagggggtccggctcaaccacctccgactccccaaccatccatggccgaccttcagtttagccaacttctggggaaccttcttgggccagccggaccaggggctggcggaagcggggtggcaagtcctaccattacagtggcaatgcctggagtgccggcatttctgcagggcatgacagactttctccaggccacgcagaccgcacctcctcctcctccaccgccaccaccccctcctcctgccccagagcaacagacaatgccccctcccggaagtccctccgggggagctgggtcacccggagggctggggctcgaaagcctgtcccccgagtttttcacgtctgtggttcagggggtcttatcatctctcctggggtctctgggcgctagagcaggcagcagcgaatccattgctgcatttattcagcgcctgtcaggcagttcaaacatcttcgagcccggtgctgacggagcattaggattttttggtgcgctgctatctctactgtgtcagaattttagcatggttgatgttgtgatgcttctgcacggccacttccagcccttgcaaagactccagccccaacttaggagttttttccatcaacactacctggggggacaagagcccaccccttctaatattaggatggccactcataccctgatcaccggcttagaggaatacgtacgcgaaagcttctctcttgttcaggttcagcctggggttgatatcattcgaacaaacctggaattccttcaggaacagttcaattcgatagctgcgcatgttctgcactgcaccgatagtggttttggcgctcggctgctcgagctctgcaatcagggcctgtttgagtgcttggcattaaacctccactgtctgggcggtcaacagatggagctggccgctgtgatcaatggcagaattcgccgaatgtctcgaggggtgaatcccagcctggtttcatggctgaccacaatgatgggccttcggcttcaggtggtccttgagcacatgccggtcgggccagatgccattctgcgctatgtgcggcgagtgggcgatcctccccaacccctgccagaggagcccatggaagtgcagggggcagaaagggccagccctgaaccgcagcgggaaaacgcgtccccagcaccgggaaccaccgctgaggaagccatgagcagaggaccccctcccgcacctgagggtggcagccgcgacgagcaagatggggcatcagctgagaccgagccatgggccgctgcagtgccccctgagtgggtcccaataatacagcaggacattcaatctcagaggaaggtgaagccgcagcctccactgagcgacgcctatctgtcaggcatgccagccaagcggagaaagttaagatccgacatacagaagcggctgcaagaggacccaaactatagccctcagcgattcccaaacgcccagagggctttcgccgacgatccttag

SEQ ID NO: 215856 - DNA, 3234 bp, synthetic construct
  misc_feature 1..3234: note = Description of Artificial Sequence: Synthetic coding sequence
  source 1..3234: mol_type = other DNA
atggagccaaatgacagcacctctactgccgtggaggaacccgactccctggaggtgcttgttaaaacattggattcacagacaagaacatttatagttggagcccagatgaatgttaaggaatttaaggaacatattgctgcttccgtttctattccctcggagaagcagaggctgatatatcagggccgtgtactgcaagatgacaagaagcttcaagaatataatgtggggggaaaggttatacaccttgtagagcgagccccaccccagacccatctgccgagtggcgcttcatctggtacagggtccgcctccgccacccacggtggcggatcgcccccaggtacccgtggtcccggtgcctcagttcatgatcgcaatgccaactcatatgtgatggtgggtacttttaacctcccctctgatggatctgcagttgatgtgcatattaatatggagcaggcacccatccagtcagagccacgagtgaggctcgttatggcccagcacatgatacgcgacatccagactcttttaagccgcatggagtgtaggggcggaccacagcctcagcactctcagccccctcctcagcctcctgccgtcacgcccgagccagtggcgctcagctcccagaccagtgagcccgttgaatccgaggcaccacctcgagagcccatggaagccgaggaagtggaggagcgggcaccagcccaaaatcccgaactaaccccagggcctgcaccggctggtcccactcctgcaccagaaacgaatgcaccaaaccacccgtctcccgctgagtatgttgaagtacttcaggaactgcaaagactggagtctcggctgcagccttttctgcagcgctactacgaggtcctgggagccgcagccacaactgactacaataacaatcacgagggtcgggaggaggatcagcgccttatcaatctagtaggcgaatctctgcgtctcctcggcaacacattcgtcgcattgagcgacttgagatgcaatctggcctgtacgcctccaagacatttgcatgtcgtgagaccgatgagccactacactacacccatggttctgcagcaggccgcaatacccatacaaatcaacgtcgggaccacagttactatgaccgggaatggcacccgtcctccgccaacccccaacgcggaggccccacctccaggccctggtcaggcctcatcagtggctccatcctctaccaacgtggagagttcggctgaaggggcaccacctcctggacctgccccaccccctgccaccagtcacccacgggtcataaggatctcacaccagtcagtagagcccgtggttatgatgcatatgaatattcaggattctgggactcagcccggaggggtgccttcggctcctacgggtcccctgggaccaccaggacacggccagacgctcggccagcaggtacccggattcccaacagcgccaacccgtgtggtaatcgctaggccaactcctccacaggctaggcccagtcaccctggcggacctcctgtgagcggcaccttacaaggggctggactcggtacgaacgcctcgttggcacagatggtgagcggtttggttgggcaacttctaatgcagccagttctggtggcgcagggtactccaggtatggctccaccccctgctcctgctacagcgagtgcttctgctgggaccaccaatactgcaacgacagcgggacccgctcccggagggcctgcccagccacctcccaccccacagccatccatggcagatcttcagttttcacagctcctcggaaacctgctgggtcccgctggtccaggcgcaggcggaccaggggtcgcgtcgcccaccatcacagtagccatgcctggagtgccagctttcctgcaaggcatgaccgactttttgcaggctactcagactgctcctccaccaccaccgccacctccccctcccccacctgctccagagcagcagacaatgccaccccctgggagtccatcagggggagccggatctcctggagggctgggtttggagagcctaagccctgaatttttcacctcggtggtgcagggcgtgctcagctcactgcttggcagcctgggggcacgggcaggcagcagcgaaagtattgctgcgttcatccaaaggttaagtggtagctccaacatctttgaaccgggtgctgatggggcattgggtttctttggggcactcctgagcctgctgtgtcagaacttctctatggtagacgtggtgatgctgctccacggacacttccagcctctgcaacgactccagccccagttgcgtagcttttttcaccaacattacttaggcggtcaggagccgacaccttcaaacatccgcatggctacacatacgctcataacggggcttgaggaatacgtccgcgagagctttagcctcgtgcaggtccaacccggagtagatatcattcggaccaacttggagttcctccaggaacagtttaacagtattgccgctcacgtattgcattgtaccgattcaggttttggcgcacgtctgctcgaactttgcaaccaggggctctttgagtgcctcgccttgaacctgcattgtttgggtggccagcagatggagctcgccgcagtgattaacgggcgtatacgcagaatgagtagaggggtgaatccaagtctggtgtcttggctaacaactatgatgggactgcggttgcaggtggtgcttgaacacatgcccgttggcccagatgccatcctgaggtacgttaggcgagtcggtgacccccctcagcccctgccagaagagcccatggaagtgcagggcgcagagcgtgcctcacccgagcctcagcgggagaatgcttcacccgctcctgggacaacagccgaggaagcgatgagcagaggacctccccctgctccagaggggggatcacgcgacgagcaggacggcgcaagcgctgagacagaaccgtgggctgctgcagtccctccagaatgggtgcctatcatccagcaagacattcagtcacagaggaaagtgaaaccgcagccccctctgtccgatgcatacctctcagggatgccggcaaagcggcgaaagctacgtagcgacattcagaagcgactgcaagaggaccccaattactctccgcagcgcttccccaacgcacagagggccttcgccgacgatccctag

SEQ ID NO: 215857 - DNA, 3489 bp, synthetic construct
  misc_feature 1..3489: note = Description of Artificial Sequence: Synthetic coding sequence
  source 1..3489: mol_type = other DNA
atggaacccaacgattcaacatctaccgcagtggaggagccggacagcctcgaggtcctggttaaaaccctggattcccagacacgcacctttattgtgggcgcacaaatgaacgtcaaggaattcaaagaacacatcgctgcctctgtttccattcccagtgagaagcagcggttaatctatcagggcagagtgcttcaggacgacaagaagctgcaagagtataatgtgggtggcaaggtgatccacctcgttgagcgagccccaccccagactcatctcccttcaggagctagttccgggaccggttctgcttccgcaacacatgggggaggttccccaccgggtacccggggtcctggcgctagcgtgcacgatcgcaacgccaactcttatgtgatggtggggaccttcaacctgccctctgatggttcagcagtggacgtccacataaacatggagcaagctccaatccagtctgagccccgagtccgcctcgtaatggctcagcacatgattagggatatacagaccttgctgtcgcgcatggaatgccgaggagggccacagcctcagcactcccagcctccgccacaacctcccgcagtgacacccgaacccgttgcactgtctagtcaaacttccgagcccgtggaatctgaggcccctccgagagagcctatggaagccgaagaggtggaggagcgggcaccggcacaaaatcccgaactcacccctggacctgcccctgctggcccaacgcctgctcctgagacaaacgcgcctaaccacccttcccccgctgagtacgtggaggtcctgcaggagctgcaacgcctcgagtcgagactgcagccctttctgcaacgttactatgaggtgctcggcgcagcagctacaacggactataacaacaaccacgaaggacgcgaagaagaccagaggctgatcaatctggttggggagagtcttagattgctgggaaatactttcgttgccctgagcgaccttaggtgcaatttggcctgcacgccaccacgccatctgcacgtcgtcaggcccatgagtcactataccacacccatggtcctgcagcaggcggctatccctatacagattaacgttgggactaccgttacaatgacaggaaatggaacacgaccacccccaacccctaacgccgaagctcctcctccaggcccagggcaggcctctagcgttgcaccatcttcgaccaatgtggagtcctcggcggaaggcgcaccaccaccaggcccagccccaccgccagctaccagccaccctcgggtgatccgtatctcacaccagtcagtcgaacccgtggtgatgatgcatatgaacatccaagactccgggactcagcccggtggcgtgcctagcgcccctactggacctctcggtcccccaggacacggacagaccttgggtagcacgttgattcaattgccctctctaccgcctgagttcatgcacgcggtggctcaccagattactcaccaggccatggtggcagcggtggcatccgctgccgctgggcagcaggtgccaggatttccaacagccccaacgcgcgtggtaatagcacggcctaccccgccacaggccaggccctcccaccccggagggccaccggtgtccgggaccctgcagggagcagggctcggcacgaatgccagtctggcccaaatggtgtccgggttagtgggtcaactactcatgcagccagtattggtcgcgcagggaacgccagggatggcaccgcctccagcaccagctaccgcaagcgcttctgcgggtacgacgaatactgctaccacagcgggtccagcccctggtggcccagcccagccacctcccacaccacagcccagtatggctgatctacaatttagccagctgctcggtaacctgctggggcctgctggtcccggagctggagggccaggcgttgcctcccccactatcactgttgccatgcccggagttccagcttttctgcaaggcatgacggacttccttcaagcaacccagacagcccctccaccacctcccccacctcctcctcccccacctgctccggaacagcagaccatgcccccacctggctcaccctctggtggagcgggaagtcccggagggttagggctggaatccctcagcccagagttctttacgtccgtggtacagggcgtgctcagtagcctcctcggaagtttgggagcacgcgcaggcagctcagaatcaatcgctgccttcattcagagattgtctggttcctctaacatcttcgaacctggggcagacggcgctctagggttttttggcgctttactgagtcttctctgtcagaatttcagcatggtggacgtggtgatgctgctccacggacacttccagccgctacagcgactgcagcctcaactccgttcattcttccatcaacactatctggggggacaagaacccaccccttctaatatacgtatggccacacatacactgatcacagggctggaagaatatgtacgtgaaagtttctcactcgttcaggtacagcctggcgtggatatcatccggacgaacctcgagtttttgcaggagcaatttaacagcatcgctgcccacgtactgcactgcaccgactccggattcggagctaggctgcttgagctgtgtaatcaagggctattcgagtgcctggccctcaatcttcattgcctcggcggacagcaaatggagctggcagctgtcatcaacggcaggatccgtcgaatgagccgcggagtgaaccccagcctagtgagctggctgactacaatgatgggtcttaggctgcaagtagtgttggagcacatgcccgtgggccctgatgctatcctccgttatgtgagacgggtgggtgatcccccacagcctctcccagaagagccgatggaagttcagggcgcagaacgcgcttctccggagccacagcgggagaacgctagccctgccccaggaactacagctgaggaggctatgtctcggggacctccccctgctcctgaaggcggttctcgcgatgaacaggacggagctagcgctgagaccgaaccttgggcagctgctgttcccccagaatgggtcccgatcatccagcaagatatacagtcccaacggaaggtaaagccccaaccacctctgagcgatgcataccttagtgggatgcccgctaaacgcaggaagactatgcagggcgaggggcctcagctgctgctgtcagaggccgtatcccgagcagccaaagctgcaggcgcaagacctttgacgagcccagagagtctcagccgcgatctggaagcccctgaagtccaggagagttataggcagcagctaagaagtgacatacagaagcgtctccaagaggacccaaattactccccccagcgcttccctaacgcccagcgcgcattcgccgatgacccctag

SEQ ID NO: 215858 - DNA, 3234 bp, synthetic construct
  misc_feature 1..3234: note = Description of Artificial Sequence: Synthetic coding sequence
  source 1..3234: mol_type = other DNA
atggagcccaacgattctacaagcaccgccgttgaagagcctgactcactggaagtcctagtcaaaacactggactcacagacacgcacttttattgtgggagcccaaatgaatgtaaaagaattcaaggaacacattgccgcttccgtgagtataccaagcgagaaacagcggcttatataccaagggagagtgctgcaggatgataagaagctgcaagagtataacgtggggggaaaggtgatacacttggtggaacgggctccaccccagactcacctgccttcgggagcatcttcaggcacagggtctgcctcagcgacacacggtggaggctcccctcccggaacccgtggacctggggcttccgttcacgatagaaatgccaattcctatgtgatggttggtacttttaatctgccctcggatggatctgccgttgatgtgcacatcaatatggagcaggccccaattcagagcgaaccacgcgttaggctggtcatggcacagcacatgattagagacatccaaactttgctttcccgcatggagtgccggggaggcccacaaccccaacattcccagccgccaccccagccaccggcagttacaccagagccagtagcgttaagttcacagacctctgagcccgtggaaagcgaggcgcctccccgtgagccgatggaggccgaggaggtcgaagagagggccccagcacagaatcccgaactgactcccggacctgccccagcgggacctacccccgctcctgaaacaaatgcaccaaatcatcctagccccgctgagtatgtggaggtcctccaggaactgcagagactggagtcgcgcctgcagcccttcctgcagagatattacgaggtattaggcgcagcagctaccactgattataacaataatcacgagggacgagaggaggaccagaggctgattaacctggtcggtgaaagtttgcggctgctaggtaatacctttgttgctctttctgacttaagatgcaatcttgcgtgcactccccctcggcacctccatgtggtgcggccaatgtcccattatacaacccctatggtcctacagcaggcggctattccgattcagatcaacgtggggaccacagttacaatgacggggaatggaacaagacctcctcctacccccaatgcagaagccccaccgccaggtcctgggcaggcctcctctgtggcacctagctccaccaacgtggagagtagcgctgagggcgctcccccaccgggaccggcaccaccgcctgctacctcacaccctcgggttattcggatcagtcatcagtccgtagaacccgttgtcatgatgcatatgaacatccaggattctggcacccagccagggggagtgccatcggcacccacgggacccctcggaccgcctggtcatgggcagacattggggcagcaagtgccaggcttcccgaccgcacccacgagggtggtgatcgcgcgaccaaccccaccacaggctcgcccttctcaccctggtgggcctccagtgagtggcactctccaaggagcgggattagggaccaacgcatccctggcccagatggtctcaggcttggtgggtcaactgctgatgcaacccgtattagttgctcagggtacccccggtatggcccctcctcccgctcctgccactgcctctgcctcagctggaactaccaacaccgccacaactgccggaccggcacctggaggaccagctcaacctcccccaacccctcagccgtcaatggccgatttacagttcagtcaactcctgggcaacctcctggggccagccggtcctggagctggtggcagtggcgtggccagtcctacaattactgtcgccatgccaggagttcctgccttcctccagggcatgacagacttcctccaggcaactcagacagctcccccaccgcctcctcctcctcctccacccccacccgctccagagcagcagaccatgccgcctccaggatctccttcaggcggtgccggatcgccgggaggcctgggcttggagagcctatccccagagttttttacctctgtggtacagggagtgttgagtagcctgctgggtagtctgggagcaagggcaggatcctccgagtccatcgctgcttttatccaacgtctgtctggctcctccaacatttttgagccaggtgcagatggagctcttgggtttttcggcgctttgttgtcccttctatgtcagaattttagcatggtggacgtggtgatgctcctccacgggcattttcaacctttacagcggctgcagccgcagttgcgaagtttcttccaccagcattacctcggcggtcaagagcctaccccaagcaacattcgtatggcgactcacactttgattactggcctggaagaatatgtgcgggagagcttcagccttgtgcaggtgcagccaggcgtcgacattatccgtaccaaccttgagttcctgcaagaacaattcaactccattgctgcccacgtgttgcactgtaccgattctggctttggcgctcgcctcctagaattgtgtaaccagggcctcttcgagtgccttgcgctgaaccttcactgcttaggtggacaacagatggagctcgccgctgttattaacggccgaattagacgcatgtcccggggagtgaacccaagcctggtgtcctggttaaccacaatgatgggactaagattacaggttgtattggagcatatgcccgtgggcccagacgccatcctgcgatacgtgcgtcgtgttggcgacccccctcagcccttgccagaggagcctatggaggtgcagggcgcagagagagcgtcccccgagcctcagagagaaaacgccagccctgcaccaggtaccactgccgaggaggcaatgtccagagggcctcctcccgctccagagggcggatctcgcgatgagcaggatggcgcatctgcagagacggaaccttgggcagcggcagtgccacctgagtgggtgccaatcatccagcaagacattcagagccaacggaaggtgaagccacagcctccactgtctgacgcctacctgtccggcatgcccgctaaacgtcggaagctgaggtcagacatccaaaaacgtctgcaggaggacccaaattactccccacagcgttttcctaatgcccagagggcatttgcagatgacccttag

SEQ ID NO: 215859 - DNA, 2712 bp, synthetic construct
  misc_feature 1..2712: note = Description of Artificial Sequence: Synthetic coding sequence
  source 1..2712: mol_type = other DNA
atggaacctaatgattctaccagcacagcagtcgaggagcccgactccctggaagtgctcgtgaagacccttgacagccaaacacgaacatttatcgtaggcgctcagatgaacgttaaggagttcaaagaacacattgctgccagcgtctcaatccccagtgagaaacagaggctcatttatcaaggaagagtgttgcaggatgataagaagctgcaggagtacaatgtcggcggaaaagtgatccacctagtggagcgggctcccccacagacccatctcccgagcggagcctcttccggtactgggtcagcaagtgcgactcatggcggaggcagcccgccaggcactaggggccctggggcatccgtccatgaccgcaacgccaattcttatgtgatggttggcaccttcaatcttcccagcgacggctccgcagtggatgtgcacataaacatggagcaggccccaatacagagcgagcccagggtccggctagtgatggcgcagcacatgatccgggacatccagaccctcctgtccagaatggagtgccggggaggccctcaacctcagcattcccagccccctccacagccacccgctgtgacacctgagcccgtggccctgagttcccagacttcagagcccgtagagagcgaggccccacctcgcgagcctatggaagccgaggaagtcgaagaaagagctcccgctcaaaaccctgaattgacaccgggaccagcacccgctgggccaactccggctcccgaaacaaatgccccaaaccacccatctccggcagaatacgtagaagtgcttcaggaactacagcggcttgaaagtaggcttcagcccttcttacagcggtactacgaggtgctaggagccgcagcaacaaccgattataataacaaccacgaaggcagggaggaggaccaacgcctcatcaacctggtgggagagtccctgcgcctactggggaacacatttgtggccctctccgaccttcgatgtaatttagcctgtacaccgccacgacatctgcacgtcgtgcgcccaatgagccactacactacgcctatggtgctgcagcaagccgcaatccctatccaaattaatgtcgggacaaccgtgaccatgaccgggaacgggacccgtcctcctcccacccctaacgctgaagcccctccaccaggtcctggccaggcttcctccgtggcgccaagtagcactaacgtggaatcctccgcagaaggagcccctcctcccggtccggctccccctccagcgacctcacacccccgagttatccgaataagccaccaatccgtggagcccgtggtgatgatgcacatgaatattcaggacagcggtacccaacctgggggagtgcccagcgccccaaccggccctctaggccctccaggccatggccagaccctgggccagcaggttcctggatttcccactgctcctaccagagtcgtgatcgcgcgaccaacaccccctcaggcccgtcctagtcacccgggtggaccccctgtgtcaggaactttgggagccggtcttggcactaatgcgtcactggcccaaatggtgagcggtcttgttggccaattgcttatgcagccagtgcttgtggctcaagggacaccagggtcgcccggaggactgggcctggagtcactgagccctgagttttttacatcagtggtgcaaggagtcctttcttctctgttgggctctctgggcgcacgcgctgggagcagtgagagcattgctgcatttatccagcgactatccggctcttcaaacatcttcgaacccggtgccgacggggcactgggatttttcggcgctttactatcgcttctgtgccagaactttagtatggtagacgtagtcatgctgctacacggtcacttccaacctctgcaacggttgcagccccagctgcggtccttttttcaccagcattacctcggaggacaggagccgaccccctcaaacatcaggatggccactcataccctgattacaggtctcgaagagtacgtcagggagagctttagccttgtccaggtacagccaggcgtggatataatcaggaccaacttagagtttctgcaggagcagttcaatagtattgctgctcacgtcttacactgcaccgacagtggatttggggcacgactgctcgagctctgcaaccagggactgttcgagtgtctggccctgaacctgcactgtttaggaggtcagcaaatggaattggccgcagtaatcaacggaaggattcgacgcatgagcagaggcgtgaatccctctctggtgagctggttaacaacaatgatggggctaaggcttcaggtcgttctagagcatatgccagtaggcccagatgctatcctgaggtatgttcgcagagttggggaccctccacagcccctcccagaggagcctatggaagtccagggagctgagcgcgcttctcctgaaccccaggagtgggtgcctatcattcagcaggacatccagagccagaggaaagtcaagcctcaacctccactttccgacgcttacctgtccggcatgccagccaaacgaagaaagctgcgcagtgacatccaaaaacggttgcaagaggatcccaattacagcccgcaacgcttccctaatgctcagcgcgcatttgccgatgacccatag

SEQ ID NO: 215860 - DNA, 3489 bp, synthetic construct
  misc_feature 1..3489: note = Description of Artificial Sequence: Synthetic coding sequence
  source 1..3489: mol_type = other DNA
atggaacctaatgactccacatctacggcggtagaagaacctgactcattggaggtgctggttaaaaccctggattcccagacaaggacctttattgtgggtgcccaaatgaacgtaaaggagtttaaggagcatatcgctgcttctgtcagtatcccatccgaaaagcaacgtttgatatatcagggtagagtgctgcaagacgacaagaagctccaggagtataacgtaggcggaaaagtcattcaccttgtggagagagcccctcctcaaacacacctcccctcaggtgctagcagtggaactggttcggcatccgcaacccatggaggcggatctccgccagggacccggggaccgggagcctcagtgcacgatcggaacgccaactcctacgtgatggtgggcacatttaatctgccttcagatggatcagcagtggacgtgcatataaatatggagcaggcacctatacaatctgaaccaagagtgaggctagtcatggcccagcacatgataagagatattcagaccctattgagccgtatggagtgtcgaggcggaccccagccccagcactctcagcctcctcctcagccccctgctgtaactccagagccagtagccctgtcgtcacagactagtgaacccgtggaaagtgaggcacctcctagagaacccatggaggccgaagaagttgaagaaagggctcccgctcagaacccggagctgactcctggcccagctccggcagggccaactcctgccccagaaactaacgcccctaaccatccatctcccgcagagtatgtcgaagtgctgcaagaattgcagagactcgaaagtaggctgcaacctttcctccaacgctattacgaggtattgggcgctgccgcaacaacggactacaacaacaatcacgagggcagggaagaggatcagagacttatcaacctggttggagagagcctgagattattaggaaatacgtttgtggcacttagtgacctcagatgcaacttagcatgtacccccccaaggcacctgcacgttgtccggccaatgagtcactataccactcccatggtcttgcagcaggctgcaatcccaattcagatcaatgtggggaccacagtcacaatgacggggaacggaacccggcctccacctacgccgaacgcagaagcccctccacctggccctggacaagcttcatccgtggcgccaagcagcactaacgtcgaatcaagcgccgaaggagccccacctcctggcccagcacctcctccggcaacctctcacccaagggtgattcggatttcccatcagtccgtggagccagttgtgatgatgcacatgaatattcaggactccggcacccagcctggtggcgtccccagcgccccaactggcccactgggacctcctgggcacggtcaaactctgggctccacacttatccagcttccaagcctacctccagaatttatgcatgcggtggcacaccagataacccaccaggccatggtggcagctgtcgcgagcgctgccgctggtcaacaagtaccgggtttcccgaccgctccaacaagagtcgtcattgctcggccaaccccaccgcaggctcgtcccagtcatccaggtggtccgcctgtgagcgggacacttcaaggcgcaggtctgggtacgaacgccagcttggcccagatggttagcggactcgtgggtcaacttctgatgcaacccgtgttggttgctcaagggacccctggaatggctcccccaccagcccctgccactgccagtgcatccgctggaacaaccaataccgctactaccgccggaccagcacccggaggcccagctcagcctcctcccacgcctcaaccttccatggccgatcttcagttttcccagttgctcggcaatcttctgggcccagcaggaccaggggcagggggttctggtgtcgcttccccaactatcacagtagcaatgcctggtgtccctgcctttctccagggcatgactgactttctgcaggccacacagacagcccctcctcccccaccccctcctccccctccacccccagctccagagcagcagacaatgccccctcccggttctcccagcggtggtgccggtagtcctggcggtctcggcctggaaagtctgtctcccgagttcttcacatccgtggtacaaggcgtgctcagttcattgctcggaagcctcggagctcgggcagggtcttcagagtcgatcgccgctttcatccagcgtctgagcggctcctccaacatctttgagcctggcgcagacggcgctttgggtttctttggcgctctccttagcctcctctgtcaaaatttctctatggtcgacgtggtcatgttactgcatgggcactttcagcccttgcagcgtcttcagccccagctgaggagtttttttcatcagcattacttgggcggtcaggaaccaacgcccagtaatatccgaatggctacccatactctaattaccgggctcgaagaatacgtaagggagtcgttttcccttgtacaggtgcagccgggtgttgatattatccgcaccaatttggagtttctgcaggaacagttcaactctatcgccgctcacgtgttgcactgtacagatagtggctttggcgcaagacttcttgagctgtgtaaccagggtttgtttgagtgtcttgctctgaatctgcactgcctcgggggacagcagatggaactcgccgcagttatcaatgggaggatcagacgaatgagtaggggagtgaacccttcactcgtgagctggttgaccacaatgatgggccttagattgcaagtggtccttgagcatatgccggtcggcccagacgctatcttgagatacgtccgtcgggtgggggatcctccacaacccctgccagaggagccaatggaagttcagggagccgagcgagccagtccagaacctcagcgggagaacgcatctccagctcctgggactacggccgaggaggctatgtcccgcggacccccacctgcgccagaaggcggttctcgcgacgagcaagatggtgcatccgccgagactgagccatgggccgcagctgtgcctccggagtgggttcccataatccagcaggatatccagtcccagagaaaggttaagccacagccccctttatctgacgcataccttagcggaatgcctgccaagcgacgcaaaaccatgcagggggaggggccacagctgttgctttctgaggccgtctcgcgcgctgcgaaagcggctggcgcacgccctttgacttctccggaatccctctcgagggacctcgaggcacccgaagtgcaggagtcctatcgtcagcaactcaggtctgatattcagaagcgattacaggaggatccgaattattcaccacagaggttcccaaacgcacagagggcctttgcagatgacccttag

SEQ ID NO: 215861 - DNA, 3234 bp, synthetic construct
  misc_feature 1..3234: note = Description of Artificial Sequence: Synthetic coding sequence
  source 1..3234: mol_type = other DNA
atggagccaaatgacagcacatccacagccgtggaggaaccagattctcttgaagttctggtgaagactctcgactcacaaactagaacgttcatcgtgggggctcaaatgaacgttaaagaatttaaggagcacatagccgctagtgtatccatcccttccgagaaacagcgactgatctatcagggacgagtgctgcaggacgacaagaagctccaggagtataacgtgggagggaaagtgatccacctggttgagagggctcccccacaaacccatctcccttcgggagcctcctctggaaccgggtcggcctccgccacccacgggggtgggagtccacctggaacgagagggcctggagcttccgtgcacgatcgcaatgctaatagctacgtcatggtgggaactttcaacctgcctagcgacggatcggctgtagatgtacacatcaacatggaacaggcccctattcagagcgagcccagggtaagactcgtgatggctcaacacatgattcgcgatatacagactctgctctctaggatggagtgtagagggggtcctcagccccagcattcacagcctcccccacaaccacccgcagtgaccccagagcccgtggctctgagctcacagactagtgagccagtggaatccgaggcacctcctcgtgaacccatggaggcagaggaggtggaggaacgtgcacccgcacagaaccccgaacttacaccaggacccgcacctgccggaccgactcccgctcctgagactaacgccccaaaccatcctagcccggctgaatacgtagaagttctccaggagctccagcgactggagagccggctgcagcccttcctgcagcgctactacgaggtgcttggagcggcagcaaccaccgactacaataacaatcatgagggacgggaagaggaccagaggttaatcaacctggtgggagagtcattgcgactcctggggaataccttcgtggctctgagcgatctcagatgcaatttggcctgtactcctccaaggcacttgcacgtagttaggccaatgagccattacactaccccaatggtcctacagcaggctgccatccctatccagatcaacgtggggaccacggtgaccatgacaggcaacggaactcgccctcctcctactcccaatgccgaggccccacccccaggcccaggccaggccagttcggtggccccaagctccaccaacgtggaatcaagtgccgaaggagcccctccgccaggccctgcaccccctccagcaacctcccaccctagggtgatccggatttcacatcagagtgttgagcctgttgtcatgatgcacatgaatatacaagatagtggcactcagcccggaggagtcccgagcgccccaaccggtcctctgggtccaccagggcatggacagacattaggtcaacaagtcccagggtttcccaccgccccaaccagggtggtgattgccagacccacgccccctcaggccaggccttcccatcctggcggtcctcctgtgtccggtactttgcagggggcagggctggggactaacgcaagtctggcacagatggtctcaggactggtcggacagctgctcatgcaacccgtgctggtggcccagggtacaccaggtatggctccgccaccagctcctgccacagcaagcgcatcggctggaacaaccaataccgccaccaccgcgggacccgctcctggtgggcctgcgcagcccccaccgaccccccagccttccatggccgatcttcagtttagccagctgctggggaacctcctgggccctgccggacccggtgctggtggtcccggagtggcttcccctactatcactgtagccatgccaggggtacctgctttcctacagggtatgactgacttcctgcaagcaacacagaccgctcctcccccaccacctccgccaccgcctcctcccccagcgcctgaacagcagacaatgcctccccctggcagccccagcggcggtgccggtagccccggtggccttggtcttgagtccctctcacccgagttttttacgtcagtcgttcagggggttctgtctagcctcctggggtcgttgggggcacgcgctggctcctccgagtccattgctgcctttattcagcgcctgtctggttcatcaaacattttcgagcctggcgcagacggcgcactgggcttcttcggcgcattgctgtcactcctatgccagaacttcagcatggttgacgtagtgatgctactccacgggcactttcagcctctgcagaggctgcagccacagcttcgaagttttttccatcagcactaccttgggggtcaggagccgaccccttccaacattcggatggccacacacactctgatcacaggtcttgaggagtatgtcagggaaagtttttcactggttcaagtccagccaggcgtggatattatcaggacaaatctcgagtttctacaggaacagtttaacagtatagccgcacatgttcttcactgtactgactctgggttcggcgcacgcctgctcgaattatgcaatcagggccttttcgagtgcctggcgttaaacttgcactgcctcggcggacagcagatggaactggcagctgtgattaacggaaggatacgccgaatgagtagaggcgtcaatccctccttggtgagttggttgaccaccatgatgggtctccgcctccaggtggtgctggagcatatgcccgtgggtccggatgctattctgcgatacgtcagacgcgtgggagacccacctcagccactaccagaagaaccgatggaagtgcagggagctgaaagggcctcacccgagccgcagcgcgagaacgcaagcccagccccaggcactacagcagaagaggcaatgtcccggggacctccaccagcccctgaaggaggcagccgggacgaacaggatggcgctagtgccgagactgagccatgggccgctgcggtccccccagagtgggtaccgattatacagcaggacattcagtcccagcgtaaagtcaaaccacagccccctctgtccgacgcttatctgtctggcatgcccgctaaaagacgcaagcttagatctgacattcaaaagaggctccaggaggatccaaattacagcccgcagcggttcccaaatgcccagcgagcatttgcagacgacccatag

SEQ ID NO: 215862 - DNA, 2712 bp, synthetic construct
  misc_feature 1..2712: note = Description of Artificial Sequence: Synthetic coding sequence
  source 1..2712: mol_type = other DNA
atggaacccaatgactctacctcaaccgcagtagaggagccagactcactcgaagtgctagtcaagaccctcgatagtcagacacgaaccttcatcgtgggcgctcagatgaatgtgaaggagtttaaagaacacatcgctgcaagcgtaagcattccatctgaaaagcagcgtcttatctaccaaggcagggtgctgcaggatgacaaaaagctgcaggagtataacgtaggaggaaaggttatccatctcgtcgaaagagccccaccacagacacacctgccctctggcgcaagcagtggtactgggtcagcctccgccactcatgggggagggtccccaccgggaaccagaggacctggtgccagtgtccacgatcgcaatgcaaatagctacgttatggtggggaccttcaacctgccatcagacggatccgccgtcgatgtccacatcaacatggagcaggccccaattcagagtgagccccgagtgaggctcgtaatggcccagcatatgatccgggacatacagacgctgttgtcacgtatggagtgtcggggtggccctcagcctcagcactcccagccaccaccacagcctccagcagtgacacccgagcccgtggccttgagttctcagacttccgaaccagtcgaatcagaagcacctccgcgtgagcccatggaggcagaagaagtggaggaacgtgcgccagcccagaaccccgaactgacgccgggtccagcaccagccggaccgaccccggcaccagaaacgaacgccccaaaccacccgtctcctgcagaatatgtagaggtgttgcaggaactgcagcgtttggagagtcggctgcagccctttttgcaacgctattacgaggtgctgggagctgctgctacaactgactataataataaccatgaaggcagggaagaagatcagcgcctgataaatctggtcggtgaatccctgaggctgctgggcaataccttcgtggctctttccgacctaagatgtaacctcgcatgtacccctccaaggcatctccacgttgtgcggcctatgagccattacactactccaatggtgctgcagcaagctgcgatccctatccagattaacgtgggcacaactgttaccatgactggaaacgggacgcgccctccccctacgccaaacgccgaagcgccaccgcctggcccaggccaagcctcatcggtcgctccaagtagcaccaacgttgagtcatcggccgagggcgcaccacctcccggaccagctccacctcccgctacatcccatccaagagtcatccgcataagccaccaatcagttgaaccggttgtcatgatgcacatgaatatacaagatagcggtacccagcccggaggcgtgccttcagctccaactggccctcttggacccccaggtcatggacagactctgggacagcaagtgccaggctttccgactgcccctactcgggttgttatcgcaagacctactcccccacaggccagaccctcacacccaggaggcccaccagtttcaggcacccttggagccggattagggacgaacgcgtccctggcccagatggtgtccgggcttgtggggcagctcctgatgcagcctgtgcttgtggctcagggcacaccaggttcccccggtggactggggctggagtccctgagccccgaatttttcacctctgtggtccagggggttcttagcagtctgttgggctctctgggggctagagccggtagttctgaatcaattgcagctttcatccagcgtctgtctggatcaagcaacatctttgagccaggtgcagacggagccctggggttcttcggagcactgctctctcttctatgccagaatttttccatggtcgatgtggtcatgctcctgcacgggcacttccagcctctgcagcggctccaaccacaattacgtagctttttccaccaacattaccttggtggccaggaacctaccccctctaacattagaatggccacacataccctcattacaggcctagaggagtacgtgagggagagcttcagtcttgtacaagtccaaccaggcgttgacattatccggacgaacctcgaattcctgcaggaacagttcaacagcatcgccgcacatgtcctgcattgcaccgactctgggtttggagcgagactgctggagttgtgcaaccaggggctgttcgagtgtttggccctgaacttgcactgcctgggcggacagcagatggaactggccgcagtaattaatggtcggatccggcgtatgtcaaggggcgtaaaccccagtctggtgtcctggctgaccacgatgatgggcttaagactccaggtggtgttagagcacatgccggtggggcctgatgcaattctgcggtacgttcgccgagtgggagatccccctcagcctctgccagaggaaccaatggaagtgcaaggcgcagaacgggcttcacctgagcctcaggagtgggtccctatcatccaacaggatattcagagccagaggaaggttaaaccgcagccccctctgagtgacgcctacctatccggcatgccggcaaagcgccgtaagttgagatctgatatccagaagcggcttcaggaagaccccaattattcgccgcagaggttccctaatgctcagcgagccttcgctgacgatccatag

SEQ ID NO: 215863 - DNA, 2712 bp, synthetic construct
  misc_feature 1..2712: note = Description of Artificial Sequence: Synthetic coding sequence
  source 1..2712: mol_type = other DNA
atggaacctaacgactccacatctacagcagttgaagagccagactctttggaagtgttagtcaaaacccttgacagtcagactcggacatttattgtgggagcccagatgaacgtgaaggaattcaaggaacacattgccgcatccgtcagcatccctagtgagaagcagagactcatataccaggggagggtgttgcaggacgataagaaactgcaggagtacaatgttggcggaaaggtgatacacttagttgaacgagcccctcctcagacacatttgccgagtggtgcttctagcgggactgggtctgccagcgctacacatggagggggatcacccccagggacacgcggtccgggagcatccgtccatgatcgtaacgccaattcctacgtgatggtcggcaccttcaaccttccctcagacggcagcgcggttgacgttcatatcaatatggaacaggcacctatacagagcgagccacgggttcgcctcgttatggcacagcacatgattcgcgacatccagacactactgtcccgcatggaatgtcgaggcggtccacagccccagcattcccagcctccgccacaaccaccggcagttacccccgaaccagtggcattaagttctcaaacatctgaacccgtggaaagcgaagctccacctcgggagccgatggaagccgaggaggttgaagagcgtgccccagctcaaaaccctgagttaacgcccggacctgcaccagcaggcccaactccagctccagaaacaaacgcacctaaccatccctcaccagcagaatacgtggaggtgctgcaggaactgcaaagattggaatcccgattacaaccattcttacagcgctactacgaagtgctcggcgcagccgcaacgacagactacaataataaccatgaggggagggaggaggatcaaagattgattaaccttgtgggggaatccctgagactgttaggcaacacctttgtagccctttctgatctgcggtgtaatctcgcctgcaccccaccgaggcacctgcacgttgtgaggccaatgtctcactataccacacccatggtgctgcaacaggccgctatccccattcagatcaacgtgggcactaccgtgacgatgaccgggaacggcaccagacccccacccactcccaacgctgaggccccacctccaggcccaggacaagcctcctctgtggcacctagctccacgaatgtcgaatcatctgcagagggagccccaccacctgggccagctcctcccccagccaccagccacccaagggtgatcaggatctctcatcaatctgttgaacctgtggtcatgatgcatatgaacatccaggacagcgggacacagcctggtggagtgccttccgcgcctacagggcctcttggaccgcctggccatggccagacacttgggcagcaggtccctggcttccctactgccccaacgcgggtcgtcatcgctagaccaaccccgccacaggctagacctagtcatcccggaggcccaccggtgtctgggacattgggagcaggcctgggcactaatgccagcctggcccaaatggtttcaggtttggtgggccagctgctcatgcagcctgttctagtcgcccaagggacaccagggagccctggcggtctgggactggagagcctgtcaccagaattctttacatctgtagtgcaaggtgtgctgtctagcctgttaggctctctgggtgcacgcgctgggagctccgagtctattgcagcatttatacagcggctgtcaggttctagcaacatctttgaaccaggggctgacggtgccctggggttttttggagcgttactctcactcctctgccagaacttcagcatggtggatgtcgtgatgctgctccatggccattttcagcccctgcaaaggctgcagccgcagttaagatcttttttccaccagcattatctcggaggtcaagagccaactcctagcaacatcaggatggctacccacaccctgattacaggactagaagaatacgtcagagagtccttttccttggtgcaggtgcagcccggagtggacattattaggacaaatctggagttccttcaggagcaattcaactcaattgctgcccacgtgttacattgtactgacagcggctttggggctcggctgctcgagctctgcaatcaggggttgttcgaatgcctcgccctgaatctccactgcctcggcggtcaacaaatggaacttgcagctgttataaacggcaggatcaggaggatgtcccgcggagtgaatccgagtctagtgagttggctcactactatgatggggcttcggctgcaggtggttctcgaacacatgccagtgggacctgacgccatactgaggtacgtgagaagggttggggacccacctcaacccttgcctgaggaacctatggaagttcagggagccgagagagcatcccccgaaccacaggagtgggtgccaataattcagcaggacatccaatcccagcggaaggtcaagcctcagcctcctttgagcgacgcttacctgtccggcatgccagctaaacgaagaaagctacggagcgacatccagaaaaggctgcaggaggacccgaactacagcccccagaggttccccaatgcacaacgagcttttgcggacgacccctag

SEQ ID NO: 215864 - DNA, 3489 bp, synthetic construct
  misc_feature 1..3489: note = Description of Artificial Sequence: Synthetic coding sequence
  source 1..3489: mol_type = other DNA
atggagcccaacgattctacatcaactgcagttgaagagccagacagcctcgaagtacttgtgaagacactggatagccaaacccgaaccttcattgtcggggctcagatgaatgtgaaggagtttaaggagcacattgccgcttcagtgtccatccccagtgaaaagcaaaggctgatctatcaagggagggttttgcaggacgacaagaaactgcaggagtataatgtcggcggaaaggtgatccacttagtggagagagcccctccgcagacccatcttccttctggagcttcctccggcactggatctgctagcgcgacccatggaggtggaagtccccctgggactcgtggccctggcgcaagcgtgcatgataggaacgctaactcttatgtgatggtcggaaccttcaatctgccctcggacggctctgctgtcgatgtgcacatcaatatggagcaggcgcctatccaaagcgagccacgggtgagattagtcatggcacagcacatgattcgggacattcaaactctccttagcagaatggagtgtagaggtgggcctcaaccacagcactcccagccaccaccacagccacctgccgtaactcctgaacctgtcgcacttagttcccaaacatccgagccagtagagagcgaagcacccccaagggagccaatggaagcagaggaggtcgaggaacgcgcacctgcacaaaatcccgaattaactcccggtccggctcccgcaggccctacccctgcacccgaaaccaacgcaccgaatcatccaagtccggctgaatatgtggaggttctgcaggaactccagaggctcgaaagccgcctccagccttttttgcaaaggtactacgaggtactaggcgctgccgcaactactgattataataacaatcatgagggacgggaagaggatcagagattgatcaacctggtcggcgagtcactgcgtctcttaggtaacacatttgtggcccttagcgatttgcgctgcaatctggcttgtacccccccaaggcaccttcatgtagtgagacccatgtcccactatactaccccgatggtactccaacaggctgccattcccatccagatcaatgttggtaccaccgtgaccatgactgggaacggcaccagacctcccccaacacctaatgccgaggccccaccgcctgggccaggtcaagcaagttcggtcgcacccagttccaccaacgtcgaatcatctgcagagggcgctccccctccagggcctgcacctcccccagccactagtcaccccagagttattcgcatttctcaccagagtgtggaacctgtggtcatgatgcacatgaacattcaagattcagggacccagccgggaggagtgcctagcgcccctaccggaccattgggaccccctggccatggtcaaacgctgggcagtactcttatccaactcccgtccttacctcccgagtttatgcatgctgtggcacaccagatcacccaccaagccatggttgctgctgtggcgtcagccgcagccggacaacaggtacccggatttcctacagccccaaccagggttgtcatcgcacggcctactccacctcaggcccgaccatctcatcccggaggacctccagtgagcggcacactgcagggcgcaggacttggaaccaatgcatctctggcacaaatggtgtctggtctggtggggcagctgcttatgcaaccggtacttgtggctcaagggacaccaggaatggctcctccccctgccccagccacagcttcagctagcgccggtacaactaatactgccacgaccgcgggtcccgctcccggaggccctgcccagccaccaccaacacctcagccatcaatggccgatctccagttttcccagctcctgggaaacctgctgggcccagctggacctggcgctggaggctcaggtgtcgcttctcctaccattacagtggctatgccaggagttccagcttttttacaagggatgactgatttcctgcaggctacccagacggctcccccaccccctcccccacccccacccccaccacctgcccctgaacagcaaaccatgcctccacctggatctccctctggcggagctggctctcccggagggctcggcctcgagagcctgtcacctgagttctttaccagtgttgtgcagggagtcctcagttccctgctcggcagcctcggtgcaagagctgggagtagtgagtcgattgctgcctttatacagagattgtctggcagtagcaatattttcgaaccaggggctgacggggcactggggttcttcggggctcttctgtcgctgttgtgccaaaacttctcaatggtcgacgtggtgatgctactacatggccacttccagcccttgcagagactgcagcctcagctgcggagctttttccatcagcattacctgggcggacaagagcctactccgtccaacatcaggatggctacccacacccttattactggcctggaagagtatgttcgggagtcattctccctggtgcaagtgcagccaggagttgatattatcagaaccaatcttgagttcttacaggagcaatttaattccatcgcagcccatgttctgcactgcaccgattccgggtttggagctcgtctgcttgagttgtgcaatcagggtctgttcgagtgtctggcacttaacctgcactgcttaggtggccagcagatggagcttgcggctgttattaacggtcgcatccgaaggatgagtcggggagtgaatccttctctggtcagttggttaaccacaatgatgggcctcaggctgcaagtcgtactggaacatatgcctgtggggccagatgccattctgaggtacgtgagacgcgtgggcgaccctccccagccactaccagaggaaccaatggaggtgcaaggcgctgaacgcgcaagcccagagccccagagagaaaacgctagtcccgcacccggtactactgccgaagaagcaatgagtcgcggacctccacccgctccagagggaggctcaagggatgagcaggacggcgctagcgccgaaacagaaccatgggctgcggctgtcccccctgagtgggtacccataattcagcaggacattcagagccagcggaaagtaaagccacagcccccactgtcagatgcttatctttcaggaatgcccgctaagcgacgaaaaaccatgcagggggagggaccccagctactcctgtccgaagctgtatcccgcgctgctaaggccgctggcgcaagaccactgacctctcccgaaagtttatctagggatttagaggcccctgaagttcaggagtcctaccgccagcaactgcgaagcgacattcagaaaaggctgcaggaggatccgaactattcgccacagcggttccccaacgcccagcgggcttttgctgacgatccgtag

SEQ ID NO: 215865 - DNA, 3489 bp, synthetic construct
  misc_feature 1..3489: note = Description of Artificial Sequence: Synthetic coding sequence
  source 1..3489: mol_type = other DNA
atggagccgaatgattctacttcaactgcagtggaagaacccgactccctggaggtgctggtgaagacccttgatagtcagacaaggacattcatagtgggagctcaaatgaatgtcaaggagtttaaggagcacatcgctgcgagtgtatcgatccccagcgaaaagcagcgcctaatttaccagggccgagtattgcaagacgacaaaaagctgcaagaatacaacgtgggaggcaaagtgatccacttagtggagagagccccaccccagacacatttgcccagtggagcgagttcggggactgggagcgcgtccgccacacatggaggtggcagcccaccgggtacaaggggccctggagctagcgtccacgatcgcaatgctaactcttacgttatggtggggacattcaacctaccgagtgacgggtccgccgtggacgttcacatcaacatggaacaggcccctatacaaagcgagccgcgagtgagactggtgatggcccagcacatgatcagggacatccagactcttttaagccgcatggagtgtcgcggaggacctcagcctcagcattcacagcctccaccacagcctccagcggtcactcctgagcccgtggccctgtcatcccagacgagcgagcctgtagagtccgaggcaccgcctcgggagccaatggaggctgaagaggtcgaggaacgggctccagcacaaaaccccgagctgacccccggtcccgcacccgctggtcccacaccagcacctgagactaacgcccctaatcatcccagccccgctgagtatgtagaggtgctacaggagcttcaaagactggaatcccgccttcagcccttcctgcaacggtactacgaagtgctgggcgcagctgccaccaccgactacaataacaatcatgagggacgtgaggaggaccagcgtctgataaatctcgttggcgagagcctgagattgctgggcaatacgttcgtagccctttccgatctcaggtgcaacttagcttgcacacctccgagacatttgcacgtagtacgtccaatgagccattacaccaccccaatggtgctgcagcaagcggctatcccaatacaaatcaatgtggggaccactgtgactatgacaggcaacggtacacgaccacctccgacaccgaatgccgaggccccacctcccggacctggacaagctagctcggtcgcacccagcagcacgaatgtggaaagcagcgccgaaggggcaccaccaccgggtcccgcaccgccacccgcaacttcgcacccgcgagtgatcaggatttctcatcagagtgttgagccggtggttatgatgcatatgaacatacaggacagcggaacccagccagggggagttccgtcggctccgacaggcccattgggcccacctggacacggtcagacgctcgggagcaccctgatccaactcccaagtttacctcctgaatttatgcatgccgttgctcaccagatcacacatcaggccatggtggctgccgtagcttctgctgctgctggacagcaagttcctggattcccaactgctccaacccgggttgtaatcgccaggcccactcctcctcaggccagaccttcacacccgggaggtccaccagtatcaggaactctgcagggtgcaggcctgggaacaaacgcaagtctagcccagatggtgagtggattggtggggcaactgctgatgcagcccgtactggtcgcccaagggactcccggaatggccccacctccagccccagccaccgcctctgcctcagcaggcaccacaaacacagcaaccacggctgggcctgccccagggggacccgcacaacctcctccaacaccacagccttcgatggccgacctgcaattctcccagctcttgggcaacctcctcggtccagccggacccggagctggaggccctggcgtggcctcccccacaatcaccgtagctatgcctggggtgccagctttccttcaaggtatgacggatttcttacaggctactcagacagctcctcctcccccacccccacccccaccaccaccaccggcaccagagcaacagacgatgcctccacccggatcccctagcggaggtgccggaagccctgggggactcggactcgaaagtctgtcacctgagttcttcaccagcgttgtgcagggtgtactaagttctctgttgggtagtctgggtgcccgagctggctcctcagaatcgatagcggcatttatccagagattgagcggaagttctaacatcttcgaacccggagccgatggcgctcttggctttttcggggctctactgtccctgttatgtcagaattttagcatggtcgacgtggtcatgctgctgcatggtcatttccagcccctacagaggctccagccacaactcagatcttttttccaccagcactatctggggggtcaggaacctaccccttccaacatccggatggctacccatactttgatcaccgggctcgaggagtacgtgcgggaatctttctctctggtgcaggtccagccaggagtcgacatcatccgcacaaatcttgagtttttacaggaacaatttaactccatcgcagcgcacgttcttcactgcaccgattcaggattcggagctcgactgctagaactgtgtaaccaaggcctttttgaatgtcttgcactcaatttacattgcctcgggggacagcagatggagcttgctgctgttattaatggccgaatcagaagaatgagccgtggtgtcaacccaagtctggtgagttggttaaccactatgatgggactcagattgcaggtcgtgctggagcatatgccagtgggaccagacgcaatattgcgctacgtacggagggtgggcgacccacctcaaccactacctgaagagccgatggaggtgcagggtgcagagagggccagcccggaaccccagagagagaacgcatcccccgcaccaggtaccactgcagaggaggccatgagcaggggcccacctccagccccagagggcggaagcagagatgaacaagacggcgcatccgcagaaactgagccctgggctgccgcagtaccacccgagtgggtgccgatcatacaacaggatattcagagtcagcgcaaagtcaaaccccagccgccactctccgacgcttatttatctggaatgcctgctaagaggcggaagaccatgcaaggggagggcccacagttgttgctgtccgaggccgtctccagggcagccaaagcagcgggtgctagaccgctcacttctcccgaaagcctttctcgggaccttgaggctcccgaagtacaggaaagttaccgacagcaattacggagcgacatacagaagcgtttgcaggaagatccgaattatagcccacagaggtttccaaacgctcagcgcgcatttgcggacgacccgtag

SEQ ID NO: 215866 - DNA, 3489 bp, synthetic construct
  misc_feature 1..3489: note = Description of Artificial Sequence: Synthetic coding sequence
  source 1..3489: mol_type = other DNA
atggaacctaatgattccaccagtacagccgtggaggaaccagattccctagaggtcctcgtcaagacgcttgactcacaaacacgcaccttcatcgtgggtgcccagatgaatgtgaaagaattcaaagaacacattgcggcatccgtatcaattccaagcgaaaagcagaggcttatctatcagggtagagtgttgcaggatgataagaagctgcaggaatacaacgtggggggtaaggtgattcacctggtggagagagcccctcctcagacacacctgccttcgggagcaagcagtggtaccggaagtgccagcgccactcatggaggtgggtcgcctccaggcactcgcggtcctggcgcttccgtccatgatcgcaatgctaacagttatgtgatggtcggaactttcaatctgcccagtgatggtagcgccgttgacgtccacatcaatatggaacaggcccctattcagtcggaaccgcgtgtgagacttgtgatggcccagcatatgataagggacattcagactttgttgtcaagaatggagtgtcgcggagggccacaaccgcagcactctcaaccccctccacagccgcctgcggtgacgcccgagccagtcgctctgagctctcagacgtcagaacccgtagagtctgaagccccacccagggagcctatggaagcagaggaggttgaagaacgtgcacctgcacagaatccagagctgacaccagggcctgcacccgcaggacctacccctgccccagagactaacgcacccaaccatccctcccccgcagaatacgtcgaggtgttgcaagagctccagcgcctggaatcccgactccaaccttttctccaaagatactacgaagtcctgggcgcagctgcaaccactgattataataataatcacgaaggtcgggaggaggatcagagattaattaatctggtcggggaaagccttagactcctgggcaatactttcgttgccctcagtgacctgagatgcaacctagcctgcactccacccaggcacctccatgtcgtccgtcctatgagtcattacactaccccaatggtgctgcagcaggcggctattccaatccagattaatgttggaacgaccgtgactatgaccggtaacggaacacgccctccccctactcccaacgccgaggcaccacctcctggtcccggacaagcaagcagcgtggccccaagcagtacgaatgtggagagctcggctgaaggcgctccaccccctggtccagctccgccaccagctacgtcccacccacgcgtgatccgtatttcccaccaatctgttgaaccagtggtgatgatgcacatgaacatacaggactccgggactcagccagggggtgttcctagcgcgccaacaggaccgctcggaccacccggacacgggcagaccctgggatctacgttgattcaactcccttcactccctccggaatttatgcacgcggtggcgcaccaaataactcatcaggccatggtggctgcagtcgcttctgccgcagctgggcaacaggttcctgggtttcctacagctcccactcgggtcgtgatcgcaaggcctacacctccccaggcacgccctagccaccccggtggcccacccgtttctggtacactccagggagcaggcctcggcactaacgctagccttgctcagatggtatccgggttggttggtcagcttctcatgcagcccgtgctcgtggcccagggtacacccggtatggccccaccccctgcccctgctaccgcctccgctagtgccggtacaaccaatactgccacaaccgcagggcctgcccctgggggacccgctcagccgcctcccactccacagccttctatggccgacctgcaattcagccaactgttggggaatttgctagggccagccggtcccggagctggcggaagcggtgtcgcttctccgacaatcaccgtagctatgcccggagtgcctgctttcctgcaagggatgactgactttctgcaggctactcagactgcccctcctccccctcccccaccccctcccccaccccctgccccagaacagcagacaatgccccctcccggttctccttccggcggtgcaggctcccccggaggcttgggccttgagtctctctcacccgagttcttcaccagcgtcgtccaaggagtactgagctccttgctgggctctctgggtgccagggcgggatcctctgagtctattgccgctttcattcagagattaagcggatccagtaacatcttcgagcccggagctgacggcgcattgggcttcttcggcgctctactgtctcttctctgtcaaaacttctccatggtggatgtcgtcatgctgctgcatggacatttccagcctctccagagactccagccccaacttagaagctttttccaccaacactatctcggcggacaagaaccgactccctcaaacattaggatggctacacacactctcatcaccgggcttgaggagtatgtgcgcgaatctttctctctcgtgcaggttcagcctggtgtcgacatcatccgtacaaatttagagtttctccaagagcagttcaactctatcgcggctcatgtactccactgtactgacagcggctttggggctaggctcctggaactgtgcaatcagggactcttcgagtgtcttgcgttgaacttacattgtctcggcggacaacaaatggaattggccgcagttatcaatggaagaattaggcgtatgtctagaggggtcaatccctctctggtaagctggctcacaactatgatgggcctgagactgcaagtggttctggagcacatgcccgtgggcccagacgccatcctgagatatgtgaggagggtgggcgatcccccacaacccttaccagaagagccaatggaggtgcagggtgccgagagggcctcccctgagccccagcgggaaaacgccagtccagctcccggaaccacggcagaagaggccatgtctaggggaccacctccagcccctgaaggtggaagccgcgacgaacaggacggagcttccgccgagacggagccctgggcggctgccgtgcctcccgagtgggtgcctatcattcagcaggatatccagtcccaacggaaggtcaaacctcagcctccgctgtccgatgcttacctgagtggcatgcccgcaaagaggagaaaaaccatgcagggcgaaggaccccaacttttgctgagtgaggctgttagtagagccgcaaaggcagcaggcgcacggccactgacgagtcccgagtccctctctagagatttggaagctcctgaggtgcaggagagttacagacagcagcttaggtcagatattcagaagcggttgcaagaggatccgaactattctccccagagattccccaatgctcaacgggcattcgcagatgacccctag

SEQ ID NO: 215867 - DNA, 3234 bp, synthetic construct
  misc_feature 1..3234: note = Description of Artificial Sequence: Synthetic coding sequence
  source 1..3234: mol_type = other DNA
atggagcccaacgatagcacaagcacagcagtagaggaacctgatagcctggaggtccttgtcaagacacttgactcccagacacgaacctttatcgtaggggctcagatgaatgttaaggaattcaaggaacacatagccgcttctgtgtccataccaagcgagaagcagcgcctgatttaccaggggagggtgttgcaggacgataagaagctgcaggagtacaatgtggggggaaaggttatccacctggtcgagagggcaccaccccagacccatctaccttctggagcctccagcgggactggctccgccagcgccacacacgggggagggtctccacctggtaccaggggcccaggtgcttctgttcatgaccgcaacgccaatagttacgtaatggtgggcactttcaaccttccttcagatggtagcgcagtcgacgtgcacatcaatatggagcaggctccaatccaatccgaaccgagggtcagactggtgatggctcagcacatgatcagagatatccagacgctgctgagccgcatggaatgccggggaggccctcagccccaacactcgcagcctccaccgcaaccccctgctgtgacgcccgagcctgtggctctgtctagtcaaacttctgaaccagtggagtctgaagccccacccagagaaccaatggaagcagaggaggtggaggagagagctccagctcagaatccagagcttacccccggacctgccccagcaggtccaacgcccgcaccggagacgaatgcccctaaccacccctctccagcagagtacgtggaggtgctccaggagctccaacgactggagagcaggctgcagccgttcctgcagcgctattacgaagtgttgggagctgccgctacgacagactataacaataatcatgaagggagagaggaagaccagcgattaataaacctcgtcggcgagagtttaaggttgctcggaaacacattcgtcgcactgtctgatttgcggtgtaatctcgcctgtacaccaccccgtcatctgcacgttgttagacctatgagccactacactacacccatggttttgcagcaggcggctatccccattcagatcaacgtggggactaccgtcacgatgactgggaatggcaccaggcctccgccaacacctaacgccgaggcccctccgcctgggccaggccaggcctctagcgtcgcacctagcagcactaatgtggagagttctgccgagggcgctccccctccagggccagccccacctcccgctacaagccacccaagggttatcaggatttctcaccaaagcgtggagccggtggtgatgatgcatatgaacattcaggacagcggaacgcaacccggaggcgtcccttccgctcccacgggtccactgggcccaccaggccatgggcagacgttaggtcagcaggtccccggttttccaaccgcgcctactcgcgtcgtgatcgcacgacctactcctccgcaggcaaggccttcacacccaggagggcctcccgtctcgggcaccctgcaaggcgcaggcctcggaacaaacgcctccttagcccaaatggtgtcagggctcgtcgggcaactcctgatgcagcccgtgctcgtggcgcaggggaccccaggcatggctcctcctccagcgcctgcaacagcttcagcatctgccggaacaactaacacggccaccaccgccggtcctgccccaggaggcccagcacagccaccccctacccctcagccatcgatggcagacctgcagttcagtcagctcctgggaaatctgctaggacctgctgggcctggagccggaggacccggagttgcttcccccaccatcactgtagccatgccaggcgtgccagcctttctgcaggggatgacagactttctgcaagctacgcagaccgcacctccacccccacctccccctcccccaccccctcccgctcccgagcaacaaaccatgccaccaccgggatcgccttcaggtggagcaggatcacccggaggattagggctggagagcctctctcccgagttttttacatctgttgtacaaggagtccttagctcactgttgggatccctaggcgctcgcgcaggctcctctgagagtatcgccgcatttatccagcgactgtcaggtagctccaatattttcgaacccggagcagatggggctctggggttttttggggcactgctgagtctgctgtgtcagaacttttcaatggtggacgtcgtgatgctgctccacggacactttcagccactgcaacgactgcagcctcagctgcgatctttcttccaccagcactacctgggcggacaggagcctacccccagtaatatccgcatggccacccataccctgatcactggcctggaggagtacgtgagggagagtttcagtctggttcaggtacagccaggcgtggacatcatccgcacgaacctggaatttttgcaggagcagttcaactccattgccgctcacgtgctccactgtacagattccggattcggagcccgattgctggagctttgtaaccaaggactcttcgagtgtctcgctctgaacctgcattgcctcggaggccagcagatggaactagcggctgtaattaatgggagaattaggcgtatgtcaagaggcgtgaatccctccctggtgagctggctgacaacgatgatggggttgcgccttcaggtcgtcctggaacacatgccagtgggaccagatgcaattttaaggtatgtcaggagggtcggggatccccctcagcctctgccagaggaaccaatggaggttcaaggagctgagagggccagccccgagccccagagagagaatgcatcccccgcacctggcactactgcagaggaggctatgtcacggggacctccccctgcgcctgagggcggatccagggacgaacaagatggggcttccgctgaaaccgagccctgggccgctgcggtccccccagaatgggtgcccatcatacaacaggacatacagagccagagaaaagtgaaaccccagcctcccctgtccgacgcctacttatccggaatgccagccaaacgcaggaaactgcggtccgacatacagaaaaggctccaggaggatccaaattattccccacaacgctttcccaacgcacagagagcgtttgcagacgatccatag

SEQ ID NO: 215868 - DNA, 3234 bp, synthetic construct
  misc_feature 1..3234: note = Description of Artificial Sequence: Synthetic coding sequence
  source 1..3234: mol_type = other DNA
atggagcctaatgattctacatcgacagccgtcgaggagcctgactccctggaagtgctggtgaagacactggacagccagacaaggacattcatagtgggcgcacagatgaacgttaaggaattcaaggagcacatagctgcttcagtcagcattcccagtgagaaacagagactgatttatcaggggagagtattgcaggacgacaaaaaacttcaagaatacaacgtgggcggaaaagtgatacacctcgtcgaacgcgcaccccctcagacgcacctgccctcaggcgcaagttctggcacggggtctgcctcggcaacccacggcggaggttccccccctggcacccgaggaccgggtgcttctgtccacgatcggaacgccaacagctacgtgatggtgggaactttcaatctcccctcagatggatcagcggtcgatgtgcatatcaatatggaacaagccccaatccagtcagagccacgtgttagactggttatggcacaacatatgattcgcgatatccagaccctgctctcccgcatggaatgcagggggggaccccagccacagcactcacagcccccaccacagccccctgcagtgacgcccgagcccgtggccctgtctagtcaaacatccgaaccggtggaaagcgaggcccctccgagggagccgatggaggcggaagaagtcgaagagcgggcaccagcgcagaatcccgaattaacacccggaccagcacccgctggtccgactcctgccccagaaactaatgcccctaatcacccttcccctgccgaatacgtagaggtcttgcaagagctacagaggctagagagtagactccagcccttcctccagaggtactacgaagtactgggagccgctgctactaccgactacaacaacaaccacgagggcagagaggaggatcagaggctgatcaatttagttggagagagcctacgtctgctgggcaacacatttgtggcgctgtctgacctacgatgtaatctagcatgcacccctccaaggcacctccatgtggttcgcccaatgtcccattacacaactcccatggtcttgcagcaggccgcaattccaattcagattaacgtggggaccacagttaccatgaccggaaacggtaccaggccaccccctacccccaatgcagaagccccacctcccggaccgggacaggcctcatcagtcgccccatccagcactaacgtagagtcgtccgcggaaggggctccccctcccggacctgccccaccccctgccacaagccatcccagggtaattcgcatctctcaccagagcgttgaaccagtggtcatgatgcacatgaacattcaggattctggaacccaacctggaggggtgccaagcgcacccacgggacccttgggtccccctggacatggacagaccctgggtcagcaggtgccgggtttccccaccgccccaactagagttgtcatcgccaggcctactccaccccaagcccgtccatctcaccctggcggaccacctgtctctggtactttgcaaggtgccggtttgggcaccaacgctagcctggcacagatggtctcagggctggtgggacagctcctgatgcagccggtcctggtggcccaagggacaccgggaatggcaccacctccagcgccagcaactgcttcagcaagtgctggcacaactaatactgccacgaccgcgggtcctgcacctgggggtccagcgcaaccaccgcctaccccccaacccagcatggccgacttacagttttcacagttgctggggaacctgctcggacccgctgggccaggggctgggggatctggagtggcgagtccaaccatcactgttgccatgcccggagtccctgccttcctccaggggatgaccgattttctgcaagcaacccagaccgcgccaccacctcccccaccgccacctcccccaccccctgctccagagcagcagaccatgccccctcctggttccccatcgggcggagcaggcagccctggtggcctgggcttggagtcattgtccccggagttcttcactagtgtcgtccagggcgtcctttcctctctcctgggctcacttggcgctagagcaggaagtagtgaatcgatagccgcatttatccagagactgtccggctcaagcaacatttttgaaccgggagcagatggtgcccttggattcttcggggctttactgagtctgctgtgccaaaatttctctatggtggatgtagtgatgctgctacatgggcactttcaacctttacaacgcctccaacctcagctgagaagcttcttccatcagcactaccttggaggacaggagcccaccccaagtaacatccgcatggccactcatactctgatcaccgggcttgaagagtatgtgcgggaatcattttccctggtgcaggtacaacccggtgtggatataattaggacaaatttagagttcctccaagaacagttcaattccattgccgctcatgttctgcactgtaccgatagcggattcggagctcgactcctggaactctgcaaccagggccttttcgagtgcctcgctcttaacctccactgtctggggggtcaacagatggagcttgcggcagttattaatggcaggatcagacgaatgagccgcggagtgaatccctctttagtaagctggcttacaaccatgatgggcctcaggcttcaggtggtcctggaacacatgcctgtcgggccagatgctatcctaaggtacgtacggagagtgggggatccacctcaaccactgccagaggaacccatggaggttcagggggctgaaagagcatcccccgaacctcagagggaaaacgccagtccagcccctggcaccacagccgaagaagcaatgagtagaggccctcccccagcacctgaggggggttcacgggacgaacaagatggagcatcagcagaaaccgaaccctgggcagccgcagttcctccagaatgggtaccgatcatacaacaggatattcagagtcaacgcaaggtcaagccccagccacctctttcagacgcttacctgtctggtatgcccgcaaaaagacgcaagctcaggtcagacattcagaagcgcctgcaggaggatccaaactacagtcctcagcgtttccccaatgcacagcgggcatttgcagacgatccatag

SEQ ID NO: 215869 - DNA, 2712 bp, synthetic construct
  misc_feature 1..2712: note = Description of Artificial Sequence: Synthetic coding sequence
  source 1..2712: mol_type = other DNA
atggaaccaaacgacagtactagtacggctgtcgaggagcctgatagtcttgaagtgctagttaagaccctggactctcagacgcgcacctttatagtaggggctcagatgaacgtgaaagagtttaaagagcacatcgctgctagcgttagtattccgtcagaaaagcagaggctgatttatcagggccgagttctacaggatgacaaaaagctccaggagtacaacgtgggcggaaaggtcatccaccttgtggagagggctccgcctcagactcatttacctagcggggcttcttctggtacagggagcgcctctgccacccacggcggaggcagcccacctggtacccgaggacccggagcatcagtccatgaccggaatgcaaatagttatgttatggtagggacttttaacctccctagcgatggcagcgcggttgacgtgcacatcaacatggaacaggctccaatccagagtgagccaagggtgagactggtgatggcccaacacatgatccgtgacattcagactcttctgagtaggatggaatgtagggggggtccgcagcctcaacattcccaaccacctcctcagccgcctgctgtgacacctgagcccgtggccttaagttctcagacgagcgagccggttgagtcagaggctccacctagggagcctatggaggccgaggaagtcgaagaacgggcacccgctcaaaaccctgagcttactccagggcctgcccctgccggtcctaccccggcaccggaaaccaatgcgcctaaccacccctcccccgctgagtatgttgaggttctgcaggagctgcagcgtttggagagccgcctacagccttttttgcagcggtactacgaagttctgggcgcagccgcaaccactgattataacaataaccatgaaggaagggaggaagatcagcgactcattaatttggtgggggaaagcctccgactacttggaaataccttcgtggccctgtcagacttgcgctgcaatctcgcctgtacacctccaagacacctgcacgtggttaggcctatgtctcactacactacacccatggtcctgcagcaggcagccatccctatccagatcaatgttggcactaccgtgaccatgacagggaacggaactagacctccacccacccccaacgcagaggcccctcctcccggtccaggtcaggccagcagcgtcgcacccagctctacaaatgttgaatccagcgctgagggggcaccaccacccggtcccgcacctccacctgcaacttctcaccccagagtgatcagaatctctcaccagtctgtggagccggtagtcatgatgcatatgaatatccaggatagcggaacacaaccgggaggggtcccctcagcgcctacgggacctctgggacccccaggtcacggacaaacactgggccagcaggtacctggattccctactgctcccacgagggtcgttatcgcccgtcctacaccaccccaggctcggccatcacaccctggaggcccaccggtctcaggtactttaggtgctggactggggaccaatgcgtccttagcgcagatggtttcagggctggtgggccaactacttatgcaaccagtcctggtcgcccagggtactcccggtagccccggaggcctcgggttggagagtctctcccctgagttttttacatcagttgttcagggcgtcttgagctccttgttgggctccctcggagcaagagccggaagctccgaatccattgccgcttttatccagcgcctgagtgggagctcgaacatctttgagccaggagcggacggtgctctcggtttctttggggcactgctctccctgctttgtcagaactttagcatggttgatgtagtaatgctgttgcacggccactttcagccgttacagcggttgcagcctcagctgcgaagtttcttccaccagcattaccttggaggccaggagcccacgcctagcaatatcaggatggccactcataccctcatcacaggacttgaggagtatgtgcgcgagagcttttctctggtgcaagtgcagccgggtgtagacataattagaaccaaccttgaattcctgcaggaacaattcaacagtattgctgcgcatgtgctgcactgcaccgactccggcttcggggcacgattgctggagttatgcaatcagggcctatttgaatgtctggcactcaaccttcattgcctaggtgggcagcagatggagctggctgccgttattaatgggaggattaggcggatgtccagaggcgtgaatccctcgctggtgagttggttaacaactatgatgggactccgtctgcaggtcgttttagaacacatgcccgtcggcccagatgcaatactgagatatgtgcgcagagtcggggacccccctcagcctctgcccgaggagcctatggaagtgcagggcgcagaaagggctagtccagaaccccaggaatgggtgccgatcatacagcaggacattcaaagtcaacggaaggtgaagccccaaccgccattatcagatgcttacctgtcgggcatgcccgcaaagcggagaaagctgagaagtgacatccagaagaggctgcaggaggaccccaattatagccctcaacggttccctaacgcgcagagagcatttgcagacgacccctag

SEQ ID NO: 215870 - DNA, 417 bp, synthetic construct
  misc_feature 1..417: note = Description of Artificial Sequence: Synthetic coding sequence
  source 1..417: mol_type = other DNA
atgaaggagtatagcggattcgcaggagtgtccaggccgcgtggcacttttttccggattcggggtcgaggcagggcacgtggggtgttcgctggaacaaataccggaccaaataactctaacacaactttccagaagagaccgaaagaagaagagtgggacccagaatacacccccaagtctaagaagtactttctgcacgacgatcgggatgatggtgtggactattgggcgaaacgagggaggggacgcggaacgttccaaaggggcaggggccgtttcaattttaaaaagagcggctccagccccaaatggacgcacgataaataccaaggggacggaatagtcgaggatgaggaagagaccatggaaaataatgaagaaaaaaaagataggaggaaagaggaaaaggagtag

SEQ ID NO: 215871 - DNA, 2610 bp, synthetic construct
  misc_feature 1..2610: note = Description of Artificial Sequence: Synthetic coding sequence
  source 1..2610: mol_type = other DNA
atgggcagatctaactcccgcagtcactcctcgcggagtaagtctcgttcacaaagctcctcgcggagtcggagtagatcccatagcaggaaaaaaagataccgtagtcgatctagaacctactcgcggtcccgatctcgcgatcggatgtatagccgcgactaccgtagggattaccgaaataatagaggtatgaggcggccatacggctatcgtggcaggggacggggttattaccaggggggaggcggtcgctatcataggggaggttataggcccgtatggaacaggcggcattccaggagcccacgcaggggcaggtcccggtctcggagtcctaaacgacgtagcgtgagttcacagcggtcacggtctagatctcgtaggtcctacaggtcatcaaggtcccctaggtccagcagtagcaggtcaagttccccttactctaaaagccctgttagcaaaaggcggggttcacaagagaagcaaacaaaaaaagctgaaggggaaccgcaagaagagtctcctctcaaaagcaaatcccaagaggagcccaaagacacctttgaacacgatccttccgagtccattgacgagtttaacaagagcagtgcaacaagtggagacatatggcctggactgagcgcctacgacaattcccccagatctcctcattccccttctcccattgccactcctccctctcagtctagttcttgtagtgacgcccctatgttgagcaccgtgcattcagccaaaaacactccgagccaacattcccactcaattcagcacagtcctgagcggagtggttccgggtcagtgggcaatgggtcgagtcgatacagtccctcccagaactcccctattcatcacatcccaagtaggcgctctcccgctaagaccattgcgcctcagaacgcccctcgggacgaaagtcgcggacgttcctcattttatcctgacggtggcgaccaggagactgctaagaccggaaagttcctgaaacgctttactgacgaagaaagtcgcgtgttcttgctcgatagaggcaatacgagagacaaggaagcaagcaaagagaagggcagcgagaaggggcgtgctgaaggcgaatgggaggaccaagaagcactggattatttttcagacaaagagtctgggaaacagaagttcaatgatagcgagggcgatgacactgaggaaactgaagactaccgccaattccgtaaaagtgtgttggccgaccaaggtaagagttttgccacagcgtcccatagaaacacggaggaagaaggcctcaaatacaaatccaaggtgtcattgaaggggaatcgtgagagcgacggctttcgtgaggagaaaaattataagctcaaggagacagggtatgtcgttgagcgtcctagtactacgaaagataaacacaaggaagaagacaagaacagcgaaaggattaccgtgaagaaagagacacagtctcctgaacaggtaaagtctgaaaaattgaaggacctcttcgattatagtcccccactacacaaaaatttagatgctcgggaaaagtccacatttcgggaggaatcaccactccgcatcaagatgatcgcatctgactcacacaggcctgaagtgaaactgaagatggcccctgttccgctcgacgactcaaatcgccctgccagtctcaccaaagatcgattactggcctcaacactggttcactcggttaaaaaggagcaggagtttaggtcaatttttgaccacataaaattgccgcaggcgtctaaaagcacctctgagtcatttattcagcacattgttagcctcgtccatcacgtgaaggaacagtacttcaagtccgctgccatgacacttaacgagagattcacgtcttaccaaaaggcaaccgaagagcatagcacacgccagaaaagccccgagatccacagacgtatcgatatatcaccttctacactccgtaaacatacgagactagccggagaagaacgcgttttcaaagaagaaaaccagaagggggataagaagctgcgatgtgacagcgcagacttgaggcacgacatcgaccggcgacgaaaagagagaagcaaggaacggggagacagcaaggggtcacgggagtcaagtggctctagaaagcaggagaagactcctaaggactacaaggagtataagtcttataaagatgactctaaacataagcgggagcaggatcacagccgctcatcctcctcatcagcgagcccctcttcacccagttcacgggaagagaaagagagcaaaaaagagagagaagaggagtttaagacacaccacgagatgaaagagtattccggctttgccggtgtgagtaggccgagagggacatttcatgatgaccgcgatgatggggtggattactgggctaaaagggggagagggaggggcacatttcagcgaggcagggggagattcaacttcaaaaaaagtggaagcagcccgaaatggacccacgataaatatcagggggacggtattgtggaggacgaggaagaaacaatggaaaataacgaggagaaaaaagataggcggaaagaggagaaggagtag

SEQ ID NO: 215872 - DNA, 2610 bp, synthetic construct
  misc_feature 1..2610: note = Description of Artificial Sequence: Synthetic coding sequence
  source 1..2610: mol_type = other DNA
atggggaggagcaattcgcggagccactccagcaggtcaaagagcagatcgcagagttccagccgcagccgttcacgaagccacagcaggaaaaagagatacagatccagatcccgcacctactcccggtctcgctctagggaccgcatgtactctcgcgactatcgtagggattaccgcaacaacagaggaatgcggagaccgtacggatacagggggaggggaaggggttattaccaaggcggtgggggacggtaccaccgaggaggctatcggccagtgtggaataggagacacagtcgtagtccacgcaggggtagaagcagaagccgcagccccaagagacgctccgtgagttctcagagatctagatccagatcccggcgtagttacagaagctccagaagccctcgcagctcttcctctcgttcctctagtccatatagcaaatccccggtgtctaagagacgaggctcccaggagaaacagacaaagaaagccgagggtgagccccaagaggagagtcccctcaaatctaagtcacaggaagaacctaaggatacattcgaacacgacccatcagagagcatagatgaattcaacaagagcagcgccacctctggcgatatttggccgggactgtctgcgtacgacaattcccccagaagccctcactctccgtcccccatagctaccccaccttcacagtcctcttcctgtagcgacgcacccatgctctcaactgtccactccgcgaagaatacccccagccagcattcacacagtatacaacatagtccagagagaagtggctcgggctccgtgggcaatgggtccagtcggtactctccttcacaaaattcccccatacatcacatccctagcaggaggtcccctgctaagaccatcgcccctcagaatgccccacgggacgaatcacgaggaaggagttcattttacccagacgggggtgatcaggaaacggccaagaccggaaaatttttgaagagattcaccgacgaggaatctagggtgttccttctcgacagggggaacacaagggataaagaagcctctaaggaaaaaggcagtgaaaaagggagggcggagggcgagtgggaggatcaggaggctctggattacttctcagataaggagtccggtaaacaaaaatttaacgactcggagggcgatgacactgaagagaccgaagattatcggcagttccgcaaaagcgtccttgcagaccagggaaagagttttgcaacggcaagccatcgaaacacagaagaggaggggctgaaatataagagtaaagtgtctctcaaaggcaatcgggaatctgacgggtttagggaggaaaagaattacaagttgaaagaaacaggatacgtggtcgaacgaccatctaccacaaaggacaaacataaggaggaggacaagaattccgagagaatcacagtgaagaaggagactcaatcccctgaacaggttaaatcggagaagctgaaggacttgttcgactattctcccccactccataagaatttggatgcccgtgaaaaaagtacctttagggaagaatcgccactacgaataaaaatgattgcgtccgactcccataggcccgaggtcaagctgaagatggcacccgtgccactagatgatagcaatcgtcctgccagcttaactaaagatcgcctgctcgcatcgacactcgtgcacagtgtgaaaaaggagcaagaatttcggtcgatctttgatcatatcaaattgccccaggcctcaaaatctacctctgagtccttcatacaacatatagtctcactggtccaccatgtgaaggaacagtacttcaagtctgcggctatgacactgaatgagagattcaccagctaccagaaagctacagaggagcactccacacgccaaaagtcgccagagatacatcgccgaattgatatttctcccagcactcttagaaaacacacacgcttggcaggcgaggagagggtgtttaaggaggagaaccagaaaggggacaaaaaactgaggtgcgatagcgcagacctgcgccacgatatcgatcgcagacgaaaggagaggtcaaaggaacgcggagatagcaagggaagccgcgagtcatccgggtcccgaaagcaagaaaagacaccgaaggactacaaggagtacaaatcatacaaagacgactcgaagcataaacgggagcaagatcacagcaggtctagctccagctcagcatctccatccagcccatcgtctagggaagagaaggagagcaaaaaagagcgtgaagaagaatttaaaacgcatcacgagatgaaggaatatagcgggttcgctggcgtgagtagacccaggggtacatttcacgacgaccgagacgatggtgtggattactgggcaaagcgtggcaggggacgcggtactttccaaaggggcagggggagattcaactttaagaaaagcggttcctcccccaagtggactcatgataagtatcagggcgacggcattgtggaggatgaggaagaaacgatggaaaataatgaagaaaaaaaagatcgtcgcaaagaagaaaaggaatag

SEQ ID NO: 215873 - DNA, 2757 bp, synthetic construct
  misc_feature 1..2757: note = Description of Artificial Sequence: Synthetic coding sequence
  source 1..2757: mol_type = other DNA
atgggacgctctaatagtcgatcccacagctcccgatcaaaatcacgttcacagtcttcatcccggtccagaagccggtcccatagtcggaagaagaggtatagaagccggtcccgcacctactctcgctcacggagccgggaccggatgtactcacgggattatagacgagattaccgaaataacagaggtatgagacgcccatacggttacaggggtcggggtagaggctattaccaggggggaggaggacgctaccataggggagggtacagaccagtgtggaaccgccgacacagtagatcccccagacgtggccgttcacggtctcgcagccccaagcggcgttccgtctcttctcaaagatcacggtcacgctctcggagatcttacagaagtagcagatcaccaagaagtagctcctcccgttcgtcctcaccatattcaaagtcccctgtgtcaaaacgacgcggatcccaggaaaagcaaaccaagaaggctgaaggcgagccccaggaggaatctcccctgaaatctaaaagtcaggaggaaccaaaagacacatttgaacatgatccttctgagtccatcgatgagttcaacaagtcctccgcgacaagtggtgatatctggccgggtctgtctgcctatgataattcaccacgcagcccacattcaccaagcccaatcgcaacccccccatcccagagcagctcttgtagcgacgccccaatgctgtcaaccgtgcattccgcaaagaacactccgtcccagcattcccacagcatccaacacagccccgagcgctcagggtccggctcggtgggaaatggcagctccaggtattcccctagccagaacagcccaattcaccacatccctagcaggagatctcctgctaaaacaattgcgccacaaaacgcccctcgcgacgaaagccgcggtcgctcatccttttacccggacgggggtgaccaagagacagctaaaaccggcaagtttctgaagcgcttcactgacgaggagtcgagagtgttcctgcttgaccgcggaaacacacgggacaaggaagccagcaaagagaaaggctcagagaaggggagggccgagggagagtgggaggaccaggaagctttggactacttcagcgataaggagtccggcaagcagaagtttaacgacagcgagggtgacgataccgaagagacagaggattacaggcagttcagaaagagcgttttagcagaccagggtaaaagtttcgccacagcctcccacagaaacacagaggaagaaggcctgaaatataaatctaaggttagtttgaaaggaaacagagagtctgatggcttccgggaagaaaaaaactataaactgaaagaaacagggtatgtggtggaacggccttcaactaccaaggacaagcataaggaggaggataaaaactctgaacggatcacagtcaagaaagaaactcagagccctgaacaggtcaagagtgagaagttaaaagaccttttcgattactccccccctcttcacaaaaacctggacgcacgggagaaatccacatttcgagaagagagtcccctgcgcattaaaatgatcgcctcagatagccatcgacctgaagtgaagctgaagatggcgcctgtgcccctggatgactccaacagacctgccagcctcacaaaggatcggctactggccagtactttagtgcatagcgtgaaaaaggagcaggagttcagaagcatattcgatcacatcaagctcccacaagcgtcgaagagcacatccgagagctttattcagcacatcgttagtctggtacatcatgtcaaagagcaatactttaagtccgccgctatgacgctcaatgagaggtttacctcgtaccagaaggctacggaggagcattcgacccggcagaagagccctgaaattcataggcgaatcgatatctctcctagcaccctgaggaagcataccagactagctggcgaggaaagggtcttcaaggaggaaaaccagaagggcgacaagaagttgcgctgtgatagtgctgacctacgtcatgacattgataggagacgcaaagagaggtccaaagagcgcggtgattctaaggggtcacgggagagcagcgggtctaggaagcaggagaaaacccccaaggattacaaggagtacaaaagctataaagacgatagcaagcataagagagagcaggatcacagccgaagcagcagttccagcgcatcaccaagctccccaagctcgcgcgaggagaaagagtccaagaaagaacgcgaggaagagtttaagactcaccatgagatgaaagagtactccggcttcgcaggtgtgtcccgccctagggggaccttcttccggattagaggacgaggaagagccagaggcgtctttgcagggacgaacacgggaccaaataacagtaacactacattccagaagcggcctaaggaggaagagtgggatccggaatataccccaaaaagcaagaaatacttcctgcacgacgacagagatgacggcgtggactactgggcaaagagggggagggggcgaggcaccttccagagaggaagaggacggtttaattttaaaaaatcggggagctctccaaaatggacccacgataaataccaaggggatggtattgttgaagacgaggaagagacaatggaaaacaatgaagagaagaaagaccgcagaaaggaggaaaaagagtag

SEQ ID NO: 215874 - DNA, 2244 bp, synthetic construct
  misc_feature 1..2244: note = Description of Artificial Sequence: Synthetic coding sequence
  source 1..2244: mol_type = other DNA
atgggccgttccaacagcaggagccatagtagtcgctcaaagtccagatcacagtctagcagtagatcgcgcagtcgttcgcactcacgcaaaaagaggtacagctcacggtctagaagtagaacttactctcgatctagatcgagagatcgcatgtattctcgcgactacaggcgggattaccgaaataaccgtggaatgcgtcgaccttatgggtacagaggtaggggacggggatactaccaaggcggtggtggcagatatcatcgtggaggatatcggccagtgtggaacagacggcacagccggagccctaggcggggtcgaagcagaagcagaagtcctaagaggcggtctgtttcttcacagcgatccaggtctagatctaggcgttcctaccgttcctcgaggagccctcgctcttctagcagcaggagttcttccccctactccaagagccccgtttccaaaagaagaggcagccaagaaaaacaaactaaaaaagccgagggagagccccaggaggagtctccactcaagtcaaaatcacaagaagaaccaaaagacactttcgagcacgatccatctgagagcatagatgagtttaataaatcttccgccaccagcggagatatctggccgggtttgtccgcctacgacaatagcccacgctccccccatagccctagcccaatcgccaccccaccaagccaatcctcgtcttgcagcgacgcaccaatgctttccaccgtgcattctgctaaaaacactcccagtcagcatagccattcaatacagcattccccggaaaggagtggtagcggttcggtgggaaacggtagtagtagatactccccatctcagaacagcccaatccatcacattccctcccgcagatcgcccgctaaaaccatcgccccacaaaacgcacccagggacgagtctaggggtcggagttcattctatcctgacggtggcgatcaggagaccgctaaaaccggcaaattcctcaagtctccacctctgcacaaaaatttggacgcacgcgaaaagtccacatttcgggaagagagtcccctcagaatcaaaatgattgcctccgactcgcaccgcccagaggttaaactgaaaatggctcccgttccgctcgacgatagcaatcggcctgcttcgctcacgaaagaccggctgctggcctctaccctcgtccattcagtaaaaaaagagcaagaatttaggagcattttcgaccacatcaagctcccccaggcctctaaatctacatccgagtctttcatccagcacattgtatcgttggtacaccatgtcaaggaacaatattttaagtccgccgctatgacgttgaatgaacgatttacgagttaccaaaaagcaactgaggagcactcaacacgacagaagtctcctgagatccacagaaggatcgatatttctcctagcaccctgagaaaacacaccaggcttgccggtgaagagcgtgtgttcaaggaagaaaaccagaaaggcgataaaaaactgcgctgcgacagtgcagacctccgccatgacatcgataggagaagaaaagaaagaagtaaagagcggggtgatagcaaggggtcccgcgaaagcagcggctccaggaagcaggagaagacccctaaagactacaaagaatataagtcgtacaaggatgattccaaacacaagcgagaacaagatcactcaaggagcagcagtagcagtgcttctccttccagcccgtcctctagagaggagaaggagtcaaagaaggagcgagaggaggaattcaagacacatcacgagatgaaggagtattccggattcgctggggtgtccagaccgagaggaactttcttccgtatccggggaaggggcagagcccgaggagttttcgctggcaccaacactggccctaataattccaataccacctttcagaagaggcccaaggaggaggaatgggacccagagtacaccccgaagtcaaaaaagtacttcctccacgatgaccgagacgatggcgtggactattgggcgaagcgtgggcgaggacggggaactttccaacggggaagaggcagatttaactttaagaagagtgggtcctccccgaaatggacccacgacaagtatcaaggcgatggaatcgtggaagatgaggaggaaactatggagaacaacgaggagaagaaggatagaaggaaggaggaaaaagaatag

SEQ ID NO: 215875 - DNA, 2763 bp, synthetic construct
  misc_feature 1..2763: note = Description of Artificial Sequence: Synthetic coding sequence
  source 1..2763: mol_type = other DNA
atggggcgttctaacagccgttcgcattcttctcgttccaagtcccgcagccagagctcaagtcgctctagatccaggagccactcccggaagaagaggtactcctccaggagccggtcccgaacgtacagtagaagtagatcacgagatcggatgtactctcgcgattatcggcgtgactacaggaataatcgagggatgcggaggccctacggctacagaggcaggggacgcggatactaccagggagggggtgggagatatcataggggtggctacaggcctgtctggaaccggaggcactcccgttcccctcgcagggggaggagccggtcaaggtcacctaagagacgctcagtctcatcccagaggagtcggtcacgatcccggcgaagctaccgctccagcaggagcccacggtcctcttcatcacggagtagcagcccgtattctaaaagtcctgtgagcaagcgtcgcggatcccaggagaagcagacgaagaaggccgaaggcgaaccccaggaagagtcacccttgaagtccaaaagccaggaagagcccaaagacacttttgagcatgacccaagcgaaagcattgatgagtttaacaaatcgagcgcgaccagcggcgatatttggccgggacttagcgcctatgacaattctccaaggtcaccccattctccaagtcccatagctacccctccatctcaatccagcagctgttcagatgcccctatgctgtcgacggtgcactcagcaaaaaatacacctagccaacacagccattcaatccagcattcccccgagcgatcgggttcggggtcggtgggcaacggaagcagtcgttactccccaagtcaaaactccccaatacatcacatccccagcaggcgatcaccagccaagacgattgctcctcagaatgctccgagggacgagagtcggggtaggagcagtttttatcctgacgggggagatcaagagacagccaagacaggcaagttccttaaacgcttcaccgacgaggaaagccgtgtgtttttgctagacagggggaatacgcgagataaggaagctagcaaagaaaaaggaagcgaaaaagggagggctgagggcgagtgggaggaccaggaagctctggattatttctccgacaaggagtcaggaaagcaaaaattcaacgacagtgaaggggacgataccgaggaaaccgaggactatcgccagttccgtaaaagtgttctggcagatcagggcaagtcatttgctaccgcctcccaccggaacacagaagaggaggggcttaagtacaaatcaaaagtctcactgaaaggtaatcgagagtccgatggtttcagagaggaaaaaaattacaaactgaaggaaacaggatatgtggtggaacgcccttcaacgacaaaagacaaacacaaggaggaggacaagaactccgaacgaattactgtcaagaaggaaacgcagagcccagagcaggtgaaatctgaaaaactcaaggatctgtttgactattcaccccctctgcacaagaatctggatgccagggaaaaatcaacctttcgagaggagagccctctgagaataaaaatgatagcctccgattcacatcgccctgaagtaaagctgaaaatggccccagtgcccttggatgacagcaacagacccgctagtctgacaaaggataggcttctggcctcaactcttgtgcattccgtgaagaaagagcaggaattccgctctatcttcgaccatatcaagcttccacaggcctcaaaatccacttctgagagcttcatccagcatatcgtctccctggttcaccatgtcaaggagcagtactttaaatctgcggctatgaccctgaacgaaagattcaccagttatcagaaggccacggaggaacactcaaccaggcagaagtctccagaaatccaccggcgtattgacatcagcccatctaccttaaggaagcacaccaggcttgcgggtgaagaacgagtgtttaaagaggagaatcagaagggagacaagaagctacgctgcgattcagccgatcttagacacgatatagatagaagaagaaaagagcgaagcaaggaaaggggtgatagtaaagggtcaagggagagcagtggatctcgaaaacaagagaagacgccaaaagattataaggagtacaagtcgtataaggatgattcgaaacacaaaagagagcaggatcattctcgcagctcttcttctagcgcctctcctagcagtccatcgtcgcgggaggagaaggagtcgaaaaaagagagggaagaggaatttaagacacatcatgagatgaaggagtatagcggatttgccggtgtgagccggccaaggggcacatttttccgcattcggggaaggggtcgggcaaggggggtctttgcagggactaacaccggaccaaataattccaacacaacattccagaaaagaccgaaagaagaggaatgggaccccgagtacacgcctaaatcaaagaagtattttttacacgatgacagggatgacggagttgactactgggcaaagcgcggacggggtagggggacatttcagcgcggaaggggcaggttcaatttcaagaaaagcggctctagccctaaatggactcatgataaatatcagggagatggtatcgtagaagacgaagaggagaccatggagaacaacgaggaaaagaaagatcggcgtaaggaagagaaggaatag

SEQ ID NO: 215876 - DNA, 531 bp, synthetic construct
  misc_feature 1..531: note = Description of Artificial Sequence: Synthetic coding sequence
  source 1..531: mol_type = other DNA
atgggtaggccagccggtctgttccctcccctatgcccatttctcggatttcggcctgaagcatgctgggaacggcacatgcagatcgagcgtgctccgtcagtgcctccgtttttgcgatgggccggatatcggcctggtccagtgagacgcaggggtaaggtggagctgattaagtttgttcgcgtgcagtggcgccgtccgcaggttgagtggcgtcggaggaggtggggcccaggacctggcgcttcaatggcaggctccgaagaattggggctgagagaagataccttgcgggtgctagccgcatttctgagacgcggagaggctgccggtagcccagttcccacgccgcctaggccgtcttactcccggctgctgtgcttcggaggacccgcagccggtactgcgggacctcgggctgctgagatatctgcccaaccacggataactggatcacctattgatagagaagggtcccacacggcagaggccggaggcccagccggtgggggaggaagaagccactag

SEQ ID NO: 215877 - DNA, 1005 bp, synthetic construct
  misc_feature 1..1005: note = Description of Artificial Sequence: Synthetic coding sequence
  source 1..1005: mol_type = other DNA
atgggcagaccagcaggactctttccaccactgtgtccgttcttgggcttcagacctgaggcatgctgggaacgccacatgcagatcgagcgcgctcctagtgtgcctccatttttgcgttgggccggatacaggccgggacccgtgagaagacggggaaaggtagagcttataaaatttgtgagggtccagtggcggagacctcaggtggaatggcgcaggagacggtggggcccaggtcccggagcatcaatggcaggaagtgaagaactgggactgagagaggacactctgcgagtgcttgctgccttcctccgcaggggggaggccgctggctcgcccgtgcctacaccaccgaggtctccggctcaggaggagccgactgacttcctgagccgtctgagacggtgtctcccatgttcactggggaggggcgcagcccctagcgagtcccccagaccctgtagcctgcctatcaggccgtgctatggacttgagccaggaccggctacgcccgacttctatgctctcgtagctcagagactcgaacagctggtgcaagaacagctgaaaagtcctcccagtcctgaactgcaaggaccccctagcacagaaaaagaggctatcctgcggcgactggtggccttactcgaagaggaagccgaggttataaaccagaaactggcaagtgaccccgctcttcgatctaagcttgtgcggctgtcctccgactccttcgcgcgtcttgtggagttgttttgcagtagagatgattcttccagaccaagtagggcctgtcccggacccccaccaccatctcccgagcccctcgccaggctggcactcgctatggagctctctcggcgagtggctggcctgggtgggaccctcgcaggcctgagcgtggagcatgtccattccttcaccccttggatccaagcacatggcggatgggagggcattctcgccgtgtccccggttgatttgaatctgcctcttgactag

SEQ ID NO: 215878 - DNA, 1002 bp, synthetic construct
  misc_feature 1..1002: note = Description of Artificial Sequence: Synthetic coding sequence
  source 1..1002: mol_type = other DNA
atgggtcggcctgccggattgttcccccctctgtgcccttttctaggcttccgcccagaagcctgctgggaaaggcacatgcagatcgaacgagctccgtccgtccctccctttcttaggtgggccggatatagaccaggacccgtaaggagaaggggcaaagtggaactaattaaatttgttagagtccagtggagacgcccacaggtggagtggcgacgccgtcggtgggggccaggcccaggcgctagtatggctggcagcgaagagctgggcctgagagaggacaccctgagggtcctggccgcattcctgaggagaggagaggcagcgggaagccctgttccaacaccgccatcaccagctcaagaagaaccaactgacttcctatcacgactcagaagatgtttaccttgtagtctgggcaggggagcagctccttctgagagtccaagaccttgtagtctgcctattcgaccatgctacggcctcgaacctggccctgctacgccagatttctacgccctcgtggcacagcgcctggaacagctggtccaagaacagctgaaatcgccaccctctccagaactgcaaggccctccatctacagaaaaggaggccatactgcggagactggtggcactactggaagaagaagcggaggtgatcaaccagaaattggcctcagaccctgctcttcgatcgaaacttgtcaggctgagctccgattcatttgcacggctcgtggaactgttttgttctagggatgactcatccaggcctagtcgagcctgtcctggcccaccaccaccctctcccgagccattggcgagactggctctagccatggaactgtcacgtagagtggccggactgggcggtactctcgctggcttatctgtggagcacgtgcacagcttcaccccgtggattcaggcacatgggggttgggaggggattttggccgtttctcccgtcgacttgaaccttcccctggattag

SEQ ID NO: 215879 - DNA, 5165 bp, synthetic construct
  misc_feature 1..5165: note = Description of Artificial Sequence: Synthetic coding sequence
  source 1..5165: mol_type = other DNA
atgctctcagctaccccattatatggtaacgttcactcctggatgaactctgagcgcgtgagaatgtgcggggcaagtgaggaccgaaagatccttgttaatgacggagacgccagtaaggcacggcttgagctgcgagaggagaatcctctgaaccacaacgttgtggatgccagcactgcacatagaatcgatggactggctgccttgtccatggatcggaccggcttgatccgcgaaggacttagagtacctgggaacatcgtgtattccagcctgtgtggtcttggtagcgagaagggacgggaggcagcgacatctacactggggggtcttgggttttcctcggagcgcaaccctgaaatgcagtttaagcccaacactcccgagacagtggaagcttccgcagtgtctggtaagccgccaaacggattcagcgcaatttacaaaacacctccaggtatccagaaaagtgccgttgccactgctgaagcccttggtctagacagaccagcctcggataaacagtctccacttaatattaacggggcaagttacctgaggctgccctgggtaaatccatatatggaaggagcaacacccgctatatatcctttcttggattctcccaacaagtattctctaaatatgtataaagccctgctgccacaacagtcctatagcctggcccagcccctctactctcctgtctgcacaaatggcgaacgctttctgtatttgcctcccccacactacgtcggaccacacattcctagttctctcgctagtcccatgcggctgagtactccatcagcgtcacctgcgatcccgcctctcgtgcactgcgctgacaagtcactgccctggaaaatgggggtgagcccagggaatcccgttgacagtcatgcatacccacatatccaaaattccaaacagccaagagtgccctcagccaaggctgttacatctggccttcctggagatactgcattgttgcttccaccgtccccgagacctagcccacgcgtgcatttacctacacaacccgcagcagatacatactctgagttccacaagcactatgcaaggatcagtacgagccccagcgtggccctgagtaaaccttacatgaccgtatcaagcgaattcccagcagctcgcttgagcaatggcaaatatccaaaggcacccgagggtggggagggagcccaacctgtgcctggccacgctaggaagacagcagtacaagacagaaaggacggttcgtctccccctcttctcgaaaagcaaacggtgacaaaggacgtgaccgataaaccattagatctgtcgtctaaagttgtggacgtggacgcctcaaaggccgaccatatgaaaaaaatggcccctactgtcttggtgcacagcagggctgggagcgggctcgttctttccgggtccgaaattccgaaggagaccctttccccaccagggaatggatgcgcaatctacaggtcagagatcataagcactgctccttcaagttgggtcgtccccggtccttcccctaacgaggaaaacaatgggaaaagtatgtctctcaaaaacaaagcactggactgggcaattccgcaacagagaagctcctcttgtccgaggatgggcggaactgatgcggtgatcactaacgtctcaggctctgtaagttctgccggacgcccagctagcgccagccccgcaccaaacgccaacgcagatggtaccaagaccagcagatccagcgtcgaaactacgcctagcgtaattcaacacgtgggtcagcccccagctactcccgctaagcacagctcatcaaccagcagcaagggggcaaaggcatccaacccagaacctagctttaaagcgaatgagaatggtctgcctcctagttcaatatttttgtctccgaatgaggccttccggtctccccctattccatacccccgtagctacctcccttatcctgctccagaggggatcgctgtgtctccgctgtctctgcatggaaaaggcccagtgtacccccacccggtgctgctccctaacggttctttgtttccgggacacctggcccctaagcccggactgccgtatggcttgcctacaggcaggccggagttcgtgacttatcaggacgcactcggtttgggaatggtacatccgatgttgatccctcacaccccgatagaaattaccaaggaagagaaaccagaaagacgcagtaggtcccatgaacgcgctaggtacgaagaccccactctccgcaaccgcttttccgaaatcttagagacgagtagcaccaaattgcacccagacgttcctacggacaagaatctcaaacctaatcccaactggaaccaggggaagaccgttgtaaagtctgataaactggtgtatgtggacttactgagggaggagccagatgcaaaaacagacacaaacgtctctaagcctagctttgccgcagagtccgtgggtcagtccgccgagccgccaaaaccctccgtcgaacccgcactgcagcagcacagagactttatagcactgagggaggagctcggcagaatcagtgactttcacgaaacatatacattcaagcaacccgtgttcactgtcagcaaagatagcgtgctagctggaacaaataaagaaaaccttggcctccccgtttctaccccctttctggaaccccctctcggtagcgatgggccagcagtgacctttgggaaaacccaagaagacccaaagccattctgcgtgggcagcgcacctcccagtgtggatgtcactcctacatacaccaaagacggagccgatgaggccgagtccaacgatggaaaggtattaaagcccaaaccttccaagctagccaaaaggatcgccaactctgcaggctacgttggcgacaggttcaaatgcgtgactacagaactctacgccgatagctcacaactgagccgagaacagagagccctgcagatggaagggttgcaggaggattccatactgtgcttaccagcagcctactgcgaacgcgctatgatgaggttctcagagctggaaatgaaagaaagggagggcggacatccagcaacgaaggattctgaaatgtgcaagttctccccagccgactgggagagacttaaaggcaaccaagataaaaaacccaagtctgtgactctggaagaggcaatagccgagcagaatgaatctgaacgctgtgaatacagtgtcggaaacaagcatagagatccatttgaagccccagaggacaaggatctgcccgtggaaaagtattttgtagaaagacaacccgtttctgagccccctgccgaccaggtggcctcagatatgccgcattctcctacacttagagtcgatagaaagagaaaagtctctggcgattcgtctcacactgagaccactgcagaggaagtgccggaggacccgctgctgaaagctaagagacgcagggtgtcaaagggcctgcaccctaagaaacagcgccacctgctgcacctgagggagcgctgggagcagcaagttagtgccgcagatggcaaacctggcagacagtcaagaaaagaggtgacacaggccacacaacccgaagcgatacctcagggcaccaacatcacggaagaaaaacctgggcgaaagcgggcagaggccaaggggaaccggtcttggtcagaagaatcccttaagccttcggacaatgagcagggactccccgtcttctccgggtcacctccaatgaagtctctgagctcgacttcggctggaggcaaaaagcaggcacagccttcatgcgcgcctgcctcacgacctccggctaagcagcaaaaaatcaaagaaaaccagaaaaccgacgtgctgtgtgcggatgaagaagaggattgccaggccgctagcctgctgcagaaatacaccgataactcagagaagcctagcggaaagcggctgtgcaagacaaagcacctcattcctcaagaatcacggcgtggactgcctctcactggcgagtattacgtggagaatgcagacggtaaggtaaccgtgagacgttttaggaaaagacccgagcccagttctgattatgatctctcgccagcaaagcaggagccgaagccctttgatcggctgcagcagttactccccgctagccagtccacccagctgccatgttcatcgagcccacaagagaccacacagtcacggcctatgcctcctgaggctagacgcctcatcgtgaataagaatgctggcgaaactttactccagcgggcagccagattaggttacgaggaggtcgtgctctattgcctggagaataagatatgtgatgtcaaccaccgtgataacgccggttattgtgccctccacgaggcctgtgctaggggttggctcaacatcgtgaggcacctactcgaatacggagccgatgttaactgtagcgcccaggatggtacaagacctcttcacgatgctgtagagaatgatcacttggagatcgtgagactgctactctcctatggagcagatcccaccctggccacatacagcgggaggacaatcatgaagatgactcatagcgaactcatggagaagttcttgaccgattacctcaacgatttgcaggggaggaacgatgatgacgcatctgggacgtgggatttctacggcagctctgtgtgcgaacccgatgacgaaagcggctatgatgttctggccaatccgcctggccctgaggatcaagacgatgatgacgatgcttatagcgatgttttcgagttcgagttcagcgaaacccccttactgccttgttacaatatccaggtttcagtcgcccaggggcctagaaactggctcctgctgtctgatgtcctgaaaaagctcaagatgtctagcagaatatttagatgcaacttcccaaacgtagagatagtcactattgctgaagctgagttctataggcaggtttctgcaagcctgctgttcagttgttccaaggatctggaagcttttaacccagagtccaaggaacttttggatcttgtcgaatttactaacgagatccagacgctgctggggagttctgtcgaatggctgcatcctagtgatttggcttctgacaactattggta

SEQ ID NO: 215880 - DNA, 5267 bp, synthetic construct
  misc_feature 1..5267: note = Description of Artificial Sequence: Synthetic coding sequence
  source 1..5267: mol_type = other DNA
atgctttctgccactcctttatatggaaatgtgcactcttggatgaattcagaaagggttcgcatgtgcggagcatccgaagaccggaaaatactcgtgaacgacggcgacgccagcaaggccagactagagctccgtgaggaaaaccctttaaatcataatgtggtggatgcttccaccgctcatcggattgacggtttggcagccttaagcatggaccgaactggactgatcagggaagggctccgagtgcccggtaacattgtgtattcttctctgtgcggtctcggttccgagaaagggagagaggctgctacctctaccctaggaggtctgggattctcgtccgagcggaatccagagatgcagttcaagcccaatactccagaaaccgtcgaggcctcagccgttagcggaaagccccctaacggcttttctgctatctataagactcctcctgggattcagaaatctgctgttgctaccgccgaggccttgggcctcgaccgaccagcatcagataagcagagtccacttaacattaacggagcctcttatctccggctgccctgggtgaacccctatatggaaggtgcaacacccgctatttatccatttctggattcacctaataagtacagcctgaatatgtataaggcactgttgcctcagcagtcatactcccttgcacagcctctttacagtcctgtctgcacgaacggtgaacggtttctgtacctgcctccaccacattacgtgggccctcacattccctcatctcttgctagtcccatgaggctcagcaccccgtccgcctcacccgctattccccctctggtgcactgcgccgataagtccctcccctggaaaatgggcgttagtcccggtaatccagttgatagccacgcttacccccacatccaaaattctaagcagccgagggtgccaagcgcgaaggctgtgacctccgggctgccaggagatacagccttgctgcttccaccctccccacgccctagccccagagtgcatttacccacacagcctgcagctgatacctacagcgaattccacaaacattacgctcggatctccacttctcctagtgtagccctttctaagccctatatgaccgtttcatccgagttcccggcagccaggttatccaatggcaagtacccaaaggctcctgaggggggagaaggtgcccaaccagtcccaggccatgctcgcaagactgcagtccaggacagaaaagacggctcctcacccccactactggaaaaacaaacagtcacaaaagacgtgaccgacaaaccactcgaccttagtagcaaagtcgtggacgtggacgcaagtaaggccgaccacatgaagaaaatggcacccacagtgctcgtccacagccgggctggctcggggctggtcctgagcggaagcgaaatccccaaagagacgctgagtccgcctggaaatggctgtgctatctacaggtccgagatcatctcaactgccccttcctcctgggtggttcccggaccgtcgccgaacgaagaaaacaatgggaagtctatgagcctgaaaaataaagccctcgactgggctatcccgcaacaacgatcctccagttgccccagaatgggtggtacagatgctgtgatcaccaatgtgagtgggtctgtcagctcagccggaagacctgcctccgcttctccagcacctaatgctaacgccgacggcacgaagacctctcggtcctccgttgagaccacaccttcagttatccagcacgtgggccagcctccggctacgcccgcaaagcacagttcttctactagttctaagggagcaaaggcgtccaacccggagcctagcttcaaagctaacgagaacggtctgcctccaagctcgattttcttgtctccaaatgaggcttttcgctccccccctataccatatccaaggtcatatctgccttatccagcccctgaaggaatcgctgtgtctccgctgagcctgcacgggaaaggcccagtctatccacacccagtgctgctccccaacggttctctgttcccaggacacctcgccccaaagccagggctgccgtatggcttgccaacaggcaggcccgaatttgttacatatcaggacgctcttggactcggaatggtgcacccgatgcttatccctcacacccctattgaaattaccaaagaggaaaagcccgagcggaggagtagatcccacgaacgcgctcgctacgaggacccaacactgcgaaaccggttttccgagatcctcgagacctcctcgactaaactgcatccagacgtgcccactgacaagaacctcaaacccaatcctaactggaaccagggtaaaactgtcgtcaagtccgacaagctggtgtatgtggatctgctcagggaggaacccgacgcgaagacggacaccaatgtcagcaagccgagttttgccgcagagagcgtaggacagtccgccgagccacccaagccttccgtggaaccagcattgcagcagcatagagacttcattgccctcagggaagaactaggcaggatttcagacttccatgaaacatatactttcaagcagcctgtctttacagtgagtaaagatagcgttctcgccggaacaaataaagagaatcttggcctgccagtgtccactcctttcctggagccccctctcggctccgatggacctgcggtgacatttgggaagactcaagaggatcccaagcctttttgtgtagggagtgctcccccatccgtggatgtgacgcctacgtataccaaggatggtgctgatgaagcagaaagcaatgacggaaaggtgctgaaaccaaaacctagcaaactggctaagaggatcgccaactctgcgggatacgtgggcgaccgcttcaagtgtgtcacaactgaactgtacgctgactcctctcaattgtccagagagcagagggctctccagatggagggcctccaagaagattctatcctgtgtttgcccgcagcctactgcgaacgtgcaatgatgaggttttcagagcttgagatgaaggagcgcgagggtggccacccagctaccaaggattcagagatgtgtaagtttagccccgcagactgggagagacttaagggaaaccaggataagaaaccgaagtccgtcactcttgaagaagcaatcgcagaacagaacgagagcgagagatgtgaatattcagtaggcaataaacacagggatccttttgaagccccagaagacaaggacttgcctgttgagaaatacttcgtggagcgccaaccagtgtccgaaccaccggcagatcaggtggcctccgatatgccacacagccctactctgcgggtggacagaaagagaaaagtctcaggggattcaagccacactgaaacgacggcggaagaagtgcccgaagatcctttgctcaaggctaaaagaaggagggtgagcaaggacgactggcctgagcgcgagatgaccaattcctctagcaaccatctggaggatccgcactatagtgagctgaccaatttaaaagtctgcatagagctgactggactgcacccaaagaagcagcgtcacctgctccatctcagagagcgttgggagcagcaggtctccgccgcagacggaaagccaggaagacagtcacggaaagaggttacgcaagctacccaacctgaggccatcccccagggtactaatattaccgaggagaaaccaggaagaaaaagggcagaggctaagggaaacagatcttggagtgaggaaagcctaaaaccgagcgataacgagcagggactgcctgtcttctccggtagccccccaatgaaatcactgtcttcaacatcagcgggtggaaaaaagcaagcgcagccatcttgcgccccagctagtcgcccaccggctaagcagcagaaaatcaaggaaaatcagaagactgacgtgctgtgcgccgatgaagaggaggactgccaagccgctagtctgcttcagaagtatacggataacagcgagaaaccaagtggcaagcggctttgcaagactaaacatctgattcctcaggagtcacgcagaggactcccgctgaccggcgagtattatgtagaaaatgctgacgggaaggttactgtccgcaggttcaggaagcgcccagaacccagcagcgattatgacttgtccccagccaagcaggaacccaagcccttcgacagactccagcagctgcttcccgcttctcagtccacacagctcccctgttcatcctctccacaagaaacaacacaaagccgacctatgccacctgaagcacggagactgatcgtgaataaaaacgcaggcgaaaccttgctgcaacgagcagcacgcctgggatacgaggaggttgtgttatactgtctcgagaacaagatctgtgacgtcaatcatagggacaatgccggatattgtgcgcttcatgaagcatgtgctagaggatggttaaacattgtgcgtcacctcctagagtatggtgcggatgtgaactgcagcgcccaagatggtacacggccacttcatgatgccgtggaaaacgatcatctcgagattgtccggctgctactgagttatggcgctgatccaaccctcgctacatatagcggtcgaaccataatgaagatgacacactctgaactgatggaaaagtttttgaccgattacctgaatgatctccaaggtcggaatgatgacgacgcaagtgggacatgggatttttacggcagttcagtttgcgagccagatgacgaaagcggttatgatgtgctggccaaccccccagggcctgaagatcaggacgacgatgacgatgcgtattccgacgtgtttgaattcgagttcagcgagacacctctgctcccatgctacaacattcaagtgagtgtggcccagggccctaggaattggctcctcctgtccgatgtgctgaagaagctgaaaatgtcaagtcggatcttcagatgcaattttccaaacgtagaaatagtgacgatcgctgaggctgaattttaccgacaagtttctgctagcttgttgttttcctgttccaaggacttggaagcctttaaccccgagtctaaggagctgcttgatctggttgagtttaccaatgagatccagactctgctgggcagctcagtggagtggctgcatccatctgacttggcttccgataattattggta

SEQ ID NO: 215881 - DNA, 5111 bp, synthetic construct
  misc_feature 1..5111: note = Description of Artificial Sequence: Synthetic coding sequence
  source 1..5111: mol_type = other DNA
atgctgtcagcaacaccactctatgggaacgttcacagctggatgaacagcgagagagtgcgcatgtgcggcgcttctgaagatcggaagatcttggtcaatgacggagatgctagcaaggccaggttggagttgagagaagaaaatcccttgaatcacaacgtggtggatgcgtcaaccgcccatagaattgatggactagccgctctatcaatggatagaactgggctaatcagagaagggctgagagttccaggaaacattgtgtactcctccttatgtggcctgggcagcgaaaagggaagagaggctgctacaagcaccttgggcggtctgggttttagctctgaaaggaatcctgagatgcagttcaaaccaaacacaccggagacagtcgaggctagcgcagtgtctgggaagccgccaaacggctttagtgcaatatacaagacccccccagggatccaaaaatctgccgtcgccactgcggaggctctgggcctagataggcccgcaagtgacaagcagagccctctcaacatcaatggggcttcgtaccttaggctaccttgggttaatccatatatggagggggctacacctgcaatttatccctttttggatagccccaacaagtatagccttaatatgtataaagcgctgctgccccagcagtcatactctttggcacagcctctgtattcaccggtatgcacgaatggggagaggtttctctaccttcccccaccacattatgtgggacctcacattccgtcctctctggcctctccgatgaggttgtccacaccctctgcgagcccagcaattcccccactggttcattgcgctgacaaatcgctgccctggaagatgggagttagtcctggaaatcctgtggatagccacgcttacccgcacatccagaactctaagcaacccagagtaccttcagccaaggcagtaacatctgggctgcctggcgatactgccttgctgcttcccccatctcctcgcccttccccacgtgtgcatctgcctacacagccagccgcagatacttattctgaatttcacaaacactacgcgagaatttctacctcccctagtgtcgccctgagcaagccctacatgaccgtgagtagtgagtttcctgctgcaaggctgtccaatggaaaatatccaaaagctcccgaaggaggtgaaggcgcacagccagtacccggtcatgcacgaaagaccgccgtgcaagacagaaaagacggctccagccctccactgttagagaagcagaccgtaaccaaagatgtgaccgataaaccactggacctgtcatcaaaggtggtcgatgttgacgccagtaaagcagaccatatgaagaaaatggcaccaaccgtgttggtgcattcccgggctgggtccgggctcgttttgagcgggagcgaaattcccaaagagacgctgagccccccaggcaatggatgcgctatttaccgatctgagataatctccacagcacccagttcctgggtcgtgccgggtcctagtcctaatgaagagaataatggcaagagcatgagcttgaaaaataaggctctggattgggccattcctcagcagcgatcttcttcttgccccagaatgggaggtacagatgctgtgattactaatgtgagcgggagcgtgtctagcgcagggcgacccgcatctgcctcccctgcacctaacgctaacgccgacggtacgaagacctctcgcagcagcgttgagactaccccctccgtgatccaacacgtaggtcagcccccagccacacccgcaaaacacagttcctccactagctcgaaaggggcaaaggcaagtaaccccgagcccagcttcaaggccaacgaaaacggactcccgccttcttcaatctttctgtcccctaatgaggctttcaggtccccacccattccctaccctcggagttacctcccctaccctgccccagagggaattgccgtgagccccttatctctgcacgggaagggaccagtgtacccacatccagtgttgctgccgaatggcagcctctttcctggtcatctcgcacctaaacctggattaccctacggattaccgacaggtcggccagaattcgttacctaccaggatgccctcgggctgggcatggtgcaccccatgcttatcccccacacgcccatcgaaatcacgaaagaagaaaagccggagcggcgatcccggagccacgagcgagccagatatgaagatcctaccctacgaaatcggttctcagaaatcctagagacttcatccacgaagctacacccagacgtacccactgataagaacctgaagcctaacccgaattggaaccagggaaagactgttgtgaagagtgacaaactggtatatgtggatcttttgcgtgaagagcctgacgcaaagacagacactaacgtcagtaaaccatcttttgctgcggagagtgtgggccagagcgccgaacctccaaaaccctccgtcgagccagcgctgcagcaacaccgagatttcatcgccctgagggaagagttgggccgaatcagtgattttcacgagacctatactttcaagcaacccgtttttacggtgagcaaggattcagtactggctggcaccaataaagaaaacctggggctgccggtctccaccccctttttagaaccaccactgggctccgacggccctgcagtgacgtttgggaagacacaggaggatcctaagcctttttgtgtcggatcagccccaccaagtgtggatgtgactccaacttataccaaagacggggcagacgaggccgagagcaatgacggtaaggttctgaaacctaagccgagcaaattggccaaacgcattgccaatagtgcgggttacgtgggagaccgctttaagtgtgtgaccaccgagctttatgcggattcaagccagctctctcgcgaacagagagctctgcagagggccatgatgcgcttcagtgaacttgagatgaaggagagagagggaggacatcctgccacaaaggacagtgagatgtgtaagttctctccagcagactgggaacggctgaaagggaaccaagataaaaaacctaaaagcgttacattggaggaggcaattgcggagcagaacgaatctgagcggtgtgaatatagcgtgggaaataaacacagggatccattcgaggcacctgaagataaggacctgcccgtggagaagtactttgtggaaagacagcccgtgtccgagcctccagctgatcaagttgcctctgatatgccacacagtcccactctgagggtcgaccggaagcgcaaggtgagcggcgactcaagtcacacggaaacaactgctgaagaagtaccagaggaccctctcctcaaggccaaaaggcgccgagtatcaaagggtctccacccaaaaaagcagaggcacttactgcacttgagggagcggtgggagcagcaggtcagtgccgcagacggaaagccgggtaggcaatcgcgaaaggaagttactcaggcgactcagcccgaagcaattccgcaaggaaccaacattaccgaagagaagccaggaagaaaaagagcagaggctaaaggcaatagatcctggtctgaagaatcccttaaaccttccgataacgaacagggcctcccagtgtttagtggctcaccaccaatgaagtccctgtccagcactagcgccggtgggaagaagcaggcgcagccttcctgtgctcccgcatcccggcctcccgctaagcagcaaaagatcaaagaaaatcagaagacagatgtcttgtgcgcagacgaagaagaagactgccaggctgcatctttgctccagaagtatactgacaactccgagaaaccgagtggtaaaaggctatgtaaaactaagcacctgattccccaggagtctcgcaggggactgcctctcacaggggagtattacgtggagaatgccgacggtaaggttacagtcagacggttcaggaagaggcccgagcccagctcagactacgacctgagtccagcaaaacaggagcctaagcctttcgacagattacagcagctccttccagcttcccagtctactcagcttccatgtagcagctctccacaggagacaactcagagccggccaatgcctcctgaagcacgtcggctaattgtgaataaaaatgccggagaaaccttgttacagcgcgcagccagactgggctacgaggaggtggttttatactgccttgagaataagatctgcgacgtgaatcaccgtgataacgctggctactgtgcactccatgaagcatgcgccagaggatggttaaatatcgttcgccacctgctagagtacggggctgacgtcaattgttctgcccaagatggaacaaggcctctccacgacgctgtggaaaacgaccacctcgagatagttagattgctcctgagctatggagctgaccctactcttgcaacctacagcgggaggaccatcatgaaaatgacacattccgagctaatggagaagtttcttaccgactacctcaacgatctccagggaaggaatgatgacgacgcgagcggaacctgggacttctatggatcctcggtctgtgagcctgacgacgaatccgggtacgatgttttagccaatccacctggccctgaggatcaagatgatgatgatgatgcatacagcgatgtgtttgagtttgaattcagtgaaaccccattactgccgtgctacaatatccaggtatctgtagcccagggaccacgaaattggctgctcctgtccgacgttctcaagaagctgaagatgtctagccggatcttcagatgcaacttcccaaacgtagagatcgtcacaatcgcagaggcagagttctatcgccaggtctcagcttctcttctgtttagctgttccaaggacctcgaggcatttaatccagaatctaaagagctgctcgacttggttgagttcaccaatgaaattcagactttgttaggaagctctgtggagtggttgcaccccagtgacctagcatccgacaactactggta

SEQ ID NO: 215882 - DNA, 1869 bp, synthetic construct
  misc_feature 1..1869: note = Description of Artificial Sequence: Synthetic coding sequence
  source 1..1869: mol_type = other DNA
atgccccattcaccaacattacgggtagaccgaaagcgcaaggtctccggtgattcatcccacacagagacaacagctgaagaggtgcccgaggaccccctgcttaaagcaaagcgcagacgagtgtcgaagggcctccatcccaagaagcagcgtcacctcctccacttgcgcgagcgttgggagcaacaggtgtccgcagccgacggaaagcccggacgccaatcccggaaggaggtgacacaagctacgcagcctgaggccattccccaggggactaacatcactgaggaaaagccgggtcggaaacgcgctgaagcaaagggcaatcggtcttggtccgaagagagtcttaagcctagcgacaacgagcagggcctacctgtttttagtggctccccgcctatgaaatctctttcctcaacatccgctggagggaagaagcaagcccagccctcctgcgcaccggctagcaggcctcccgctaagcagcagaagatcaaagagaaccagaagacggatgtgctctgcgctgatgaagaggaggattgtcaagccgcttctctcttgcagaagtacaccgataactctgagaagccatccggaaagcggttgtgtaagactaagcatctgatcccccaggagtcgaggcgcggactgcccttgactggggagtactacgttgaaaacgccgatggcaaagtcacagtgcggaggtttagaaaacgtcctgagcccagctccgattatgacctgtctccagcaaaacaggagcctaagccctttgacagactccagcagctgttaccggctagtcagtctacgcagctaccttgtagctcttctccacaggaaacaactcagtctaggccaatgcctcctgaagccagacggctcattgtgaacaagaacgcaggcgaaaccttgctgcagagggcagccagactcggctatgaggaagtagtattgtattgtttggagaacaagatatgcgacgtgaatcatcgtgacaacgccggatactgcgctttacacgaagcctgcgctcgcggttggttaaacatagttcgtcatttgctggagtacggcgctgacgtgaactgtagcgctcaggacggcacacgccctttgcatgatgccgtggagaatgatcatctggagatagtaagactgttgctgtcttatggagctgacccaacccttgcgacctactcaggcaggaccattatgaagatgacacatagtgagcttatggagaaatttctcacagattatctcaacgacctgcagggccgtaacgacgacgacgcctccggtacctgggatttttacggctcatccgtgtgcgaacccgacgacgagtccgggtacgatgtactggcgaatcctcctggccctgaagaccaggacgacgacgatgacgcatacagtgacgtcttcgagtttgaattctcagagacaccactgctgccatgctacaacatccaggtctctgtggcccagggccctcgtaattggctgttgttgtccgatgtactcaagaaactaaagatgagcagcagaattttcaggtgcaactttccaaatgtagagatagtgactatcgccgaggccgaattttatcgacaggtgtcagcctctctactattttcctgttcaaaagatctggaggcctttaacccagagtctaaggagctgctggatttagtggagtttaccaacgaaattcagacgctactgggctcgtctgtcgagtggcttcatccatccgacttggcttccgataattattggaagagccctcagattgcccgtggctccgtggagggtaaaaaaactgacgacaagacgtcgaaaaccgatttgtag

SEQ ID NO: 215883 - DNA, 5165 bp, synthetic construct
  misc_feature 1..5165: note = Description of Artificial Sequence: Synthetic coding sequence
  source 1..5165: mol_type = other DNA
atgttgtcagcaacccctctgtatggcaatgtccatagctggatgaactcagagagagttaggatgtgtggagcgtcagaagaccgcaagatccttgtaaatgatggcgatgcaagtaaggcaagattggagctacgggaagagaatcctctaaaccacaacgtggtcgatgcatcgaccgctcataggatcgacggtctggccgcactctccatggacaggacaggtttaattcgcgaaggccttcgcgtgccgggaaacatcgtttactctagcctctgtggactgggctctgaaaagggcagagaggcagcaaccagtacgcttgggggattggggttctcatccgagcgcaacccagagatgcagttcaaacctaatacgcctgagaccgtcgaggcaagcgccgtgtcaggaaagccacctaatggcttcagcgctatatacaaaacaccacccggaatccagaagagcgcagtggccactgcagaggcgctggggctggaccgtcctgccagcgataagcaatcacctctgaacattaacggggcatcttaccttcggctgccgtgggtcaatccttacatggagggcgctacccctgcaatttacccattcctcgattcaccgaataaatactctctgaatatgtataaggctcttcttccacagcagagctacagtcttgcccagcctctctacagtcctgtctgtactaatggggaaaggtttctgtacttgcccccaccccactatgttggcccacatattccaagctctctggcaagccctatgcgccttagtacaccctctgcaagccccgcaatacctccacttgttcactgtgctgataaatccttgccctggaaaatgggagtttcgccaggcaaccctgtggactctcacgcctatccgcacatccagaacagtaagcagcccagggtcccatctgccaaagccgtcacttctggcctccctggtgatacagcactgttactgccaccgtctccaaggccctcacccagagtgcatctgcctactcagcccgctgctgacacgtattccgaatttcataagcattacgcacggatatctactagcccaagcgtcgctctctccaaaccttacatgactgtttcatcggaattcccggctgctaggctgagcaatgggaagtatccgaaagctccagaaggtggcgagggcgctcagccagtccccggtcacgcccgaaaaacagccgttcaggaccggaaagacgggagtagcccgccactgctagaaaagcagacagtcacgaaagatgtgaccgacaaacccttggacctgagcagcaaagtagtggacgtggatgcctccaaagccgatcacatgaagaagatggccccaacggtactggtccacagtcgtgccggatccggactggtcctgagcggcagcgagatacccaaggaaactctgtcccccccaggaaacggctgtgccatttaccgcagcgagattatctcgacggcccctagttcctgggtcgtgccaggcccttccccaaatgaggagaacaatggaaagagtatgagcttgaagaataaggccttagattgggccataccccagcagagatcatcaagctgtcctaggatgggtggaactgatgccgtgatcacaaacgtgagtggatcagtctcctccgcaggcaggcccgcttccgcctcccctgcacccaacgccaacgcggacggcacaaaaacgtctaggagctcagtggaaacgaccccttcggttatccagcacgtgggtcaaccaccagctactcctgcaaagcattccagcagcacttcaagtaaaggggctaaagcatcaaatcctgaaccatctttcaaggccaacgagaacgggctgcccccaagctccatattcctgtcccctaatgaagcgttccggagcccacctatcccctaccctagaagctacctgccttaccccgctcccgaagggatcgctgtttccccactctccttacacgggaagggccctgtctacccacatccagtgctgctccccaatggatccttatttccaggacacttggccccaaagccaggattaccatacgggctccctactggcaggccagaatttgttacatatcaggacgctctggggctggggatggtgcaccctatgctgattcctcacacacctattgagatcaccaaggaagaaaagccagagaggcgcagtcggagtcatgagagggcaaggtatgaagacccgactttacgaaaccgcttctccgaaatcttggagacaagctccaccaaattacacccggacgtgccgactgacaaaaacctcaagcccaacccgaattggaaccagggcaagacagtggttaagtcagacaagctcgtgtacgtcgacttgctgagggaggaacccgacgctaagacagacactaacgtaagtaaacccagttttgccgcagagagcgtcggccaatccgctgagcctcccaagcctagtgtggaacccgctctgcagcaacatagggatttcattgcccttcgggaagaactcgggcgtatttctgattttcacgaaacctatacttttaagcagcccgtttttacagtttcaaaagacagcgtgttggcaggtactaacaaagagaatctcggcctacctgtttccaccccttttctcgagcctccgctgggcagcgacggaccggcagttactttcggaaagactcaggaggaccccaagccattctgtgtgggttcggcgcctcctagtgttgacgtgacccctacctacaccaaagatggagcggacgaagcggaaagcaatgatgggaaggttcttaaacccaaaccctccaagctcgctaagcggatagccaattctgctgggtatgttggggatcgctttaaatgtgtgaccactgaactatacgctgatagctcacagctgagccgggagcaacgagccctccaaatggaggggttacaagaggattccatcctatgcttgccggctgcgtattgcgaacgtgccatgatgcggttctcagaactggagatgaaggagcgtgaagggggacaccccgcaactaaagattcggagatgtgtaaattctccccagcagattgggagagactcaaaggcaatcaagacaaaaagccaaaatccgtcactttggaagaggctatcgccgagcagaacgaatcagagaggtgcgagtatagtgtggggaataagcacagagacccctttgaggcgccagaagataaagatctccccgtcgaaaagtatttcgtggaaaggcagccagtgtccgagccccctgctgatcaggtcgcttctgatatgccccactccccaaccctccgcgtggatcgaaaaagaaaggtgagtggcgattcatctcacacggagaccaccgccgaggaggtcccagaagacccactcctgaaagcaaaacgccgacgtgtttctaaaggccttcatcctaagaaacagcgccatttactccatctgagagaacgctgggagcagcaagtgagtgcagccgatgggaaacccggtaggcaatccagaaaggaagtcacccaagcaacacagcccgaggctataccacagggaactaatatcacggaagagaaaccgggaagaaagcgtgcggaagcaaaagggaataggtcttggtctgaagagagcctgaaaccttctgacaatgaacagggacttcccgtgttctcggggtctccccctatgaagagtctttcctcgacgagtgccggaggcaagaaacaggcccagccaagttgtgctcctgcctcacgtcccccagccaagcagcagaaaattaaggagaatcaaaagactgacgttctgtgtgccgacgaggaagaggactgtcaagccgcaagcctgctgcaaaaatatacagataattcagaaaagcccagcggcaagagactgtgtaagacgaagcatttgatcccacaggaaagccggagaggcctgccactaacaggcgagtactacgtagagaatgctgatggtaaggtgacagtgagaaggttccggaaacgtccagagcctagttcggactacgacctgagcccagccaaacaagaacccaaaccctttgatcggttacagcagctgctgccagctagccagtccacccagttaccatgctcctcgtccccccaggagactacacaatcccgcccaatgccacccgaggctcggagactcatcgtcaataagaacgcaggcgagaccctgctgcaacgggcagcgaggctgggatacgaagaggtggttctctactgcctcgaaaacaagatttgtgatgtcaatcaccgtgataatgccggatactgtgcgcttcatgaagcgtgcgcccgtggctggctgaacattgttagacacctgctggagtacggggctgacgtcaactgcagtgcccaggatggcacccgaccactacacgatgccgtggaaaatgaccacctggaaattgtgagattgctcctgagttatggagcagacccgaccctggccacttacagtggccgaactattatgaagatgacacacagcgagctgatggaaaagttcttgacagattacctgaatgatctccagggtaggaatgacgacgacgccagtggaacgtgggacttttacggaagttccgtttgtgagcccgatgacgaaagtggctacgatgtgctcgccaatccccctggaccggaagatcaggatgatgatgatgacgcatattcagatgtgttcgagttcgaattcagtgagactcctctcctgccttgttataatatccaagtaagtgtggctcagggaccacggaattggctcctcttgagcgacgttcttaagaagcttaagatgagctctcggatctttaggtgtaacttccccaacgtggagatagtcacgattgccgaagctgaattctaccggcaggtcagcgcctcactgctttttagttgctctaaggatctggaggcattcaatccggaatccaaagagctgctggacctggtggagttcactaacgaaatccaaacacttcttggctctagtgtggagtggctgcatccctcagatttggccagcgacaactattggta

SEQ ID NO: 215884 - DNA, 87 bp, synthetic construct
  misc_feature 1..87: note = Description of Artificial Sequence: Synthetic coding sequence
  source 1..87: mol_type = other DNA
atgctgagcgccacaccgctctatgggaatgtgcactcgtggatgaatagcgaacgcgtgcgcatgtgcggcgctagtgaagattag

SEQ ID NO: 215885 - DNA, 1236 bp, synthetic construct
  misc_feature 1..1236: note = Description of Artificial Sequence: Synthetic coding sequence
  source 1..1236: mol_type = other DNA
atgacgcgccctgctttccaaccgccagccacccctgccaaacacagcagctctacctctagcaaaggcgcaaaagctagcaatccggagccatccttcaaggcaaatgagaatggactgccaccgagttcaattttcttatccccaaacgaagcatttagatccccacccataccctatcctaggagctacctgccctacccggctccggaaggaattgcggtgagcccacttagcctgcatggtaagggccctgtgtatccccaccccgtcctcctccccaacgggtcactttttcctgggcatctggcccctaagcccggtcttccgtatggcctccccaccggccgacccgaatttgtgacataccaggacgccctggggcttggcatggtgcaccccatgctgattccacatacccctattgaaatcaccaaggaggagaagccagaaaggcggtcacggagtcacgagcgggcaagatacgaagaccctacgctgcggaaccgcttctccgagatcctcgaaacctctagcacaaaactgcaccccgacgtgccaaccgacaaaaatttgaagccaaacccaaactggaaccaaggaaagacagtggttaagtccgataaactagtttacgtagatttactgagagaggaacccgacgccaaaacggataccaacgtatcaaagccgtcctttgcagcggaaagtgtcggacaatccgccgagccgcctaagccttccgtcgagcccgcactccagcagcacagagacttcattgccctcagagaggaactgggaaggatttccgacttccacgaaacatatactttcaaacagccagtgtttacggttagtaaagattccgtgttggcgggtactaataaggagaatctggggcttcctgtcagtacacctttcttggaaccacccctggggtctgacggccctgctgtgacatttggtaaaacacaggaggaccctaaacctttctgcgtgggatctgctcccccttccgtggacgttaccccaacctatacaaaagacggcgctgacgaagccgagagcaacgacggcaaggtgcttaagcccaagccatccaagctagctaaaagaatcgcgaattccgcgggttatgttggggatagatttaagtgcgttacgactgaattatatgctgatagttctcaactgagtagagagcaacgggcactccaggtgtctccacccacatag

SEQ ID NO: 215886 - DNA, 2238 bp, synthetic construct
  misc_feature 1..2238: note = Description of Artificial Sequence: Synthetic coding sequence
  source 1..2238: mol_type = other DNA
atgcctgttctttctcgaccacgtccctggagaggcaatacactcaaacggacagctgtactcctggcactggcagcctacggagcccacaaggtgtacccactggtgcggcagtgtctcgccccagcccgtggactccaggcccctgctggcgagccaactcaggaagccagcggcgtcgcggctgccaaagccggtatgaacagagtgtttctgcaacgactgctgtggcttctgcgccttttattcccaagagttctgtgccgggagaccggcctcctggccctccacagcgctgccttggtaagccggacttttctcagcgtatacgtggccagacttgacggacggcttgcacggtgtatcgtcagaaaggatccacgagcttttggttggcaattgttacagtggctgctcatcgcgctgcctgccaccttcgtgaactccgcaataaggtacctagagggtcagctggccctcagtttcaggagccggttagtcgcccatgcttataggctttacttttcgcaacaaacatactatcgtgtgtcaaatatggatggaaggttgagaaaccccgatcagtcactgaccgaggacgtggtcgcctttgcagctagtgttgctcacttgtacagtaacctcactaagccattacttgacgtggcagtgacatcatacactcttctgagagccgcacggtcccgcggagccggtacggcttggcccagcgctatcgccggactggttgtattcttgaccgccaatgtacttcgggcattttccccgaaatttggggagctcgttgcagaggaggctcggagaaaaggtgaactgcgctacatgcacagtcgggtggtcgccaactctgaagaaattgcattctacggtgggcatgaggttgagctggccctccttcagcgttcttaccaagatctggctagccagatcaatctgatccttctcgagcgcctatggtatgtgatgctagaacagtttctgatgaagtacgtttggagtgcaagcggcctgttgatggtggccgtgccaatcattactgccacggggtactcagagagtgacgctgaggcagtgaaaaaggcagccctggagaagaaagaagaggagctagtgagtgaacggactgaagcttttaccatagcccgaaacctgcttaccgctgccgctgacgccatagaacgaatcatgagctcttataaggaggtcacagaactagctgggtataccgctagagttcatgagatgttccaagtcttcgaggatgtgcagcgctgccatttcaaacgtccgagagaattagaggacgcccaggcagggagtgggactattgggaggagtggagttagggtcgaaggacctctgaaaatcagagggcaggtcgtggatgtggagcaaggtatcatttgtgagaatattccaatcgtgacaccttccggagaagtcgtcgttgccagccttaatatccgggtggaagagggaatgcatctcctgattactgggcctaatggctgcggaaagtcctccctttttcggattcttggaggcctttggccaacatacggtggtgtgttgtacaagcctcctccccagaggatgttttacattcctcagagaccctacatgtccgtgggcagtctacgcgaccaagtcatctatcctgatagcgtggaagatatgcagcggaagggctactccgaacaggacttggaggcaatccttgacgtcgttcacctgcaccacatactccagcgggagggtgggtgggaggccatgtgcgactggaaagacgtgctgtctggaggtgagaaacagaggatcggcatggccagaatgttctatcatcgcccaaagtatgcactgttagacgagtgcacgagcgccgtgagcatcgatgtggaaggtaagatttttcaagctgctaaggatgccggaatcgccctgctgagtattacacacagaccatctctgtggaaataccatacccacttattgcagttcgacggggaaggcggatggaagttcgagaaactagacagtgccgctcgtctttccctgactgaagaaaaacagcgattggaacagcaactggcgggaattcctaaaatgcagcggagactccaagagttatgtcaaatcttgggagaggccgttgctccagcccacgtgcccgctccatctccccaaggacctggcggattgcaaggtgcctctacatag

SEQ ID NO: 215887 - DNA, 5358 bp, synthetic construct
  misc_feature 1..5358: note = Description of Artificial Sequence: Synthetic coding sequence
  source 1..5358: mol_type = other DNA
atgatctccactgcacccctctattcaggggttcacaactggacatcatcagatagaattcgcatgtgtgggataaacgaagaaaggcgcgcacctctgtctgacgaggagagcaccactggggactgtcagcattttggttcccaggagttctgcgtaagctcatcattttccaaggttgaactgaccgccgtgggcagtggatctaatgcaaggggggcagacccagacggctccgctacagagaagctgggacacaagagcgaagacaagccggacgacccacagcccaagatggattatgccggaaacgtggcagaagccgagggtttccttgtgcctttgtcttcaccgggagacggactcaagttaccagcttccgactccgccgaggcaagcaatagcagagcagattgctcgtggacccctctcaatactcagatgtctaaacaggttgactgtagcccggcaggagtgaaagcattggactcccgtcagggtgttggagaaaagaacacgttcatcctggctaccctagggacaggcgtgcccgtggagggaacattacccctagtgactacaaacttctctcctttgccagcccctatctgtccccctgctccgggatcggccagtgtgccccattctgtacccgatgcatttcaggtaccactgtctgttccggctcctgttcctcattcaggtcttgtgcccgtgcaggtggcaacgagtgtccccgcaccatctccccctttggccccagtgccagcactcgctcccgcaccccctagcgttcctacactcatctccgacagtaatccgctttcagtgtccgccagcgtgctcgttccagttcccgctagcgccccaccatctggacctgtacccctcagtgcgcctgccccagccccactctccgttcccgttagcgcaccacccctcgccctgattcaggctcctgtgccaccatccgcaccaactcttgttctggcccctgtgcccacccctgtgctggctcctatgccagcctcaacacccccagcggcaccggctcccccttccgtccccatgccgacaccaactccctcttccggccctcctagtaccccaacgctcattcctgccttcgccccaacaccggtgcctgctcctactccagcccctatctttacccctgcccctacacccatgcctgctgctacccctgccgctataccaacttcagcccctatccccgcaagcttttcgctaagtagggtttgtttcccggcagcccaggcccctgccatgcagaaagtacctttgtcgttccagccaggcacagtgctgactcctagtcagcccctggtctatattccgccaccgtcttgcggtcagcccctgagcgttgctactctccccactactttaggagtgagttcgacacttacattgcctgtcctgccttcttatttgcaagacaggtgcctcccgggagtcttagcctccccagagcttaggtcatacccttatgcttttagcgtggcaaggcccttgacatcggattctaaactagtgtcgttagaagtcaatcggctgccctgcaccagtccaagcggatctaccacgacgcagcccgcacctgacggcgtccccggtccgcttgccgatacatccctagtcactgcatccgccaaagtgcttccaaccccacagcctctcttaccagcgcctagcggatcatctgccccaccccacccagcaaaaatgccaagtggcactgagcagcagacagaaggaacaagtgtaacctttagtcctctgaagagccccccacagctggagcgtgaaatggctagcccccctgaatgttccgaaatgccattagacctatcttctaaatccaaccgccagaaactcccactgccaaaccagcgcaagacgcccccaatgcctgtcctgacccctgtgcatacgagcagcaaggccctgctgtcaaccgtattatcccgctcccagcgtaccacacaagctgcgggtggtaacgtgacatcgtgtttaggctctacttcctctcctttcgtgatcttccccgaaatagtaagaaacggcgatcctagcacatgggttaagaattctaccgctctcatctctacaatccccggaacctacgtcggggtcgccaacccggtccctgcgtccctgctgctgaacaaagatcctaatctgggtctaaaccgcgaccctcgtcacctgcctaagcaggagcccatctccattatcgaccagggcgaacccaagggaactggagccacgtgcggaaagaaggggagtcaggctggcgcagaaggccagcccagtactgtgaagcgctatactccagccaggattgcgccaggcctccctggctgccagaccaaggagctgtccttgtggaagcccactggtcccgctaatatctacccaagatgctcagtcaatggtaagccgacctccacccaggttctgcccgtgggatggtctccttatcatcaagcaagcctgttaagtatcggaatcagttctgctgggcagctgactccatcgcaaggggcaccgattcgacctacatcagtggtgtccgagtttagcggagtgccctccctaagctctagcgaagccgtccatgggctgcccgagggacagccacgaccaggaggatcctttgtgcctgagcaggatcccgtcaccaagaacaagacatgccgtattgctgccaagccctatgaggaacaggttaatcccgtattactgactctttcaccccagacagggactcttgccttgagtgtccaaccttccgggggtgacattaggatgaaccaagggcctgaggaatcagagtcccacctgtgtagcgactctacccctaaaatggagggaccccaaggcgcatgtggcctgaagctagccggagacaccaaacctaaaaatcaggtcctggccacctatatgtcccacgaactggttctcgccaccccacaaaacctcccaaagatgccagaattgccactgttacctcatgactcccatcccaaagaattgattctggacgtggtcccatcttcccgcagagggtcatctaccgagcgccctcagctgggctcccaggtggatctcgggcgagtaaagatggaaaaggtagacggagacgttgttttcaacctggcaacatgtttccgtgccgatggcctgccggtcgcccctcagagggggcaggccgaagttcgcgcaaaggccggtcaagctcgcgttaagcaggaatcagtcggtgtcttcgcttgtaagaataaatggcagcccgatgatgtaactgagtccctaccgccaaagaagatgaaatgcggaaaagaaaaagactctgaggaacagcagctgcagccacaggccaaggcagtcgtgagatccagccataggccaaagtgccggaaactgcccagtgaccctcaggaatctactaagaagtcccctagaggagcctctgattctggcaaagagcacaacggcgttagggggaagcacaaacacagaaagcccacaaagcctgagtcccagtcaccagggaaaagagcggatagccatgaagaagggtctctggagaagaaggctaagtccagcttcagagacttcatccccgtggtgctcagtacacggacccgctctcaatcgggatcaatttgttctagcttcgctggaatggccgattctgacatgggttcccaagaagttttccccacagaagaggaagaagaggtaacgcctaccccagcgaaacgacgcaaagtccgtaagacccagcgagatacacagtatcgtagtcatcatgctcaagacaaaagcctgctctctcagggccgtaggcacctgtggcgggcacgggagatgccctggcggacagaagcggcaagacagatgtgggacacaaacgaggaagaggaggaggaggaagaagaagggctgctcaaacgcaagaaacggaggaggcagaaaagtagaaagtatcagactggcgagtatcttactgagcaggaggatgaacaaagacgcaagggtagagccgacctaaaggctcggaagcagaagacatccagcagccagtccctggagcatcgcttgcgcaaccgtaatttgttgttgcccaacaaggtccaggggatcagcgacagtcctaatggtttcctgcctaacaacctggaggaacctgcttgcctagaaaattccgaaaagcctagcgggaaaagaaagtgcaagaccaaacacatggcaacggtgagcgaagaggccaaggggaaaggacggtggtcccagcagaagactcggtcccctaaaagtcctacgcctgtgaagccaactgaaccatgcacgcctagcaaaagcagatctgccagcagcgaagaagcaagcgagtcaccaacggctagacagatccctccggaggctcgacgactgatcgtaaacaagaacgctggagagactctgctccagcgtgcagcgaggttaggatataaggatgtggttctctactgtttacagaaggactcagaggacgttaatcatcgggataacgctggctacacagcgttgcacgaagcatgctcccgaggatggactgacatccttaatatcctgctcgagcatggcgctaatgtgaattgcagtgcacaggacggcacccggccagtccacgatgccgtcgtgaacgacaacttggagaccatatggctcttgctttcttacggcgcagaccccactttggccacatacagtggacagactgccatgaagctggcttctagcgataccatgaaaagattcctatccgatcacctttcagatttacaggggagggccgagggcgacccgggagtatcctgggacttttactcgtcgtcagtgctcgaggaaaaagacgggttcgcttgtgacctcctgcacaatccacccggttcctctgatcaggagggtgatgaccccatggaagaagatgacttcatgttcgagctctccgacaaaccccttttaccgtgctacaacctgcaggtttcggtgtctcgcggtccctgcaattggtttttattctcagatgtgcttaagcgcttgaaactcagttcgcggattttccaggcccgatttccacacttcgagatcacgacaatgccgaaggccgagttttatcgtcaggtggcttcttctcagcttctcactccagccgagcgtcctggtggcttggacgaccgaagtcccccaggcagttctgagaccgtggaactcgtgagatacgagcctgacctgctccgactcctgggatccgaggtggagtttcaatcctgtaattcatac

SEQ ID NO: 215888 - DNA, 4746 bp, synthetic construct
  misc_feature 1..4746: note = Description of Artificial Sequence: Synthetic coding sequence
  source 1..4746: mol_type = other DNA
atgatttctacagcccctctctattccggagtacacaattggactagttcagacagaatcaggatgtgcggcatcaacgaggaaagaagggcacctttgtctgatgaggagagtaccacgggagattgccaacactttggcagccaggagttctgtgtctcaagctctttctccaaggtagaactgacagctgtgggatcagggtcgaatgccaggggcgcagatccggacgggagcgccaccgaaaagctgggtcacaaatctgaagataaacccgacgatcctcagcctaagatggattatgccggaaatgttgccgaggcagagggcttcctcgtgcctctgagttctcccggtgatggactcaagctcccggctagtgacagtgctgaagcctctaacagcagagccgactgctcatggaccccgctaaacacacagatgtctaaacaggtcgactgctccccagccggagttaaggccttagattctcgccagggcgtaggagaaaaaaacactttcatcttagcgactctgggcacaggagtgccagtggaagggaccctgccattggttaccacgaattttagccctcttccggcacccatttgtccccctgcgcctggatcagcaagcgtgccacactctgtgccagacgcttttcaggtcccactgagcgtccccgctccagtgccacactctggcctagtccctgtccaggtagcgactagcgtgccggcaccatccccgccactagctcctgttcccgctctcgctcccgctccaccctctgttccgaccctcatttcggattccaatcctttgtccgtgtcagcctcagttttggtgcctgttccagcctccgcaccgccttcgggccctgtacctctgtcggcccctgcaccagcgcctctcagtgttccagtgtcagcccctccgctcgctctaatccaagctccagtcccaccctccgcccctaccctggtcttagctcccgtgcccacccccgtactcgcccctatgcctgcatccaccccaccagccgcacccgcacccccatccgttccaatgcccaccccaactccttcgagcgggcctcctagcacccccactctgataccagcttttgccccaacgccggtgccagcaccgacaccagcgcctattttcacccctgccccaacgcctatgcccgcagcaactccagcggctatccctacttctgccccaattcctgcctctttctcactcagccgcgtatgttttccagcagcacaggcccctgcgatgcagaaggtgcctttgagcttccaacccggtactgtgctcacaccgagccaaccactggtatatattccacctccatcatgcggacaacctctcagcgttgctacactgcccactaccctcggggtcagcagtactctgaccctgcctgtgcttccgtcttatttgcaagaccgctgtctgccaggcgtcctcgcctcgcccgagctgcgctcgtatccttacgcttttagcgtagcgaggccactcaccagtgattccaagctcgtttctctggaggtgaataggctgccgtgtacctctccctccggctccaccaccactcagcccgcacccgacggggtgccgggaccactggcagacacgagccttgtgactgcaagcgctaaggtcctgccgacaccacagccacttctgcctgcccctagcggcagctccgcccctcctcatccagccaagatgccgtcagggacagagcaacagaccgaagggacttccgtcactttcagccccttgaaaagtccaccgcagcttgaacgcgaaatggcctcacccccagagtgctcagaaatgccacttgatttgtcgtcaaaatccaaccggcagaaactgcctcttccaaaccagaggaagactccacctatgcctgttctgacgccagtgcacactagcagcaaggctcttctctcaaccgtgctatcgaggagtcagcgaaccacccaagctgccggaggtaatgtaacatcatgtctggggtctacaagttcaccctttgttatatttcccgagatagtgagaaatggggaccccagtacctgggttaagaattctaccgctctcatttccactatcccaggaacgtacgtcggcgtggctaacccagtgccagctagcttgctgttgaataaggaccccaacttggggcttaatcgcgacccacggcacttgccaaagcaagaaccgatctccataattgaccagggagaacctaaggggacaggcgctacttgtgggaagaagggatctcaggcaggagccgaagggcagcctagtactgtgaagaggtatacacccgctcgcatagctcctggactgccaggatgtcagaccaaagaattgagcctgtggaagccaactggacctgccaacatataccccagatgttccgtcaacgggaaacccacctcaactcaagtacttccggtgggctggagtccatatcaccaggccagcctgctgagtatcggtataagcagtgcagggcaattaactccgagtcagggtgcgccaattcgtcccacatcggtggtctctgagtttagtggcgtgccttccctctcttcttcggaggccgttcacggactgccagagggccagccaagaccaggcggttcatttgtgccagagcaggacccagtgaccaaaaataagacatgcaggattgccgcaaagccttacgaagagcaggtgaatcccgtgctacttactctgtccccgcagacggggacactggccctgtccgtgcagccatccggcggagatatccgaatgaatcaaggacccgaagaatcggagtcacacctctgcagcgacagcacccctaaaatggaaggccctcaaggcgcttgtggactcaagctcgccggagacaccaagccaaagaatcaggtccttgcgacgtacatgtctcatgagctggtgctggccaccccacagaacctccccaagatgccggaacttcctctcctcccccacgattctcatcctaaggagttaatcctcgacgttgtgccaagctcacggagaggcagctcaacagagagaccccagctagggagtcaagttgatttgggcagggtgaagatggagaaggttgacggggacgtggtgtttaatctggcaacatgtttccgggcagacggcctcccagtcgctccccagcggggtcaggccgaagtgcgggctaaagcagggcaagctagagtcaaacaggaatctgtgggcgtgtttgcctgtaaaaataaatggcagccagacgatgtgactgaatcactgcctccaaaaaaaatgaagtgtggtaaggagaaggattcagaagaacagcaactccagccccaggccaaggccgtggttcggagtagtcataggccaaaatgtcgaaaacttccttccgacccacaggaaagcacaaaaaaatctcccagaggtgccagtgactccgggaaggagcacaatggcgtccgcggaaaacataagcacagaaagcctacgaagcccgaatcccagtccccagggaaacgggcagactcacacgaagaagggtctctcgaaaaaaaggctaagtcttcatttcgagacttcatcccggttgtgctgtctacgagaacaagaagccaaagcgacctaaaggcacggaagcaaaaaacgtcttcgtcccaaagcctcgaacacaggctgagaaatcgcaacctgttactccccaacaaggtccagggaatctccgactccccgaacggcttcttacccaacaatcttgaggagccagcttgcttagaaaactcggagaagcctagtggcaaaaggaaatgtaaaacaaagcatatggctacagtttcagaagaagctaaagacgtggtactgtattgcttacagaaagattccgaggatgtgaatcacagagacaatgccggatacacagccctgcatgaggcgtgtagtcgcggatggaccgacatcttgaacatcctgctggagcacggcgcaaacgtcaattgttccgctcaggatggtactcgcccagtgcatgacgcggtggttaacgacaatctcgaaacgatatggctactgctgtcttacggagccgaccccacactggcaacgtactccggtcaaacagcaatgaaactcgcctcctcagatacgatgaagaggttcctctccgaccacctttccgacttgcagggcagagctgaaggcgaccccggtgtctcctgggacttttattctagcagcgtgcttgaggagaaagatggattcgcctgtgatctacttcataacccgcctgggagttctgaccaggaaggggatgaccctatggaagaggatgactttatgttcgagctttcagacaaacctctcttgccatgttacaacctgcaagtgtccgttagcagaggtccctgtaattggtttttgtttagtgatgtgctcaagcgacttaagctcagctcgcgtatattccaagccaggtttcctcatttcgaaatcaccaccatgccaaaagctgaattctacaggcaggtcgccagctctcagctgctgacccccgctgaacgtcctggcggactggatgaccggtctccccctggaagcagtgagacagtcgagctggtgcgttacgagccggatctcctccgccttttaggttcagaggtagaattccagagttgcaatagctag

SEQ ID NO: 215889 - DNA, 2226 bp, synthetic construct
  misc_feature 1..2226: note = Description of Artificial Sequence: Synthetic coding sequence
  source 1..2226: mol_type = other DNA
tagccactgctgcccgctcccagtggaagctccgcaccgcctcaccccgcaaagatgccctctggaactgaacagcagacagagggaaccagcgtgaccttctcacccctcaagtctccaccacagctagaacgcgagatggcatcccccccagaatgtagcgagatgcctttggacttatctagcaaaagcaaccggcaaaaattgcctctccctaaccaacggaaaacccccccaatgccagtcttgacgccagttcatacgagcagtaaagcactgctgtcgacggtcctgagccgctctcagaggaccacacaggctgctggaggcaacgtgacgtcgtgcttaggtagcaccagcagcccgttcgtgatcttccctgaaatagtgcgaaacggggaccctagcacatgggtgaaaaattccactgcattgatttccactatccccggaacatacgtcggagtggctaacccagtcccagcatccctgcttttaaacaaggatccaaaccttggtctgaatcgtgaccccaggcatctacccaagcaagaaccgatttctattattgatcagggagagccaaaaggaacaggcgctacatgcgggaagaaggggtctcaggcgggagccgaaggacagccctcaacagtaaagcgatacactcccgcacgcatcgccccaggcctcccagggtgtcaaactaaggagttgagtctgtggaaacctacaggaccggctaacatttatccgagatgctctgtgaatggtaaacctacatctactcaagtgctgcccgtgggatggagcccatatcaccaagccagtctgctaagcataggtatcagcagcgctgggcagcttaccccgtcacagggagccccaatcagaccgactagcgtggtttctgaattcagtggtgtgcctagtctgtcctccagcgaggcagtgcatgggcttcctgaaggacagccacgccctggagggagctttgtgccagaacaggatccagtcacaaaaaataaaacttgccgcatcgcagccaagccttacgaagagcaagtaaatcctgtgctgttgactcttagtcctcagacaggtactctggcgctgagcgttcagccgagcgggggtgatattcgtatgaaccaggggccagaggagtccgaaagccacctgtgcagcgattctactcccaagatggaagggccacagggggcatgtggccttaagctggcaggcgatacaaagccaaagaaccaggttctggcaacttacatgtcgcatgaactcgtacttgcaactccacagaatctgcccaagatgccggagctccctctgttgccacacgattcgcacccaaaggaacttattctggacgttgtgccgagttcccggcgaggaagctctaccgagcggccacagctgggctcccaggtggacctgggccgagtaaaaatggagaaggtggatggagatgtcgtgtttaacctggctacttgctttagagctgacggactccccgtggcgcctcaacgcggtcaggcagaagtgagggccaaggctgggcaggctagggtcaagcaagagagcgtaggggtgttcgcctgtaagaacaaatggcagcctgacgacgtgaccgagagcctgcccccaaagaaaatgaagtgtggtaaggagaaagatagcgaggagcaacagctgcagccccaggccaaggctgtcgtgaggtcaagccatcgtcccaaatgtcggaaactgccatcggacccacaggaaagtaccaaaaaatcgcctaggggcgcttcagattcaggtaaggaacacaacggagttagaggtaagcataaacacagaaagcccactaaacccgagtcccaatcaccgggtaagagagctgacagccatgaagaaggttccctagaaaaaaaagccaagagtagcttccgggactttatcccagtggtgctttccacaagaacacggagccagtccgacctaaaggccagaaaacagaaaaccagctcaagccagagcctggaacatcgattgagaaataggaacctcttattgcccaacaaggtccaaggaattagcgattccccaaacggcttcttgccaaataacctggaggagcccgcttgtctagagaactccgagaagcctagcggtaagcgcaagtgtaaaaccaagcatatggccaccgtttcagaagaggccaagtag

SEQ ID NO: 215890 - DNA, 4158 bp, synthetic construct
  misc_feature 1..4158: note = Description of Artificial Sequence: Synthetic coding sequence
  source 1..4158: mol_type = other DNA
acccccgcagctatccccacctcagcacctatacccgctagcttctcgctgagcagggtctgcttccccgctgctcaggctccagccatgcagaaggtgcctttatccttccagcccggaaccgtcctcactcccagtcagcctttggtgtatattccaccaccttcctgtgggcagcccttgtccgtggcaacattgccaacaacactgggagtaagcagcaccctcacccttcctgtcctgccgagctatctgcaggacagatgtctgcccggagtgttggcttctcccgaactgcgctcttacccgtacgcctttagcgtggctcggcctttaactagcgattctaagttagtgtccctggaggtcaaccggctgccctgtacaagcccgtccggttctacgacgacacagccagcccctgacggtgtgcctggtcccctggccgatacttccctcgtgaccgccagcgccaaggttttacctacgccccaacctctgcttcctgcaccatctggatctagcgctccgcctcaccccgctaagatgccctcgggaactgaacagcagactgagggaacttccgtcaccttctcaccacttaaaagccccccacagctggagcgggaaatggccagtccaccggaatgctccgaaatgcccctggatttatccagcaaatctaatagacagaaactgcccctgcccaatcaaagaaagacccccccaatgcccgtgctgactccagtacatacatcctcgaaagcgctgctaagtacagttctgagcagaagccagcgcactacccaggcagccggaggtaacgtcacctcgtgtctgggtagcaccagtagtccgttcgtgatattccctgagatagtgcggaatggcgaccccagtacctgggtgaagaacagtacagctctgataagtaccatcccaggaacgtatgtgggagtcgcgaaccccgtacccgcatctctcctgcttaacaaggatcctaacctgggattgaaccgcgatcccaggcatttacccaagcaggagccgatttccatcatcgatcagggagaacctaagggaaccggagccacctgcggaaagaaggggagtcaggccggtgctgagggacagccttcgaccgtgaaacgctatactccagcaaggatcgcccctggattgccagggtgtcagacgaaggagctgtctctctggaaaccgactggccctgctaacatctatcctcggtgctcagtcaatggaaagcctactagtacccaggtgctcccagtggggtggagcccctaccaccaagctagcctgttgtcaatcggtatcagctctgcgggacagctgaccccatcacagggtgcacccattcgccctacctcagttgtgtcagaattctcaggtgtgccctcgttatctagttctgaagcagtgcatggactccccgaagggcagcccagacccggtggctctttcgtccctgagcaagatcccgtgacaaaaaataagacttgtaggatcgctgctaaaccctacgaggagcaagttaaccccgtgctgctgacactgagcccacagaccggcacactagccttatccgttcagccctctggaggagatataagaatgaaccagggacccgaagagagtgagtctcacctgtgttcagatagtacaccaaagatggaaggccctcagggggcttgtggacttaagcttgccggtgatacgaaacctaagaatcaggttcttgcaacctacatgagccacgagttggtgctggctacccctcagaaccttcccaagatgcctgagctcccattgctgcctcacgactcgcatcctaaagagctaatcctcgatgttgtcccctcctcccgaaggggctcatctacagaaagaccgcagctgggctcccaggtagatcttgggagagttaaaatggaaaaggtggacggcgatgtcgttttcaacttggccacatgcttccgagctgacgggctccccgtggcccctcagagagggcaggctgaggtcagagctaaagctggacaggcccgtgtgaagcaggaatcagtgggtgtctttgcctgtaaaaacaaatggcagcctgatgatgtgactgagtccttgcccccaaagaaaatgaagtgcgggaaagaaaaagattccgaagagcaacaattgcagcctcaggccaaggctgtcgttaggagtagtcacagacctaaatgcaggaagctgccctccgatcctcaggaaagcactaaaaagagtcccagaggggcaagcgattcaggcaaagaacataacggggtgcgcggaaagcacaaacacaggaaaccaactaaaccggaatcccaatctccgggtaagcgcgctgattctcatgaagagggatccctcgagaagaaagcgaagtcttcgttcagggattttattcccgtggtgctcagtactcgcacacgaagccagtctggcagcatttgctcctcttttgcaggaatggccgactccgacatgggctcacaagaagtttttccaactgaagaagaagaggaagtcacaccgacacctgcgaagcgcaggaaggtgcggaagacccagagggacacccaataccggtcacaccatgcccaggataaaagtctcctctctcaaggcaggcgtcatctgtggcgcgctagagagatgccatggcggacggaagccgctcggcaaatgtgggacactaatgaggaggaggaagaagaggaggaagagggtctgcttaaaagaaagaagcgaaggcgccagaaatcccgaaaataccaaaccggagaatatcttactgagcaggaagatgagcagaggagaaagggaagggcggatcttaaggcgagaaagcagaagaccagcagttcacagtcactggagcatcggctgcgcaaccgtaatctgttactgcctaataaagtgcaggggatcagcgattcccccaatggctttctgcccaataacttggaggagccggcttgcctggagaactctgaaaaaccgagcgggaaaagaaagtgtaaaaccaagcatatggccactgtatccgaagaagcaaaagggaaaggccgttggagccagcaaaaaacccgaagccctaaatcccctacccccgtgaagcccaccgaaccttgtacaccttccaaaagtcggagcgcctcctcagaggaggccagtgagagtccaacagctagacagatccctccagaggctcggcgtctcattgtgaacaagaatgccggtgaaactcttctgcagcgcgctgccaggcttggctacaaagatgtagtgctctattgcctgcagaaggattctgaagacgtgaatcaccgtgataacgctgggtacaccgctcttcatgaggcctgctctagaggctggaccgatatattaaatatcctgctggaacacggtgcaaatgtcaactgtagtgcgcaggatgggacgaggcccgtacacgatgccgtcgtcaatgacaacctcgaaacaatctggctacttctcagctacggtgccgatcccactttagccacgtactctgggcagacagccatgaagttggcgtctagcgatacaatgaaacggtttctcagtgatcatctcagcgatctgcagggtagggcagagggggatcctggtgtcagctgggatttctactcttcctcagtcctagaagagaaggacggctttgcctgtgatctgcttcataacccccctggctcttccgaccaggagggggacgatccgatggaggaagacgacttcatgttcgaactaagcgacaagccacttctgccgtgctacaatctgcaggtcagcgtgagtcgcggaccatgcaactggtttttattcagcgacgtccttaagagattgaaactgagctcaaggatttttcaggccaggtttcctcatttcgaaatcactactatgccaaaggcagagttctacaggcaggtggcttcctcacagctcctgacccctgctgaaagaccaggaggcttagatgatcggagccctcccggaagttcagagactgttgaactggtacggtacgagccagacctgctcagattgctgggtagtgaagtcgagttccaatcttgtaattcgtag

SEQ ID NO: 215891 - DNA, 5135 bp, synthetic construct
  misc_feature 1..5135: note = Description of Artificial Sequence: Synthetic coding sequence
  source 1..5135: mol_type = other DNA
atgatttccaccgctccgctgtactccggcgtgcataactggacctcctccgatcgaatccggatgtgcggtattaacgaggaacggagagcccctctttcagatgaggaatcaaccacaggtgactgccagcacttcgggagccaggaattttgcgttagttcgtctttctccaaggtggaattgactgctgttgggagcggctctaatgccaggggcgcagaccctgatgggagtgctactgaaaaacttgggcacaagtctgaggataaaccagatgatcctcagccgaaaatggactacgccggaaacgtggcggaggctgagggctttctagtgcctctgagcagccccggagacggcctgaagctgcccgcttcagattccgcagaagcctccaatagccgggcagattgttcttggactcctttaaatacacagatgtccaagcaagtggattgctctcccgctggagtcaaggccctggactcccgccagggagtaggggagaaaaatacatttatcctggcgacactggggacaggggtcccagtggagggaacgctgcccttagtgactactaacttctcaccccttccagccccaatctgcccccctgcacctggatctgcgtctgttccccattccgtaccagacgctttccaggtgcccctttctgtgcctgcacccgtccctcactcaggcctcgttccggtacaggttgctacaagcgtaccggctccttctcctcctttggcaccagtgccagctctggctcctgcgcctccgagtgtacctacattgatcagcgatagcaatccactctctgtgtccgcaagcgtgctggttcccgttcctgcttccgctccgccatcagggcctgtcccactgtcagcgcctgcaccagcacctctttccgtcccagtgtcagcccctcctctggcgttaatccaagctcccgtacctcccagcgcaccgactctcgtcctcgcgccagtcccaacgccagtcttggcccctatgcctgcatcaactcctccggctgccccagccccacctagcgtgccaatgcctaccccaaccccaagttctggccctccatcgacacctaccttgattccagctttcgcaccaactcctgtgccagcccctacgcccgcacccatctttactcccgctcctacaccaatgcctgccgcaacgccagcagccattccgacctccgcaccaatacccgctagtttcagcctttcacgggtgtgcttccccgcagcacaggctccagccatgcagaaagtccctttatcgtttcagcccggaacagttttgacgccaagtcagccactggtgtatataccccctccttcatgcggacagccattatctgtagcaacattgcccaccaccctgggtgtatcctctaccctcaccttacctgttcttcctagttacctacaggacaggtgtctaccaggcgtcctggcatcccctgagctgaggagctacccatatgccttctcagtagcacgccctctgacatccgacagcaagctggtatccctggaagttaacagactgccgtgcacaagtccttctggaagcacaactacccagccagcgcctgacggagttccgggaccgctggcggacactagcctggtgacagccagcgccaaagtgttgcccacaccacagcctctgctgcctgcgccttctggcagcagtgcgccaccacaccccgcaaaaatgccctccgggaccgaacaacagacagaaggcacttctgtcaccttttcacccctgaagtccccgcctcagctcgagagagaaatggcttctccgccagagtgcagtgaaatgccactggacctgtcctcgaagtcaaaccgccagaagcttcctttacctaatcagcggaaaacacctccaatgccagtattaaccccagtgcacacgtctagcaaggcactgcttagtactgtacttagcaggagtcagcgtacgacgcaggcggcaggtggtaacgtcacatcatgcctgggatctacttcatcccccttcgtgatttttccggagattgtgcgcaacggggaccctagcacctgggtgaagaattccaccgctctgatctctacgatccctggcacttatgtgggcgtcgcgaaccctgtcccagcctcactgcttctgaataaggaccccaatctgggactgaacagggacccacgccacttacccaagcaggaaccaatttctatcatcgatcaaggagagccgaagggcaccggggctacctgtggaaagaaagggtcacaggccggtgccgaaggccagccctcgacagttaaacgatacactccggctcggatcgcccctggcctgcctggctgtcagacaaaagagctgtccctgtggaaaccaaccggccctgcgaatatttaccccaggtgctccgtgaatggaaaacccacatccacccaggtgctacccgtcggctggtccccatatcatcaggctagcttactatccatcggcatcagctcagctgggcagttaactccttctcagggcgctcccatcaggcccactagtgtggtgagcgagttttcaggagttcccagcctttcctcttctgaggctgtgcacgggctgccggaggggcagcctcgcccaggcggatcgttcgttccagaacaagacccggtcaccaagaacaaaacatgtcgcatcgctgccaagccttacgaggagcaagtgaatccagtgttgcttaccctcagcccccagactggaacactggctctgtccgtgcagccctctggtggggatatccggatgaaccagggaccagaggaaagtgagtcacacctgtgcagcgattctacccctaaaatggaaggccctcagggcgcttgtgggctgaaactcgcaggggacaccaagccaaaaaaccaggttctggcaacgtacatgtcacacgaactggtgctggcaacaccacagaacttgccgaaaatgcccgagctgcccttacttccccacgactcacaccctaaagaattgatcctggacgtcgtgccgtcatcgagaaggggttcctctaccgaacggccacagcttggatcacaggtcgaccttggcagggtcaaaatggaaaaagtcgatggagatgtcgttttcaacctagcaacgtgtttccgcgcagacggtctccctgtggcaccacagcgaggtcaggccgaggtgagggctaaggccggtcaggcacgtgttaagcaggagtccgtgggggtctttgcctgtaagaacaaatggcagcctgacgacgtgacagagagtctccctccaaaaaagatgaagtgcggcaaggaaaaggattccgaagagcagcagctccagccccaagccaaggctgttgtgcggtcaagtcaccgcccaaagtgcaggaaactgcccagtgacccacaggagagcaccaaaaagagcccacgaggagcatcggattcaggcaaggagcataacggcgtgagaggcaagcacaaacaccggaagccgaccaaaccagagtctcaatcccccggtaagagggcagatagccacgaggaggggagtctggagaagaaagctaagagctctttcagggactttattccagtggtgctgtccacacgaacccggtcacaaagtgggtccatctgttcctccttcgctgggatggctgattcagatatggggtctcaggaggtgttccccaccgaggaagaagaggaggtcactcctacccccgcaaagcggaggaaggtgcgaaagacccagcgagacactcagtatcgctcacaccatgctcaggataaaagcctgctcagccaggggagacgacacctgtggcgcgcacgtgagatgccatggcgtacggaagcggctcggcagatgtgggatacaaatgaggaggaagaggaggaggaggaggaaggcctgctcaaacgaaaaaagcgtcggaggcaaaagagtaggaaatatcagacaggtgaatatctcaccgagcaggaggacgaacagcgaagaaagggcagagccgacctgaaggctcgaaaacagaagacctcatcatcccagagtctggagcaccggctgcgcaacagaaacctcctgctgcctaataaggtgcaaggaatctcagattcaccgaatgggttcctccccaataacctggaggagcctgcgtgcttggaaaattctgagaaaccctccgggaaaagaaagtgtaaaaccaaacacatggcaactgttagtgaggaagccaaggatgttgttctgtactgtctccaaaaggacagtgaagatgtcaaccaccgagacaatgcaggctacacagctcttcatgaggcctgcagcagagggtggaccgatatcctgaacattctgcttgaacatggggctaacgtaaactgtagcgctcaggatggcacacgtccagtccatgatgcagtcgtgaatgataatcttgaaacaatctggcttctgttatcttatggggctgacccaactctggccacctacagcgggcagacggccatgaagctggcgagcagcgacactatgaagaggtttctctccgatcatctaagcgaccttcagggtcgtgctgagggggaccccggtgtgtcttgggatttttactcgagctcagtgttagaggaaaaagacggctttgcatgtgaccttctccataatccacctggctctagcgatcaggagggggacgatccgatggaggaggacgattttatgtttgaactttctgacaagcctttgctcccttgttataatttgcaggtgtctgtctcacgcggaccgtgtaattggttcttgttttcggacgtcctcaagcgcctgaaactcagcagtaggattttccaggctcgattcccacatttcgaaataactaccatgccgaaggccgaattttatcgccaggttgcgtcatctcagctcttgacccccgctgaacgtcccggtggtttggatgatcggagcccacctggatcgtcagagaccgtggaactggtgaggtacgaacccgatctcctccggctgctgggaagcgaggtggagttccagtcctgcaatagcta

SEQ ID NO: 215892 - DNA, 1260 bp, synthetic construct
  misc_feature 1..1260: note = Description of Artificial Sequence: Synthetic coding sequence
  source 1..1260: mol_type = other DNA
atgccgctgagtgactttatcctggctctgaaggacaacccctattttggcgcagggttcggcctcgtcggggtgggtactgctctggcactggcacgtaagggagtccagctgggcctggtggcatttcgacgccactacatgattacgctggaagtgccggctagagaccgatcatatgcttggctactgtcctggctgacgcgacattccacccgaacccaacatctgtccgtggaaacttcctatttacagcacgagtctggcaggatcagcactaagtttgaattcgtgccgtcgcccggaaaccattttatatggtaccgcggaaagtggatccgggttgagcggtcccgcgagatgcagatgatcgacctccagactggaaccccttgggagagcgtcaccttcaccgccctggggaccgatcgcaaagtgtttttcaatatcctggaagaggccagagagctcgcattacaacaagaagaggggaagaccgtgatgtacaccgctgttggcagtgagtggcggccttttgggtatccgaggaggcgtcgccctctcaattctgttgtgctacagcaggggttggcagaccggatcgtgcgggacgtccaggagttcatcgacaatcccaagtggtatacggacaggggaatcccatatagaagaggatacctcctgtatggaccacctgggtgcgggaaatcgtcctttattactgcactggccggagagctggagcacagcatttgtctcctgagcctgacagactcatctctgtcagacgatagattaaatcaccttctctccgttgcacctcagcagtccctcgtgcttctcgaagatgtcgacgctgcgttcctaagtcgggatctggctgtcgagaatcctgttaaataccaaggactcgggagattgacattttctggcctcctgaatgctctcgatggagttgcatcaactgaggccaggatcgtgtttatgaccaccaaccacgtcgatcggctggacccagccttgatccggccagggagagtggatctcaaagagtacgtcgggtactgcagccattggcaactgacccaaatgttccagaggttttaccccggacaggctccaagcctggcagagaactttgcagagcacgtactgcgggcaaccaatcagatcagccctgctcaggtgcagggctattttatgttatacaaaaacgatcccgtgggcgctattcacaatgctgaaagcttgcgacggtag

SEQ ID NO: 215893 - DNA, 1260 bp, synthetic construct
  misc_feature 1..1260: note = Description of Artificial Sequence: Synthetic coding sequence
  source 1..1260: mol_type = other DNA
atgccactcagtgatttcatcctggcactgaaggataacccatatttcggagcaggctttgggctcgtcggtgtcggcaccgctctcgccctagccaggaagggggtccagctgggactggtggccttccgcagacactatatgattactcttgaagtgcctgctcgcgatagatcctacgcttggctcctctcctggctcaccagacacagcactcgcactcagcatcttagcgttgagaccagctatttgcagcacgagtccggacgtatatcaacgaaattcgagttcgtcccttcaccagggaatcatttcatttggtatagaggtaaatggattcgggtcgaacgtagcagggagatgcagatgatagatttacagaccgggactccctgggaaagtgtgactttcaccgccctgggcacagatcggaaggttttttttaatatcctggaggaggcccgagaactggccctacagcaggaagagggaaaaacagtgatgtacactgcagtggggtccgagtggagaccctttggataccctcggaggagaaggcccctgaattctgtcgtattacaacaagggctggctgaccgcattgtgcgggatgtgcaggaatttatagacaaccccaagtggtacactgatcgcggaatcccctatcggaggggctacctgctctacggccctcctggctgcggcaaatcaagttttatcacagccctggctggtgaattagaacacagtatctgccttctcagcctcaccgattcctctttgtctgacgatcggctgaatcatctcctgagtgtcgcaccacagcagtccttggttctgctggaggacgttgacgcagccttcctctccagggacttagcagttgagaacccggttaagtatcagggccttggtcggctgaccttctctgggctccttaatgccctcgacggtgtagccagtacagaagctcgtatcgtcttcatgacaactaatcacgtggacaggctggaccctgctcttattagaccgggtcgtgtggatctaaaagaatacgtgggctattgctctcactggcagttgacccagatgttccagaggttttaccctggacaagcgccaagcctggcagagaatttcgccgagcatgttctccgtgcaactaatcagattagccccgcacaggttcagggttatttcatgctgtataaaaacgatcccgtgggagcgattcacaacgctgagtctctgagaaggtag

SEQ ID NO: 215894 - DNA, 1260 bp, synthetic construct
  misc_feature 1..1260: note = Description of Artificial Sequence: Synthetic coding sequence
  source 1..1260: mol_type = other DNA
atgcctttatccgatttcattctggcgctgaaagataatccgtatttcggggctggattcgggttggtgggagtgggcacggcacttgccttggcccgaaagggtgtgcaactggggctggttgcattcagacgacattacatgataacactcgaagtgcctgcccgagatcgatcttatgcctggttgctgtcctggcttacccggcactccaccaggacacagcatctgtctgtggaaacctcctaccttcagcacgagagtggacgtatatctactaaattcgagttcgtccctagccctggtaaccactttatatggtaccgcggaaagtggattcgtgtcgagcgtagtagagaaatgcagatgatcgatctccagactggcacaccttgggaatccgtgacattcacggctctgggaacggaccggaaagtgttcttcaacattcttgaggaggccagggaactcgccctacagcaggaggaaggtaaaactgtgatgtataccgccgtgggaagcgagtggcggcctttcggctacccaagacggagacgaccactgaatagtgtggtattacaacagggcctagcagataggatcgtacgcgacgtgcaggagtttatcgacaatcctaaatggtataccgaccgtggaatcccgtacaggcgtggctatctgttatacggcccacccggatgtggtaaatccagcttcattaccgctctagccggagagctggaacacagtatctgcttactgtctcttaccgatagctcactgagcgacgacagactaaatcatctactatcagtcgcccctcagcagtcactggtactactggaggacgtcgatgctgcctttctgtcaagagatctggctgtcgagaatccagtgaagtatcaaggtcttggacggttgacattctcaggactcctgaacgccctggatggagtggcgtcaactgaggcccgtattgtgtttatgacaacaaatcatgtggaccgacttgacccagccttgattaggccaggcagagtggatctgaaggagtacgtaggctactgctcccattggcaactcactcaaatgtttcagcgcttttaccccggacaggctccatcacttgccgagaatttcgccgagcacgtgctccgcgcaaccaaccagatttcaccagcccaggtacagggttacttcatgctgtacaaaaacgaccccgtaggcgctatccacaacgccgaaagcctcagacgatag

SEQ ID NO: 215895 - DNA, 1260 bp, synthetic construct
  misc_feature 1..1260: note = Description of Artificial Sequence: Synthetic coding sequence
  source 1..1260: mol_type = other DNA
atgccattgtctgattttattctggcactgaaagacaacccttatttcggcgctgggttcggccttgtgggagtgggaacagccctcgccctggcacgaaaaggggtccaattaggcctggttgcattccgcagacactatatgataactctggaagttccagcgagagaccgcagttatgcatggttacttagctggctcacaagacacagtactaggacacagcacctgtccgtcgagacatcttatctgcagcacgagtccggcagaatcagcaccaagttcgagtttgtcccaagccctgggaatcatttcatttggtacagaggcaagtggattcgggtggagcgcagtagagaaatgcagatgatcgatctgcagacgggtactccttgggagtctgtaacatttacagcgcttgggactgacaggaaggttttcttcaacattcttgaagaagcgagagaactggctctgcaacaggaggaagggaaaacggttatgtatacagcagtgggctctgaatggcgacccttcggatacccgaggcgcagacgccctctgaactccgtggtcctccagcagggactggctgatcgaatagtccgggatgtccaggagtttatcgacaatcccaaatggtacaccgataggggaatcccataccgacgcggatacttactctatggccctccaggctgcggaaagtcaagctttatcaccgctcttgctggcgaactggaacactctatttgcctgctgtccctgaccgattctagtctgagcgacgatcgtctcaaccacctcttgagcgtggcaccacaacagagcctcgtccttttggaggacgtcgacgccgcattcttaagcagagatctggctgttgaaaatcctgtcaagtatcaaggacttggcaggctaacattcagcgggttgctcaacgccctcgacggggtagcaagtactgaagccaggatcgtgtttatgacgactaaccacgtggaccggctggatcccgctctcattcgcccaggcagggtggatctcaaagagtacgtggggtactgcagccattggcagctgacccaaatgttccaacgcttctatcccggacaggcaccctccctcgcagaaaattttgccgaacatgtacttcgggcaaccaatcagatctcccctgcccaagtgcagggatatttcatgttgtataaaaatgaccccgtcggagcgattcacaatgcagaaagcctccgacggtag

SEQ ID NO: 215896 - DNA, 1260 bp, synthetic construct
  misc_feature 1..1260: note = Description of Artificial Sequence: Synthetic coding sequence
  source 1..1260: mol_type = other DNA
atgcccctgagcgatttcatccttgccctgaaagacaatccctatttcggagccggtttcggactggtgggagtgggcaccgcccttgctctggcgaggaagggagtgcaactaggtctggtggcttttcggcgtcactacatgatcacccttgaagtgcccgctcgggatcggtcttacgcttggcttctctcctggctaacaagacattctacaaggacgcagcatttatctgtggagacctcctatctgcagcatgagagcggacggatctcaaccaaatttgagtttgtgcccagcccagggaatcatttcatctggtaccgcggaaagtggatcagggtcgagaggtctagagaaatgcagatgatagaccttcagacgggcaccccatgggagtcggtgactttcaccgcactgggcaccgaccggaaagtgttttttaacatcttggaagaagcacgcgagctcgcgcttcagcaagaggagggcaaaacagtgatgtacacggctgtaggatccgagtggaggccatttgggtatccaagacgccgaaggccactgaactccgtggttctgcagcagggcctggccgatcgaatagtacgcgatgtgcaggagttcatagataacccaaagtggtatactgatcgcggaattccttatcgacgcggttatctgttgtatggcccaccaggctgcgggaagtcttctttcattaccgccctggccggagaactggagcattccatttgtctgctgagtcttactgacagcagcttgtcagatgatcggctgaatcatctgctgtccgtggctccccaacagtcccttgtgctgcttgaagatgtggacgccgcttttctcagtagagatctcgcagtggaaaacccggtcaagtatcagggattgggaagactaacgtttagtgggttgcttaacgctctagacggggtggcctctacggaggccagaatcgtgtttatgaccacaaatcacgtggacagactcgaccccgcactgatcaggcccggacgggttgatcttaaggagtatgtcggatattgttctcattggcagcttacgcagatgttccagcggttttaccctggccaggctccttccctagccgaaaatttcgcagaacacgtattgcgtgctaccaaccagataagtcccgcacaagtgcagggatatttcatgctatataaaaacgacccggtaggagcaattcataacgctgaatctttgagaagatag

SEQ ID NO: 215897 - DNA, 333 bp, synthetic construct
  misc_feature 1..333: note = Description of Artificial Sequence: Synthetic coding sequence
  source 1..333: mol_type = other DNA
atgccccttagcgactttattctggcactgaaggataatccttactttggagccggatttggactcgtgggcgtgggtactgccttagccctagccagaaagggtgtgcagctgggattggttgcattccggagacactatatgattacactcgaggtaccagccagagaccgcagctatgcttggctgctctcctggcttactcgccacagcaccagaacccagcatctctccgttgaaacgagctacctgcaacatgagagcggccgaataagcactaagttcgaattcgtaccctcccccggaaaccactttatttggtacaggggatag

SEQ ID NO: 215898 - DNA, 234 bp, synthetic construct
  misc_feature 1..234: note = Description of Artificial Sequence: Synthetic coding sequence
  source 1..234: mol_type = other DNA
atgcccttgtctgacttcattctggcactgaaggataatccctattttggcgctggattcggcttagttggcgtgggaaccgccctagcactcgctcgaaagggtgttcagctggggttggtggcgttccggcgtcactatatgattacgctggaagtgccagctagagataggtcttacgcctggctactttcctggctgacacggcactcgacccggactcagcacctgtag

SEQ ID NO: 215899 - DNA, 621 bp, synthetic construct
  misc_feature 1..621: note = Description of Artificial Sequence: Synthetic coding sequence
  source 1..621: mol_type = other DNA
atgcccctgagtgacttcattcttgcactcaaggacaacccttacttcggggcaggcttcggtctggtgggcgtcggaactgcattagccttagctcggaagggagttcagctgggactcgtggccttccggagacattatatgataaccctagaggttccagcacgggaccgcagttacgcttggctgctttcctggctgacacgccattcaactcgtactcagcatctctctgtggagacctcgtatctccaacacgagagcggcaggatttccacaaaatttgagttcgttcctagccccggaaaccattttatttggtaccgaggcaagtggattcgcgttgaaagatccagagagatgcagatgatcgatctgcaaacaggcactccgtgggaaagcgtgacattcactgcgctaggcacagaccgaaaggtattctttaacattctcgaagaggctagagaattggcgttgcagcaggaagaggggaaaactgtcatgtacacagctgtagggtcagaatggcggccattcggataccctagaaggcgcaggcctctcaacagcgtggtgctacagcagggcctggcagacagaattgtgagagatgtacagtag

SEQ ID NO: 215900 - DNA, 1260 bp, synthetic construct
  misc_feature 1..1260: note = Description of Artificial Sequence: Synthetic coding sequence
  source 1..1260: mol_type = other DNA
atgcccctgtccgacttcatactagcactcaaggacaacccttatttcggagcaggattcgggttagtcggagtgggcactgcacttgcgttggcgagaaaaggagtccagttagggctggtcgcttttcgccgacattatatgattacattagaggtcccggcacgggatcggagctacgcttggctacttagttggctcacccgacactctactagaacccagcatctgtcagtcgagacctcttacctccaacacgagagcggacgcataagcacgaaatttgaatttgtcccctccccgggtaaccacttcatctggtatcggggtaaatggataagggtcgagaggtcgagggagatgcagatgatcgacctccagactggaactccttgggaaagtgtcactttcactgccttgggcaccgatagaaaagtgttctttaacattttagaagaagcaagagagctcgcccttcagcaagaagaggggaagacggtgatgtacacagcagtgggcagcgagtggaggccctttggctatcccagaagaagacgccctttaaattcagtggtcctgcagcaaggtctggccgaccgtatagtcagagatgtgcaagagttcatcgacaaccccaagtggtacaccgatagaggaataccgtatcgccgaggatatctgctttacggtcccccagggtgcggaaagagctcatttatcaccgctctggcgggtgagttagagcattccatttgtctgttgtcactaacagattcatccctgtccgatgacaggttgaaccatcttctgtccgtggcaccgcagcagagcttggtgctcctcgaagatgtggatgcagccttcttgtcacgtgacctggctgtcgaaaaccctgtgaagtaccagggtttggggagactcacatttagcggcctcctgaatgccctggatggtgtcgcctcaacggaagctagaattgtgtttatgactacgaaccatgtggacaggctggatcctgccctcataagacctggccgtgtggatctgaaagagtacgtgggctactgcagccactggcagctgacccaaatgttccaacggttctatcctggccaggcccctagccttgccgagaacttcgctgagcatgttcttagagcaactaaccaaatctcgcccgctcaggtccagggatatttcatgctctacaaaaacgacccggtgggagccatacacaacgcagaaagcttgaggcggtag

SEQ ID NO: 215901 - DNA, 1260 bp, synthetic construct
  misc_feature 1..1260: note = Description of Artificial Sequence: Synthetic coding sequence
  source 1..1260: mol_type = other DNA
atgcctctgtctgactttatacttgcactgaaggacaatccttacttcggggcaggctttggcctcgtcggagtgggcaccgctttggccctggcgcgaaaaggtgtgcagctgggattggttgcattccggagacactacatgatcacactggaggtgccagccagggataggtcttatgcctggctgcttagttggttgacccgccactccactaggactcagcatcttagtgtggaaacgagctacctgcagcacgagtctggaaggatctctaccaagtttgaatttgtaccttcaccaggcaaccattttatatggtacagggggaagtggattcgggtagaaaggtcaagagagatgcagatgatcgatctgcaaacgggaacgccgtgggaatcagttaccttcaccgctctcggcacagataggaaagttttcttcaatatccttgaggaagcacgcgagctagcattacaacaggaagagggcaaaaccgtgatgtatacagccgtcggatccgagtggcggcctttcggatatcccagacggcgacggcctctgaattctgttgtactccagcaaggccttgccgaccggatcgtacgggacgtgcaggagttcatagataacccaaagtggtacacggatagaggaattccctacagacgcggatatttgctatacggccctccgggttgcgggaaaagtagtttcatcactgccctcgctggagagctggagcactctatttgcctgttgagcctcaccgatagctccctcagcgacgacagacttaatcatctgctgtcagtcgctccccagcagtctcttgttctgctggaggatgtagatgctgcgtttctgtcacgtgacctggcagtcgagaatccggttaagtatcagggacttggcaggctgacattctcgggacttcttaacgctctggacggggtagcatcaactgaggctaggatcgtatttatgaccaccaaccacgtcgacagactggatcctgcgctgatcaggccaggtcgagtggatctgaaggaatacgtgggctattgttcacactggcagcttactcaaatgttccagcggttttacccaggacaagctccgtccctcgccgagaactttgccgagcatgtgttgcgagccaccaaccagataagtcccgctcaagtccaaggatatttcatgctgtataaaaatgaccccgttggcgctatccacaatgctgagtcattacggcgttag

SEQ ID NO: 215902 - DNA, 621 bp, synthetic construct
  misc_feature 1..621: note = Description of Artificial Sequence: Synthetic coding sequence
  source 1..621: mol_type = other DNA
atgccgctatctgactttatactcgccttgaaggataatccatattttggggctggattcgggctggtcggggtaggaactgctctcgctctcgcgagaaaaggggtccaactgggactggttgctttccggagacactacatgatcacgttggaagtacccgctcgcgaccgttcgtacgcatggcttttaagctggttgacgagacatagtaccaggacccagcatttgagcgtcgagacatcctatctgcagcacgagagcggacggattagtactaagttcgagttcgtcccatcgcccggaaaccatttcatctggtacagaggtaaatggattagggtcgaaaggagcagagaaatgcagatgatcgacttacaaacaggtaccccatgggaaagcgtgacctttacagctctgggaactgatcgcaaagtgtttttcaacatcctggaagaagcccgtgaattggccctgcagcaggaagaagggaagaccgttatgtacacagccgtcggatccgagtggagaccctttgggtacccacgtcggcgaagacctcttaattctgttgtactacaacagggtctggccgatcggatcgtccgggacgtgcagtag

SEQ ID NO: 215903 - DNA, 1623 bp, synthetic construct
  misc_feature 1..1623: note = Description of Artificial Sequence: Synthetic coding sequence
  source 1..1623: mol_type = other DNA
atgtatgaaaacgagtgtgaatgtcagttgttactgaaagaaatgctcgagcgccttaataaggaggccgacgaggcgctcctgcacaaccttcgacttcagttggaagcgcagttcttacaggatgacataagcgcagcaaaagatcggcacaaaaagaatctcttagaggtccaaacgtatattagcatcctccagcagattatacataccacaccccctgcatctatcgttacttccgggatgcgcgaagagaaattactaaccgaacgcgaagtggcggctctacgtagccagctggaagagggcagggaggttttatcccacctgcaagcgcagagggtggaactgcaggcgcagacaacgactctggagcaggctattaagagtgctcatgagtgttatgacgatgagattcagctctataatgagcagattgaaacgcttcgaaaggaaattgaggagacagagcgcgtcctggaaaaatcttcatacgactgccgccagttagctgtggcgcaacaaaccctgaagaacgaacttgatcgttaccacagaatcattgagatcgaggggaatcggctgacaagcgcttttatcgaaacacctattccactgtttactcaaagccacggcgtgtccttgtcaacgggctctggaggtaaggatctcacgcgcgctcttcaggacatcacggccgctaagcccaggcagaaagcactccctaaaaatgtgcccaggaggaaagagatcataaccaaagataaaaccaatggcgctctcgaggatgctcctctaaagggactagaggacaccaagttggtgcaggttgtgctgaaggaggagagtgagtccaagttcgagtcagagtccaaagaggtctcaccactcacgcaggaaggcgctcccgaggatgtgcccgatggcggtcagatcagcaagggtttcgggaagctgtatcggaaggtgaaagagaaagttcggtccccaaaggagccggaaacccctaccgaactttacaccaaagagcgccatgttttggtgacaggggatgcaaactatgtggaccctaggttctacgtttcttccattacggccaaggggggagtggctgtgagcgtggccgaagatagtgtgctctacgatgggcaggtggagcctagcccagagtccccaaaaccccctctcgagaacggccaggtgggccttcaagaaaaggaggatggccagcctattgaccagcagccaattgacaaggaaatagagccagacggtgccgaacttgagggtcccgaggaaaaacgagagggtgaggaacgagacgaagagtcccgtcgcccatgcgctatggtcacccctggcgcagaggaacccagcattccggagcctcccaaaccagccgcagaccaggacggcgcagaagtcctcggcactcgctcccggagcttgcccgagaaagggccaccgaaggcactcgcatacaaaacggttgaggtggttgagtctatagaaaaaatcagtactgagtctattcaaacatatgaagagaccgccgtgattgtcgaaacaatgattggaaagaccaaatctgacaagaagaaatccggagagaaatcatcctag

SEQ ID NO: 215904 - DNA, 1998 bp, synthetic construct
  misc_feature 1..1998: note = Description of Artificial Sequence: Synthetic coding sequence
  source 1..1998: mol_type = other DNA
atgtaccgcaggagctatgtgttccagactaggaaagagcagtatgaacacgccgacgaggcctcaagggccgcagagcctgagaggccggctgacgagggttgggccggagcaacctctcttgccgctttgcagggattaggagagagggttgcggctcatgtgcagcgggctcgcgctttggaacaaaggcatgccggactgcgaaggcagctcgatgcatttcagcgactaggcgagctggccggacctgaggatgccctggccagacaggtcgagtccaatagacagcgagtgcgagatctggaagccgagcgtgccaggttggagcgtcagggcaccgaagctcaaagagccctggacgaatttaggtccaagtatgaaaatgagtgcgagtgtcagctgctcctgaaggagatgctagaaaggcttaacaaagaagccgacgaggccctgcttcacaaccttagactgcagctcgaagctcaatttttgcaggatgatatatccgcggcaaaagatcggcacaagaaaaacctgctcgaggttcagacgtacatttcaatcctccagcagataatccatacaactccccctgccagtattgtcacttcagggatgcgagaagagaaacttctcaccgaacgcgaagtggccgcactgaggagccaactggaggagggcagggaggtgttatcccatctgcaagcacagcgcgttgagctgcaagcccagaccacgaccttggaacaggccataaaaagtgcccacgagtgctatgacgatgagatccagttgtacaatgagcagatagagacacttcggaaagagatagaagagaccgagcgagtgcttgagaagtcgtcatacgactgccgtcagctcgcggtcgcccaacagactctgaagaatgagctggacaggtaccacaggataatcgaaatagagggcaatcggctgaccagcgcttttatagagactcccatccctttgtttacccagtcacacggagtctcactgagcacagggtcgggcggaaaagacttgacccgggctttgcaagacatcactgccgcaaaaccccgacagaaggctctaccaaagaacgtcccaaggcggaaagagatcattaccaaggacaaaaccaacggagctctggaggacgctccactgaagggcctggaggataccaagcttgtgcaggtggtgctgaaagaagaatctgagagcaagttcgaatctgagtctaaggaagtttcccctctgacccaggaaggggcacctgaggacgtgcccgacggcggacagatttcgaagggttttggcaagttgtaccggaaagtcaaagagaaggtgagaagtcccaaggaaccggaaacccctacagaactctacacaaaggagagacacgtcctcgtgaccggcgacgccaattacgttgacccacggttctatgtctcctctattacagccaagggaggagtagcagtgagcgtggctgaggattctgttctgtatgacggtcaggtggagcccagtccagaatcccctaagcctcccctcgaaaacgggcaggtaggattacaagagaaagaagacgggcaacccattgatcagcagcccatcgataaagagatcgaacctgacggagctgaactggaaggccctgaagaaaaaagggagggagaagagagagacgaggagtcccgtagaccctgtgcaatggtaacacccggagccgaggagccctcaattccagagcctcccaagcctgcagcagaccaagacggtgctgaggtgctgggaactagaagtaggtcgctgcccgaaaaaggaccacctaaagctctggcgtacaagactgtggaagtggtggagtctatcgaaaagattagcactgagtccattcagacctatgaggaaaccgcggttattgttgaaacaatgattggtaaaacaaaatccgacaaaaagaagtcgggcgaaaaaagcagttag

SEQ ID NO: 215905 - DNA, 1581 bp, synthetic construct
  misc_feature 1..1581: note = Description of Artificial Sequence: Synthetic coding sequence
  source 1..1581: mol_type = other DNA
atgctcgagcgcctaaataaggaggctgacgaagctctactgcacaacctgaggctgcagctagaggcccagttccttcaggatgatatctctgcagccaaagacaggcacaaaaagaacctgttagaggttcagacgtacatttcaatactacagcagatcatccatacaacccctccggcttctatcgtgactagtggcatgcgagaggagaagctgttgactgagcgggaagtcgctgccctgagatcacaattagaggagggcagggaggtcttgtcccatttgcaggctcagcgtgtggaactgcaggcacagacgactactctggagcaggcgattaaatccgcccacgagtgctatgatgatgagatccagctgtacaacgaacaaatcgagacgttgaggaaggagatcgaagagacagagcgggtgctggagaaaagctcttacgactgccgtcagctcgccgttgctcagcagaccctgaaaaacgagctagacagatatcatagaatcattgagattgaagggaaccggttgactagtgccttcattgaaactccaatccccctatttacacagtctcacggcgtatctctatctactggatcagggggaaaagacctgaccagagctctgcaggatatcactgctgcaaagcccaggcagaaggcccttcccaagaatgttcctaggagaaaggaaatcatcaccaaagacaaaactaatggcgctctggaagacgcccctctgaaggggcttgaggataccaaattagtgcaggtcgttctaaaggaagaaagcgagagcaaatttgaaagtgagtcaaaggaggtgtccccactcacccaggagggtgcccctgaggatgtgcctgacgggggtcagataagcaaggggttcggaaaactgtaccgcaaggtaaaagagaaggtgcgctcccccaaggagcctgagacccctacagaactatatacaaaggaaagacatgtattggtcacaggcgacgctaattatgtcgaccctcgtttctatgtttcttctatcactgccaagggcggtgtcgccgtctccgtcgccgaggacagtgttctttatgacggacaggtggagccttcccccgaaagtcccaagccaccactggagaatggacaagttggtctccaagagaaggaggacggccagcccattgaccaacagcctattgacaaggaaatcgagccagacggggcagagctggagggccctgaggaaaaaagggagggtgaagagcgtgatgaagaaagtcggaggccgtgtgctatggtgaccccaggagccgaggaacctagcatcccagagcctcccaaacccgcagccgaccaggacggggctgaagtgctggggacaagatcccgaagccttcccgaaaagggccctcctaaagcgctggcttacaagacagtagaagtcgtggaatccatagagaagatttccaccgagtcaattcagacttacgaggaaacagccgtaatagtcgagactatgattggcaagactaagtcagataaaaagaagagtggtgagaagtcctcctag

SEQ ID NO: 215906 - DNA, 1581 bp, synthetic construct
  misc_feature 1..1581: note = Description of Artificial Sequence: Synthetic coding sequence
  source 1..1581: mol_type = other DNA
atgctagaaagactgaataaagaagccgatgaagccttgttgcacaatttgcggttacagctggaagcgcagttcctgcaagatgacatttctgcagccaaagaccgccacaagaagaatctgctggaggttcagacttatatctctatattacaacagatcatccacaccaccccccctgccagtatcgtgacctccggaatgcgagaggagaagctcttgacggagcgtgaagtggctgccctccggtcccagcttgaagagggacgagaagtgctgtcacacctgcaagcacagcgggttgagctgcaagcgcagacaacgacactcgagcaggccataaaatccgcacacgagtgttatgacgacgagatccagctgtacaatgaacaaattgagacactcagaaaagaaattgaggagaccgaaagagtccttgagaaaagctcgtacgactgcaggcaattggctgtggcacagcaaaccttaaaaaatgagcttgatcgataccacagaatcatagaaatcgagggaaatcgtctgaccagcgcattcatagaaaccccgatccccctgttcacccagtcccatggagtgagtctgtctacaggtagtggcggaaaggacctcacccgagcgctgcaggacatcacggctgctaagccacgccaaaaggcactgcccaagaatgtgcccagacgcaaagagatcatcaccaaggacaagacaaatggcgctctcgaagacgcccctctcaagggtctcgaagataccaaattagttcaagtcgtgcttaaagaagagagcgagagtaaatttgaatccgagtccaaagaagtgagccccttgacacaagagggagcgccagaggatgtccctgatggcggacaaataagtaagggattcggcaagctctaccggaaggtgaaggaaaaagtgcggagccccaaggaacctgagacacctactgaactatacacaaaagagcggcacgtgctggtgactggggatgctaactatgtcgaccccagattctatgtgtccagcatcactgccaagggaggggtagccgtatctgtggcagaagacagcgtcctctatgatggacaggtggagcccagccctgagagcccaaagccccctctggagaacgggcaagtcggactccaagagaaggaagatgggcagccaattgaccagcagcctatcgataaggagattgagcccgatggagcggagctcgaaggacctgaggaaaagagggaaggagaagagcgggatgaggagtcccgacgaccatgtgcaatggtgacgcccggagccgaagaaccctccatacccgaaccgccaaagcccgctgcagaccaagacggggcagaagtgctaggaacgcgtagccggtccttaccagaaaagggacccccaaaagctctggcctacaaaacagtggaggtcgtagagagcatcgaaaagatctccacagagtccattcagacctacgaagagaccgccgtaatcgtcgagacaatgataggaaagactaagtctgacaaaaagaagagtggtgagaagagtagctag

SEQ ID NO: 215907 - DNA, 1248 bp, synthetic construct
  misc_feature 1..1248: note = Description of Artificial Sequence: Synthetic coding sequence
  source 1..1248: mol_type = other DNA
atgtctgagagacgcgttgttgtcgacctgcctactagtgcatctagttccatgccgttacagcgcagacgggcaagttttcgtggcccacgctcctccagttcactcgaatccccacccgcatctcgaacaaatgctatgtccggattggttcgcgctccaggtgtgtacgtgggaactgccccttctggctgcattggcggattgggagcacgggttactcggagggccctcggaattagctcagttttcctgcagggcctcagaagctctgggctggcaacggtgcctgcacccggtctggagcgagaccatggggcagtggaagatctcggtgggtgtctggtggaatacatggccaaggtccacgcgctagagcaggtctcacaggaactggagactcagttgcgcatgcatctggagagtaaagccacaagaagcggtaactggggagccctgcgagcgtcctgggccagctcttgccagcaagtgggggaagcagtgctggagaatgcccgtctgatgttacagactgagactatccaagcaggggctgatgactttaaagagcgctacgaaaatgagcagcctttcaggaaggcagcagaggaagaaatcaatagcctgtacaaggtcatcgacgaagcgaaccttacaaagatggatctggagtctcagattgagagtctgaaagaagagcttggcagcctaagccggaactacgaagaagacgttaagttgctccacaaacagctagcgggttgcgagcttgagcagatggatgcaccaattgggaccggactggatgatatcctagaaactatacgtatccagtgggaaagggacgtggagaagaaccgggttgaggcaggtgctctactgcaggctaagcagcaagccgaagtcgcccacatgtcccagacccaggaggagaagctcgcagccgcactccgtgtggagctccacaataccagctgtcaagtacagagtctgcaggcggagacggagtccctgcgagcactaaaacgaggtctggagaacactctgcacgatgcaaaacactggcacgatatggagttgcagaaccttggggcagtggtgggtaggctcgaagcggagctgcgagagatcagagctgaagccgagcagcagcaacaggagagagcacacctcctcgctagaaagtgccagctgcagaaggacgtcgccagctaccacgccctgctcgaccgggaggagtcaggatag

SEQ ID NO: 215908 - DNA, 1353 bp, synthetic construct
  misc_feature 1..1353: note = Description of Artificial Sequence: Synthetic coding sequence
  source 1..1353: mol_type = other DNA
atggaaggttcaaaaacttctaacaactcaacaatgcaggtgtctttcgtatgtcaacggtgttcacagcctttgaaactcgacacgtcttttaagattttggatcgggtgaccattcaggaactaacagcaccactgctaaccaccgcgcaggcaaaaccaggcgagacacaggaggaggaaacaaattcaggcgaggagcctttcattgagactcccaggcaagacggcgtgagccggaggtttattccacctgccagaatgatgtctactgaatccgctaatagctttacactcattggcgaggcatctgacggaggcacgatggagaatctttccagaagactaaaagtgaccggggatctgttcgacatcatgtccggccagacggatgttgatcacccgctgtgcgaggagtgcactgatactctcttagatcaactggacacccaattaaatgtgaccgaaaacgagtgtcagaactacaagaggtgtctggagattttggaacaaatgaatgaagatgacagcgagcagctccaaatggaactgaaagaattggccctggaggaagagcggttaatccaggagcttgaagatgtggaaaagaatcgaaagatcgtcgccgagaatctggagaaggtccaggccgaagccgaacggcttgatcaggaggaggcccagtaccagcgggagtactctgaatttaaacgccagcagttggagttagacgatgagctgaagtccgtcgaaaaccagatgcgatatgcacagacccagctcgacaagctgaaaaagacaaacgtgttcaatgcaacttttcacatttggcactctggccagtttggcacaatcaacaacttccgcctgggtaggcttcccagtgtgcctgttgaatggaatgaaatcaatgcagcttgggggcaaacagtgctgctgcttcacgcccttgcaaataagatgggactcaagttccagaggtacaggctagtaccctatgggaaccattcatacctggagagcttaactgataagtccaaagaactcccgctgtactgcagcgggggactgaggttcttctgggacaataaattcgatcacgcgatggtggcgttcttagactgcgtacaacagttcaaggaagaggtggagaagggagagacccgcttttgtctaccataccgcatggatgtcgagaagggaaagatcgaggatacgggcggatccgggggatcatactccatcaaaacccagttcaattccgaagaacagtggaccaaagccctaaagtttatgcttaccaacctcaaatggggacttgcatgggtttccagccagttttacaataagtag

SEQ ID NO: 215909 - DNA, 840 bp, synthetic construct
  misc_feature 1..840: note = Description of Artificial Sequence: Synthetic coding sequence
  source 1..840: mol_type = other DNA
atggaaggctctaaaacatctaacaattctactatgcaggtctctttcgtatgtcaacggtgtagccaacccctcaagctggacacatcttttaagatactggaccgggtgacgatccaagagctcacagccccattgctgacaaccgcacaggccaagcctggcgagacgcaggaagaggagaccaacagcggggaagagccattcattgaaacccctcgccaggacggcgtgtcacggcgattcattccgccagcacggagatgtctggagatactagaacagatgaatgaagacgattcagaacagcttcagatggagctcaaggaactagccctggaagaggagaggttaatccaggagctggaggacgtcgagaaaaaccggaagatcgttgcagagaatctggagaaggtacaggccgaagctgagagattagaccaggaggaggcccagtaccagcgcgagtatagtgaatttaaacgacaacagctggagttagatgatgagctgaaaagcgtggagaatcagatgaggtatgctcagactcagctggataaactgaagaaaacaaacgtgtttaacgccacttttcacatttggcacagcggccagttcgggactatcaacaactttcgattaggtaggctccctagcgtgcccgtcgaatggaacgagattaatgcagcttggggacaaacagtcctcttgctccatgctctggccaataagatgggactcaaatttcagagatataggctagtgccttacggtaatcattcttaccttgagtccctgactgataaaagtaaagacggctgcggtgaacggcaggactag

SEQ ID NO: 215910 - DNA, 1092 bp, synthetic construct
  misc_feature 1..1092: note = Description of Artificial Sequence: Synthetic coding sequence
  source 1..1092: mol_type = other DNA
atgatgtccacagagagcgcaaattcattcacactgataggcgaggcaagcgacggcggaaccatggagaatttgtccagacgcctgaaagtgaccggcgacctctttgatatcatgagcggtcagaccgacgtggaccaccctctatgtgaggagtgtacggataccctcctggatcagttagacacccagctgaatgtgacggagaacgagtgccagaactataagcggtgcctggaaattctggagcaaatgaacgaggatgatagcgagcagctgcagatggaattaaaagagctcgctctggaggaggaacgcttaatccaagagcttgaagacgtcgaaaaaaacagaaagattgttgctgagaacttggagaaggtgcaggccgaggctgagagactcgaccaggaggaagctcagtaccagcgggagtacagtgagtttaaacggcaacaacttgagttggatgacgagttaaaatctgtcgagaatcagatgcggtacgcccagacacagttagataaactcaaaaaaacgaatgtgtttaatgccactttccacatctggcactctggacagtttggcactatcaataatttccgccttggcaggttacctagtgttccggttgagtggaacgaaattaatgcagcttggggccagacagtgctcctcctgcacgccctggcgaataagatgggcttaaaatttcagcggtataggctcgtaccctatgggaaccactcatatttggagtccctcacagataaaagcaaggagcttcctctttactgttccggcggtctgcggttcttttgggacaacaagtttgaccacgccatggtggcttttttagattgcgtgcagcagtttaaagaggaagtggaaaagggggaaacacggttttgtctgccgtataggatggacgttgaaaaaggcaagatagaggatacggggggtagtggagggtcctactccatcaagacgcagttcaattctgaggaacagtggactaaggccttgaagttcatgctgaccaacctgaagtggggtctggcatgggtgtcgtcgcagttctacaataagtag

SEQ ID NO: 215911 - DNA, 5393 bp, synthetic construct
  misc_feature 1..5393: note = Description of Artificial Sequence: Synthetic coding sequence
  source 1..5393: mol_type = other DNA
atggaacagctaacaactctgccacggccaggggatccaggcgcaatggaaccgtgggcactgcctacatggcatagctggacccctgggcgaggcggagagcctagctcagcggctccctccatcgctgacacacctcccgcagcactgcaactgcaggaactgcgatctgaggagtcttctaaaccaaagggtgatggatccagcagacccgtgggcggtactgacccagagggcgcagaggcttgtctccccagcttaggacagcaagccagcagcagtggaccagcatgccagcggcctgaagatgaagaggtggaggctttcctaaaagctaagctaaacatgtcctttggagacaggcccaacctcgagctgttgcgtgctctgggtgagctgcggcaaagatgcgctattctgaaggaagaaaaccagatgctgagaaaaagctctttcccagagacagaggagaaggtgcggaggctgaaacgcaagaacgccgagctggccgtgatcgctaagaggctggaggaacgggctcggaaacttcaggagacaaacctacgcgtggaaggcccacaatggctgcacgtaagagactttgaccggctcctccgggagtctcagagggaggtgctccggcttcagcgtcaaatcgctttacgcaaccagcgcgaaactttacctctaccaccatcctggccaccgggacccgcactgcaggctcgggcaggtgctccagccccaggcgcacctggcgaggcgactccccaggaagatgctgataatcttccggtgattctaggcgaaccggaaaaagagcagcgggtccaacaactcgaatccgagctgagtaagaagcgcaaaaagtgtgaaagtcttgagcaggaagccagaaaaaaacaacggagatgcgaagaactagaactgcagttgcggcaggcacagaatgaaaacgcccgactcgttgaggagaattccagactgtccggacgtgccactgaaaaggaacaggttgagtgggagaatgccgagctccggggacaactgctaggggtaacgcaggagagagattccgctctacgcaaatcccagggcctgcaatcaaagctggagagcttagagcaggtcctgaagcacatgcgagaggtcgctcagcgcagacagcaactggaagtggagcacgagcaagcaagactgagcctgcgcgagaagcaagaagaagttagaagattgcaacaggctcaggcagaagcccagagagaacacgagggcgctgttcagttgttggagtccacattggacagcatgcaggcacgagtacgtgaacttgaagaacaatgtaggagtcagacagaacagttctccttactggcccaggaattacaggcttttcggctgcatccgggaccccttgacctgttgacctctgccctggactgcggtagtctcggggattgtcctccccctccctgctgttgttccattccacagccttgcagaggttctggccctaaggatctagatcttccgcctggatcccccggacgctgtaccccaaagtctagtgagccagcacctgccactttgacaggcgtgcctaggcggacagcaaaaaaagccgaaagtctatccaactctagccattctgaatctattcataactcacctaagtcatgtcctacccctgaggttgataccgctagcgaagtcgaagagctggaggccgactcggtgtccttgctccccgctgccccagaaggttcacgcggtggcgctagaatccaggtgtttttagcccgatatagctataatccgttcgagggcccaaatgagaaccccgaagcagaactaccgttgacagccggagagtacatttatatctatggcaacatggacgaggatggattctttgaaggtgagctcatggacggccgacgtgggctggtcccttcaaattttgttgagcgcgtgtccgacgacgacctgctcacctcacttccacctgagttggcggatctttcccatagttcaggacccgagctgagcttcctgagcgtcggaggcggagggtcctcgagcggcggtcagtcttcagtaggacgatcccagccacgtcccgaggaagaggacgcgggtgatgagctgagtttatcaccgagtccagagggcctcggcgaacccccagccgtgccgtatcctcgcaggctcgtggtgctaaagcagcttgctcactcagtggttctggcatgggagccacccccagagcaggtcgaacttcatggattccatatatgtgtcaatggcgagttaaggcaggcactggggcctggggctccacctaaggccgtgctggagaacctggatttgtgggccggtcctcttcacatctccgttcaggccttgacttcgcgaggatcttcagaccctctccggtgctgtctggccgttggtgcacgcgctggggtggtgccgtcacagttgcgtgttcatcgactgacggcaacaagtgctgagatcacttgggtgcctggaaacagcaacctggcgcatgccatttacctcaacggcgaggaatgcccacctgcgtccccttctacctactgggccactttttgtcaccttaggcccggtaccccatatcaggcccaggttgaggcccagttgcctcctcaggggccttgggaacctggttgggagcggttggagcagcgggctgctactttgcaattcactacactcccagcagggccacccgacgctccgctcgacgtgcagatagagcccggacccagccctggaatcctgatcatctcctggctccccgtaactatcgatgcagccggaacctcaaacggcgtacgggtgaccggatatgcaatttacgcagacggtcaaaagataatggaggttgctagccccaccgctggctccgtgctggtggagctctcacagctgcaactgctgcaggtgtgccgggaagttgtggtgaggactatgtctccacatggggagtcagccgattccatcccagcccctattacccctgccctggcacctgcttcgctgcctgcccgtgtatcttgcccgagtcctcacccaagtcccgaggcgagggccccactcgccagcgcttccccaggtcccggagatcctagcagccctctacaacatcccgctcccctggggacgcaggagccgcctggagctccacccgctagtccctctcgtgagatggccaaagggtcacatgaagatccacctgcaccctgttctcaggaggaggccggagccgcagtgttggggacctcagaagaaaggaccgcctctacctccacccttggcgagaaggatcccggaccggcagccccttcactagcaaagcaggaggcagagtggactgccggagaggcctgtcctgcctcatcttcgactcaaggggctagggctcagcaggcacctaacaccgagatgtgtcagggcggagatccaggctctggtctgagacctcgcgcagagaaagaagacaccgcagagctcggtgtccacctggtgaatagtctcgtcgatcatggtaggaactctgacctgtcagatattcaggaggaggaagaagaagaagaggaggaggaggaggaggagttaggatcgcgtacctgcagcttccagaagcaagtggcagggaactctatacgtgagaatggagccaaaagccagcctgatccattttgtgagacagatagcgacgaggagatcctggagcagatactcgagctccctctgcagcaattctgctctaaaaaactgttttccattccagaagaagaggaagaggaagaggaagacgaggaggaagagaaatctggcgcaggttgtagcagtagggatccaggtccacctgagcccgcactactgggactgggatgcgacagcggccagcctcggaggcctggccagtgtcctttatcacccgagagctcgcgggcaggcgattgtttggaagacatgcctggcttagtgggaggatcttctagaagacggggtggaggcagtccagagaaacctccatcacgcagaaggccccctgacccgagggaacactgtagtcggttgctatctaataatggcccacaagcttcaggtcgactgggccctacgagggagcggggaggcctccccgtgatcgaagggccacggactggtttggaggctagcggccgtgggcgtttgggtcctagccgacgatgttctcgcggacgggctcttgagccgggtctcgcctcgtgtctgagtcctaaatgtctggaaatcagtatcgagtatgacagtgaagacgagcaggaggctggatctggaggtattagtattacctcttcatgctaccctggtgacggcgaggcctggggaaccgcgacagtgggacgccctcggggaccgccaaaagcgaacagtggaccgaagccctacccccgactgccggcatgggagaagggagaaccagagaggagagggcgtagtgccacaggacgagctaaggaacctctgagccgtgcgaccgaaaccggcgaagctcggggacaggatgggtcaggaaggcggggaccacagaagaggggagtgagagtcctgcggccttcgactgctgagctggtgccagcgcgatccccctctgaaactctggcataccagcacctcccagtgcgtattttcgttgccctctttgactacgatccagtgagcatgtctcccaacccagacgcaggcgaggaggagcttccatttagggaagggcagatactgaaagtgttcggggacaaggacgctgatggattctatcaaggagaaggcggaggccgaaccggatatattccatgcaatatggttgctgaggtcgccgtggactctccggctggtcgtcagcagttgcttcagcggggttatctcagcccagacattctgctcgagggtagcggaaacggcccatttgtttacagtaccgcccacactaccgggcctccgcctaagccaaggaggtctaaaaaagccgagtccgaaggccctgctcagccttgtcccggtcctccaaagttggtgccctctgccgatctgaaggcaccacattcgatggtggccgcttttgactacaacccgcaagagtctagccctaacatggacgtggaagcggaattgccctttcgggctggcgatgtcataaccgtttttggcggaatggacgacgatggtttttactacggggagctgaatggtcagcgtggccttgtacccagcaatttcctggaaggcccagggcctgaggctggcggactggatcgggagcctagaactcctcaggctgaatcccagaggacacggaggcggagggtgcaatgtta

SEQ ID NO: 215912 - DNA, 5573 bp, synthetic construct
  misc_feature 1..5573: note = Description of Artificial Sequence: Synthetic coding sequence
  source 1..5573: mol_type = other DNA
atggagcagctgacaaccctgcctcgaccaggcgaccctggagccatggaaccttgggctctgcccacttggcacagttggacacctggcaggggaggcgagcctagttccgctgcgccatcgatcgctgatacaccacccgctgccttgcaacttcaggagctgagatccgaagaaagcagtaagcccaagggggatggctctagccggcctgtcggtggcaccgatcccgaaggagccgaagcgtgcttgcctagtttgggacagcaagctagtagctccggccctgcctgccagcgcccagaagatgaagaggtggaagctttcctgaaagcaaagctgaacatgtcgttcggcgacaggcccaacctcgagctgcttcgtgcccttggggagctgcgtcaacgttgtgccatcctgaaagaagagaatcagatgctcagaaaatcatcctttcccgagaccgaagaaaaagtgaggcggctgaaaaggaagaacgcagagctggcggtcatagcaaaaagactggaggagagagctcgtaagttgcaggaaacaaacctgcgtgtggtctcagcccctctgcccaggcccggtacatctctggaactttgtcgtaaggcactcgctaggcagcgggcacgcgacttaagcgagactgcttccgctctgctagcgaaagacaaacagattgctgcactgcagcgcgaatgcagggagcttcaggctcgactcacactggttggaaaggaaggccctcagtggctgcatgtccgcgattttgatagactcctacgggaaagtcagcgggaggttttacgactgcagcgccagatcgcgctgcggaatcagagagaaaccctccccctgccaccatcttggccgcctgggcctgcactccaggcaagagctggagcccctgctccaggggcacctggtgaggctacaccccaggaagacgcagacaacttaccagtaattctgggcgagcccgaaaaggagcagcgcgtgcagcaactggagtcggaactgagcaaaaaacggaaaaaatgtgaatcattggagcaggaggctagaaagaagcaaaggcgttgcgaagagctggagctgcagcttagacaggctcaaaacgagaatgccaggctagtcgaggaaaattccaggctaagtgggcgagctaccgagaaggagcaggtcgaatgggaaaacgccgaactgcggggtcagcttctcggcgtgactcaggagagggactccgctctccgcaagagccaaggcctacaatcaaaactcgaaagcttggagcaggtgttaaaacacatgagagaggttgcacaaaggcggcagcaacttgaggtcgaacatgagcaggccagactgtctctgcgagaaaaacaggaagaagtacggcgtctgcagcaggcgcaagccgaggctcagagagagcacgaaggcgctgtgcagctgctggagagcactctcgatagcatgcaggctcgtgtaagggagctggaagaacaatgccgaagccaaactgagcagttttctctgctcgcccaagagttacaggcgtttaggctgcatccaggtcctcttgatctgctgacctccgccctggattgcggttcgttaggggactgcccacctccaccttgctgctgctcaatccctcagccctgtagaggatcaggtcccaaggatctggacctaccacctggaagtccaggtaggtgcacccccaagagcagcgagcccgctccagccacactgactggagttcctaggcgcacagccaaaaaggcagaatccctgagtaatagcagtcattctgagtccatccacaattcaccaaagagctgccctactcccgaggtcgacaccgcctcagaagtcgaggaactggaggccgactccgtaagtttgctaccagccgctcctgaaggcagtcgtggtggagcccgaattcaggtgtttctggccaggtactcctataaccctttcgagggaccgaatgagaaccccgaagctgagttgccgcttacagcaggagaatacatatacatttatgggaacatggacgaggacggcttctttgaaggcgagcttatggatggaagacgcggtctcgttccctctaatttcgtggaacgcgtgagcgatgacgacttgctcaccagtttgccaccagaactagcagacctctctcactctagcggtccagagctgtcctttctttccgtggggggaggcggtagctcgtctggcggacagtcatctgtgggtcgctcccagcccagaccggaggaggaggatgctggtgatgaactaagcctgtcgccatcccctgagggtctgggcgaaccacccgctgttccctatcccagaagactcgtcgtgctgaaacagctggctcactccgtggtcctcgcttgggagcctcctcccgaacaggtggaactgcatggtttccacatctgtgtgaacggcgagctcagacaggcattaggtcccggtgcccctcctaaagcagttctcgaaaatttggatctgtgggcaggacctctacacatctcggtgcaggccctaactagtagaggctccagcgaccctttaagatgttgcctagcggtgggggcacgcgcaggtgtggtgccgagccagctcagagttcacaggctgacagctacttctgctgaaataacctgggtgccaggcaattctaacctcgctcacgcgatttacctgaacggggaagagtgcccaccagcttctccatctacgtattgggccacattctgccacctgcgtcctgggacaccctaccaggcccaagtggaggctcaactgccccctcagggaccgtgggagcccggatgggaacgtctggagcagcgggctgctacccttcagttcactactctccctgcgggaccaccagacgcccctttggatgtgcagattgagcccggaccaagccccggaattctcataattagttggctgcctgtaaccattgatgcagctggcacctctaacggggtgcgagttaccggctatgcaatttatgctgacgggcagaagatcatggaagtcgcgagtcccacggccggatctgtcctggtagaactgagtcagctccagctgctgcaagtgtgcagagaggtcgtggttcggaccatgagcccccacggcgagtcggccgattccatccctgcccctatcacaccagcactggcaccagcttccctgcccgctagggtgagctgtccgagtcctcacccctccccagaggcaagggccccattagcctccgctagtccgggaccaggggacccctcatcacccctgcagcatcccgctcctcttggcacccaggagccccctggggctcccccagcgtctcccagcagagagatggctaagggaagccacgaggatccccctgcaccctgctctcaagaggaggcgggtgccgctgtcctaggaaccagtgaagaacggactgcatctacttcgacacttggggaaaaagacccagggccagcggctccgtctcttgccaagcaggaggcagagtggactgcaggtgaggcttgtcccgcttcctcttctactcagggagcacgggcacaacaggcccctaatacggagatgtgtcaaggtggcgatccagggagtgggcttcgtccaagggctgagaaggaagatactgctgagctcggggtgcatctggtcaacagcctggttgaccacggtcggaattctgatcttagcgatatccaggaggaagaagaagaggaggaagaggaagaggaagaagagctgggttctcgcacctgctctttccagaagcaggtggcaggtaattccatacgcgagaacggtgccaaatcccagccagatccattttgtgagactgacagtgacgaggaaatcctggaacagattctagaactacctcttcagcagttttgctcaaagaagctgttctccatccctgaagaagaggaggaggaagaggaggatgaggaggaagagaagagcggagccggttgcagctctagagacccagggccaccagagcccgcactcctgggcctcggctgcgatagtggccagccaagaaggcccggtcagtgtccactgtcgcctgagtcgtcgagagccggtgattgccttgaggacatgccagggctcgtgggtggctcttctcgcagacggggtggcggaagccctgagaaaccacctagccgcagaagaccaccagatccacgggaacactgctctcggctactgagtaacaatggccctcaagcttccggcaggctcggaccaacacgcgaaagaggcggtctccctgtgatagagggaccgagaactgggctggaagctagcggcaggggcaggcttggccctagccgccgatgcagccgagggagagcgctagagcctgggctcgcttcatgtcttagtccgaagtgccttgaaattagtatcgaatatgattcagaggatgagcaggaggccggtagtggagggatctcaatcacttcatcctgctaccctggcgatggagaagcctggggtactgccaccgtcggtcgacctaggggcccaccaaaagccaacagcggaccaaagccttacccaaggctcccagcctgggaaaagggcgaaccagagaggagaggcagaagcgcaaccgggagagccaaagaacccttatcacgggctacagaaacgggggaagcacgtggccaagacggtagtgggcgacgtggtccccagaagaggggtgtgagagtgcttcgaccgtctacggcagagctcgtaccagctcgcagcccaagcgaaacactggcttaccagcatctgcctgtgcggatcttcgtcgcacttttcgactacgatccagtgtcaatgtcacccaatcctgacgccggagaagaggaacttccattcagagaaggccaaatactgaaagtgttcggagacaaggatgcggacggcttctatcaaggcgaggggggaggtaggactggatacattccttgtaacatggtcgctgaagttgccgttgattctcctgctgggcgacagcagctactgcagcgaggatatttgtcacccgacatcttattagagggaagtggtaatggtccgtttgtttactctaccgcacataccaccggtcctccgccaaaacctaggcgaagcaagaaggcagaaagtgaaggcccagctcagccctgcccgggtcccccaaagctagtccctagcgctgacctgaaggcgcctcattctatggtggcggcattcgactataatccacaagaatccagcccaaacatggacgtggaggcagagctaccttttagagcaggcgacgtgatcacagtgttcgggggaatggacgatgatgggttctactatggggagctgaatggccagagggggctggtcccaagcaattttctggaaggacccggtccagaagccggaggactggaccgggaaccaaggaccccccaggctgagtcacagcggaccaggcgacgccgtgtacagtgcta

SEQ ID NO: 215913 - DNA, 5723 bp, synthetic construct
  misc_feature 1..5723: note = Description of Artificial Sequence: Synthetic coding sequence
  source 1..5723: mol_type = other DNA
atggaacagctgacaacactcccccgacctggcgatcccggagcaatggaaccttgggccttgccgacgtggcattcatggacacctggcagaggcggtgaacccagctccgcagccccatcaatcgctgataccccgccagctgctctccaactacaggaactacggtcagaagagtcctcgaaacccaaaggagacggcagctcccggccagttggcggtacagatccggaaggcgctgaggcatgccttccatcactcgggcagcaagcatcgtcgagtggtcccgcatgtcagcggccagaggatgaagaagtggaggcattcttaaaagcaaaactgaatatgtcctttggggaccgcccaaatctggagttgttgagagccctcggggaactgaggcagaggtgtgccatcctaaaggaggaaaatcagatgctcagaaagagcagcttcccagaaactgaggagaaagtccgacgcctcaagaggaagaatgccgagctggccgtgatcgctaagaggctcgaagagcgggctaggaagctgcaagaaaccaacctgcgagtcgtgtctgctcccctcccaagacccggtacctccctggagctctgtagaaaggccctggcccgacaacgcgctagggatctgagtgagacagccagcgctctcctcgctaaggacaaacagatagcagcactccagcgggaatgcagagaattgcaggctcgactgacacttgtaggcaaagaaggaccccagtggctccacgtgcgcgattttgatagactattaagagagagccagcgggaggtactcaggcttcagcggcagatcgcactacgaaaccagagggagacactacccctgcccccatcctggccaccgggtccagcgttgcaggctagagccggagccccagctcccggagcgccaggggaggcaacaccacaagaagacgctgacaatctgcccgtcatacttggagagccagaaaaagaacagagagttcagcagctcgagtccgaactcagtaagaagaggaaaaagtgtgaatctctcgaacaagaagctcgcaagaagcagagaagatgtgaagaactggagctgcagctgcgtcaggcacagaacgaaaacgcccgactcgttgaagaaaatagccggctgtccggcagggccaccgagaaggagcaggtcgagtgggaaaacgctgagctgaggggacaactgctcggtgtaacccaggagcgagactcggccttgcgcaaaagccaaggcttgcaatctaaattagaaagcctggaacaagttctgaagcacatgcgggaggtcgcgcagagaaggcaacagctggaggtagaacacgagcaggcgcgattgtcactccgagagaaacaggaagaggtgcggaggttgcagcaggcgcaagccgaagctcagagggaacatgagggcgctgttcagctgctggagagtacattggattcaatgcaggccagggtgcgggaactcgaagagcagtgccggtcccaaaccgagcagttcagtctcttggcacaagaattacaggcgtttcgcttgcaccccggaccgctcgacctgttgacgagcgccctcgactgcgggtctctcggcgactgcccaccccctccgtgttgttgcagcattccccagccctgccgcggttcagggccaaaagatctggacttgccgcctggtagtccaggtagatgcacaccaaaaagcagcgaacccgctcctgcgactctgactggtgttcctcggagaaccgctaaaaaggctgagtccctttcaaactccagtcactctgagagcatacataattcccccaagtcctgtcccactccagaagtggatacagcctccgaagtggaagaactggaggctgactcggtttctctgctccccgctgctcccgagggaagccgcggtggagcacgcatccaagttttcctcgcaaggtattcctataatcccttcgagggccctaacgaaaatcccgaagccgaactacctctgactgcgggagagtatatctacatatacggcaacatggacgaggacggtttctttgaaggcgagctgatggacgggaggcggggactggtgcctagcaacttcgtggagcgcgtctcagatgatgatctactcacttccctcccgccagagctggcggacctctcacatagttccggccctgaactctcgtttctctctgtcggaggaggtgggtcatcctctggcggacaaagctctgtcgggaggtctcagccacgccctgaggaggaggacgcgggagacgagctgtctctctctccatccccagagggactcggtgaacctcctgccgtaccttacccgagaaggctggtcgtcctgaaacaactcgcccactctgttgttttagcctgggagcctccaccggaacaggtggagctgcacggctttcatatttgcgtcaacggagaactgcgccaggccctggggccaggcgcaccccctaaagccgtgcttgaaaatctcgacttgtgggccggtccccttcatatctctgtgcaggcccttacgtcgcggggtagcagcgaccccctaaggtgctgtctggccgtaggggctagggccggagtggtgccatcccagctgcgcgtacatcgattaacagccacaagcgctgagatcacatgggtgcccggaaacagcaatttagcccatgccatttacctcaatggggaagagtgtcccccagcgtcccccagcacttactgggctacattctgccatctgcgcccaggcaccccatatcaagctcaggtcgaggctcaactccctcctcagggtccatgggaacccggatgggagagactggagcagagggcggctacactccaattcaccacacttcctgcgggaccacccgatgcccctctggacgtacagatagagcccggtccttccccaggtattctgattatctcttggctgcccgtgaccattgatgctgcaggaacaagcaatggtgtccgggtgaccggatatgcaatatacgccgatggccaaaagataatggaggttgcaagcccaactgcaggaagtgtgctggtggagctgagtcagcttcagcttctacaagtgtgtcgagaggtggtagtccggaccatgtccccacacggtgagagcgctgactccattccagcaccaataaccccagctctcgcacccgcaagcttgccagcgagggtgtcctgcccctctccacatcccagcccggaggctcgggctccattggcaagtgcctctcctggcccaggagatccgtcctctcctctccaacatcctgcccctttgggcacacaggaacctccaggcgcaccaccggctagcccctcccgagaaatggctaaagggtcccacgaggatccacctgcaccatgctcacaggaggaagccggtgctgctgtgctgggtacttccgaagaacgaacggccagcacatcaactctgggggagaaggacccgggtcccgcagctcccagcctggctaagcaggaagcagagtggaccgcaggtgaggcctgtccggcttcatcttccacccagggagcgagagcacagcaagccccaaacacggaaatgtgccaggggggagatccaggcagcggcctgagaccaagggctgaaaaagaagacaccgccgagctcggcgttcacctggtcaattccctcgtggatcacggccgaaatagtgacctgtctgacattcaggaggaggaggaggaggaggaggaagaggaagaagaagagctcggatcacggacttgttcttttcagaagcaagtggcaggcaacagcattagggagaatggagctaagagccagcctgaccccttctgcgagactgattccgacgaggagatactcgagcagatcttagagctacctttgcaacagttttgttccaagaaactatttagcattccagaggaggaagaggaggaagaggaggacgaggaggaggagaagtccggggctggctgctcttctcgtgatcccggaccccctgaacccgcactattgggacttggctgcgacagtggacagccgaggagacccggacagtgtcccctgagccccgaaagctcaagagcaggggactgcctggaagacatgcccggtctcgtagggggatcaagccggaggaggggaggcggttcccccgagaagccgccaagccgcaggagaccgccagaccccagggaacactgtagcaggctccttagcaataacggacctcaggcatcaggccgtcttggacccacccgtgaacgcggaggtcttccagtcatagaaggaccacgtactggcctggaggcgtcgggtagaggaagactaggcccaagtcgcagatgctcacgcggtagagcgttagagcccggtctcgctagttgcctgagccctaaatgcctggaaatcagtatcgaatacgactcagaggacgaacaagaagccggtagtggagggatttctattactagttcatgttaccccggagatggagaagcatggggaacggcaactgtcggacggcctagaggacctcctaaagccaatagcggaccgaagccttatccgaggctccccgcatgggagaagggggagcccgagcgcagagggagaagcgccacggggagggctaaagagccgttgtcccgagccaccgaaaccggcgaagcccgtgggcaggacggcagcgggagaagaggccctcagaagagaggggtacgggtgctgcgcccttccactgctgaactcgtccctgctagatccccaagcgagacgcttgcatatcagcatctgccggtgcgaatttttgtggccctgttcgactatgaccccgtctcaatgagccccaatccagacgctggggaagaagagttaccttttagggaagggcagatcctgaaagttttcggagataaggacgcggacggtttttaccagggcgagggcggaggccgaactggctatataccatgtaacatggtcgcagaggtcgccgttgacagtccagctgggcgacagcagttgcttcagcgtggttacctgtccccggacattctgttggagggttccgggaatgggccatttgtctacagcaccgctcataccacaggcccaccaccaaaacctagaagaagcaaaaaggctgagagcgaggggccagcgcagccctgccccggaccccctaagctcgtcccctccgcagatctgaaggctccgcacagcatggtcgctgctttcgactataacccgcaagagtcctcccctaacatggacgtggaggcagagcttccctttcgagccggtgacgtcattacagtgtttgggggaatggacgacgacggcttctattatggtgagctgaatggtcagagagggctggtgccatccaacttcctggaaggtccaggacctgaggcgggtggccttgatagggagcccagaacaccccaggcagagtctcaggattggggctgtacaacgcagggcagcccgggaccacctggagggccttgtacaccctcctcagggtcagcgccacgtatcgagcgaggcgagccacaggggaggtccgaaaaagtttgggggttttttagcaagggtaaacagttgttacggcgtttaggaagcgggaaaaaggagta

SEQ ID NO: 215914 - DNA, 864 bp, synthetic construct
  misc_feature 1..864: note = Description of Artificial Sequence: Synthetic coding sequence
  source 1..864: mol_type = other DNA
atggtcaacgacccacccgttccagctttgctttgggcccaggaggtgggtcaagtgcttgcaggcagggctagacgcctcctgctacaattcggcgtactgttctgcaccatcctgctgttactgtgggtctccgtctttctgtacgggtccttttattattcctacatgccaaccgtttcacatctttcgcccgttcatttctactatcggacagactgcgacagttccaccacaagcctctgcagctttcctgttgctaatgtgagccttacaaaaggaggacgggacagggtgcttatgtacggtcagccatatagagtgacgctggagctcgaactgcctgaaagcccggtgaaccaagacctgggcatgttcttggttacaatctcctgttacacccggggtggccgaattatctctaccagctcacggtctgtaatgctgcactatcggtctgacttgctgcagatgctggataccctcgtgttcagctcccttcttctgtttgggttcgcagaacagaagcaactgctcgaggtagaactctacgccgattatagagagaactcgtatgtgcccaccacaggggctatcatcgaaatccactccaaacgcatacagctctacggcgcttatctccgaatccacgcccattttaccgggctgaggcttactagtgagaaggagaccattcccggacgaaagtcgaatgaaggctctcttttgattagccaggggctcaaggcccgtcgctctcagctccggaatcagatgctccagagaatggtgagagcgctgaagatcccccaggggcagagagtcagttgccccagacgacgaaaccagattagctctccttag

SEQ ID NO: 215915 - DNA, 1389 bp, synthetic construct
  misc_feature 1..1389: note = Description of Artificial Sequence: Synthetic coding sequence
  source 1..1389: mol_type = other DNA
atgtctacggaaaaagttgatcagaaagaggaggccggagaaaaagaggtgtgcggagatcagataaaggggcctgataaagaagaagaaccaccagccgctgcctcccacgggcaaggctggcgaccaggtggccgagcggcacggaatgccagacccgagccaggtgcccgtcaccctgcattgcctgccatggtgaacgatcctcccgtgcccgcactgctgtgggcccaggaggtaggtcaagtgctggcaggcagagctcgcaggctcctattgcagttcggcgtgttattttgtactattctcctcctgctgtgggtttctgtgttcctctatggctcgttttactattcatatatgcctactgtctctcacctgtctccggtgcacttctattatcgaactgactgcgattcttcaacaacttccctgtgcagtttccctgttgcaaatgtgtctctcactaagggcggtagggatcgtgtgctgatgtatggtcagccgtatagggtaacactggaattggagcttccggaatccccagtgaatcaggatctggggatgttcttggttaccatttcgtgctacactcgtggaggcaggattatttctacttcatctcgctcagttatgttgcattaccggtcagacttgctacagatgctggatacacttgtgttcagctcactgctgctcttcggatttgcagaacagaagcaacttctagaggtggaactatacgcagactatagagaaaactcctatgtgcccaccacaggggctattatcgaaatacattctaagcgaatccagctgtacggggcatacctcaggatccacgcccactttacaggactgaggtacctgctgtataacttcccaatgacctgtgccttcattggtgtcgcctccaatttcacctttctgtccgttattgtgctgttctcctatatgcagtgggtgtggggaggaatatggcctcggcacagattctctttgcaggttaacattcggaagcgggacaactcccgcaaggaagtccagaggagaattagcgcgcaccagccagggcctgaaggacaggaggagagcaccccgcagagcgacgtaacagaggacggcgagtctccggaggaccctagtggcaccgaaggccagttgtccgaggaggagaaacccgaccagcagcctttatcaggcgaagaggaactggagcctgaggcgtcagatggctcgggctcatgggaagatgccgcattgttgactgaggcaaacctgcccgctccggcacctgcaagcgctagcgcccctgttcttgaaactttagggtcaagcgaacctgcgggaggagcactccgccaaaggccaacatgtagttcatcttag

SEQ ID NO: 215916 - DNA, 1197 bp, synthetic construct
  misc_feature 1..1197: note = Description of Artificial Sequence: Synthetic coding sequence
  source 1..1197: mol_type = other DNA
atggtgaatgaccctccagtccccgctctcttatgggcccaggaggtgggacaagttctggcaggtcgggctcgcaggctgctactgcagttcggtgtgctcttttgtacaatactgttgcttctctgggtatcagtgttcttgtacggctccttttattattcctacatgcctactgtcagtcacctgtccccagtgcacttctactacagaacagactgcgactcctccaccacgagcctttgctcttttcctgtggcaaacgtatcactcacaaagggtggacgtgatcgagtgctgatgtatggccaaccatatcgagtgacacttgagctggagctgccagaatccccagtaaatcaagatttagggatgtttctagttaccatctcatgttacacaaggggcggaaggatcattagtacctctagccggagcgtcatgctgcattaccgttcagacctgcttcaaatgctggacacgcttgtcttttctagtctgctcctgttcgggttcgctgagcagaaacaacttctagaggttgaactctacgcggactatcgtgaaaactcatatgtgcctacaactggcgcaattatcgagatccatagtaagcggatccagctgtatggtgcctatctgcgtatccatgcgcattttacagggctccgctacctgctgtacaattttcccatgacgtgcgccttcattggagtggcttccaatttcacattcctttccgtcatcgtgctatttagctatatgcagtgggtttggggagggatttggcctcggcataggttctccttgcaggtgaacatcagaaaacgcgataacagtaggaaggaagttcagaggcgcataagtgcacaccaacctggcccagagggtcaggaggagtctaccccccagtctgacgtcacagaggatggagagagccccgaagatccttccggtacggagggacaattatctgaggaagaaaagcctgaccagcagcccttgtccggggaggaagaactcgagcctgaggcaagtgatggatccggcagctgggaagacgcagcactcctgactgaggctaatctaccagccccagccccagcttctgcctcagccccagtgttggagactctgggctcctccgagccagccggtggcgcactgcgacagcggcctacatgtagcagcagctag

SEQ ID NO: 215917 - DNA, 1197 bp, synthetic construct
  misc_feature 1..1197: note = Description of Artificial Sequence: Synthetic coding sequence
  source 1..1197: mol_type = other DNA
atggttaacgacccacctgtgcccgctctgctctgggcacaggaggtcgggcaggttcttgccggaagagctagacgccttctgctccagtttggagtgttgttctgtactatacttctgctcctgtgggtgtccgtgtttttgtacggatctttctattatagctacatgcccaccgtcagccatctgtcccccgtacatttttactatcgcacagattgtgactcctctacaacatctctctgctcatttccagtagctaatgtgtcacttacaaaaggcggacgagatcgagtgctgatgtatggtcagccctatagagtgaccctggaattagagctgccagagagtcctgttaaccaggacctcgggatgttcctggtaacaattagttgctacacacgcggaggacgaataattagcacatcctccaggtcagttatgcttcactaccggtcagatctccttcaaatgctggacaccctagtgtttagttccctactactgttcggttttgccgagcagaagcaactgctagaggtcgagctgtatgcagattaccgagagaattcatacgttcctaccaccggcgcaattattgagattcattcaaagcgtatacagctctacggagcctatctaagaattcatgcacattttacggggctcagatacttactgtacaacttccccatgacttgtgcctttatcggagtggcctccaatttcaccttcctatccgttatcgtgctgtttagctatatgcagtgggtgtggggagggatctggcctcggcatagattttcactgcaggtcaatattagaaagagggataattcccggaaagaggttcagaggagaatcagtgcacaccagccaggccctgaaggtcaggaggaatcaacccctcaatcagacgtgaccgaggacggggagtctcctgaagacccttcaggtacagaaggacagctctctgaagaggaaaagccagatcagcagccgctgtcgggcgaagaggaactcgagcctgaagcttctgacggctctgggtcctgggaggacgccgcactgctaactgaggccaaccttccagcacctgcacccgcttctgcaagcgctccagttcttgaaactctgggctcttctgagcccgctggcggagcccttcgacagcgtccaacttgctcatctagctag

SEQ ID NO: 215918 - DNA, 1197 bp, synthetic construct
  misc_feature 1..1197: note = Description of Artificial Sequence: Synthetic coding sequence
  source 1..1197: mol_type = other DNA
atggtgaatgaccccccagtgccagcacttctgtgggcgcaggaggtggggcaggtgctggctggcagagccaggcggctgctgttacagttcggcgtccttttctgcacaatactgttactcttgtgggtgagcgtgtttctgtatgggagcttttactacagctacatgccgaccgtctcacatctttctccagtacacttttactaccgtacagactgcgactcctctaccacgagcctttgctcattccctgtggccaacgtgagtctgaccaaggggggaagagacagagtgctgatgtatggccagccttaccgcgtcacattggagctggagctgccggagagtcccgtgaaccaggatttagggatgttcttggtgaccatctcttgctatacaagaggtggcagaatcatctccaccagttcccggtcggtaatgctccattacagaagcgatttgctacaaatgcttgacacactcgtcttttctagcctgcttctatttggctttgccgagcagaagcagttgttagaagttgaactctacgcagattacagagaaaattcgtatgtccctacaactggggctattattgagatccactctaaacggattcagttgtacggagcatacctgcgcatccacgcccatttcaccggcctacggtatctcctctataacttccccatgacctgcgcattcattggcgtagcatccaatttcactttcctgtcagtcatcgtactgttctcatacatgcaatgggtttggggcggaatctggccacggcatcgcttcagccttcaggttaacattcgaaaacgcgacaattcaagaaaagaagtgcagcgacgcattagtgcccaccaacctgggcctgaaggccaggaagaatctaccccccagtcagatgtgactgaagacggggagtcacccgaggatcccagtggaaccgaaggccaactgtcagaagaagaaaagccggaccagcagcccctgtctggtgaggaagagcttgaacccgaggcctctgacggttcgggctcatgggaggacgcagccctgctgactgaggctaacctaccagctcctgccccagccagcgcctcagcgcctgtcttggagactctgggttcttctgaacccgctggaggggcactgcgccagagacccacttgttcaagctcctag

SEQ ID NO: 215919 - DNA, 1389 bp, synthetic construct
  misc_feature 1..1389: note = Description of Artificial Sequence: Synthetic coding sequence
  source 1..1389: mol_type = other DNA
atgtctaccgaaaaggtcgatcagaaagaggaggcaggagaaaaagaggtgtgtggagaccagatcaagggcccagataaggaagaagagccccctgctgcagcatcccacggccagggatggcgacctggaggcagggccgctcggaatgccagacctgaacctggcgctcgccaccctgcattgcccgctatggtcaacgatccaccagtccccgcactcttgtgggcacaagaagttggacaggtgctggcaggcagagccaggcgactcctgctccagttcggcgttctgttttgtactatcctgttactactgtgggtttcagtgttcttgtatggatctttctattactcttacatgcccactgtgagccacctgtctcccgtgcacttctactacagaaccgattgcgactcttcgacgacaagcttgtgtagtttccccgtggcaaatgtgtctctcaccaagggaggaagagatcgggttctgatgtatggccagccctacagggtcactctggaattagagttgcccgaatccccagtaaatcaggacctgggaatgtttctagtgactatttcctgctatacacgtggcggtcgaattatttctacttcctcccgcagtgtgatgctgcattacagatccgatctgctccaaatgttggacaccctggtctttagtagtctactgctgttcgggttcgccgagcagaaacagctccttgaggtggaattatacgctgattacagagagaactcttatgttcccactactggagcaatcatcgaaatccacagcaaaagaattcagctttatggggcatatttgaggatccatgctcatttcaccggcctccgctacttgttatacaacttccccatgacatgcgcttttataggcgtcgcctcgaactttactttcctgtcagtgatcgtcctattctcatacatgcagtgggtctggggtggcatatggccgcgacatcggtttagtctgcaggttaatatcagaaaaagggacaattccagaaaagaggtgcaacgcagaatctccgcccatcaacctggcccagaggggcaagaggagtcaacaccccagtccgacgtgaccgaggatggcgaatcaccagaggatccctccgggacagaggggcagttgtcggaggaagagaagcccgaccaacagccactgagcggggaagaagagctcgaacccgaggcctccgatggttccgggagctgggaagatgcagcccttctaaccgaggcgaaccttcctgcccctgcaccagcctcagcgtccgcacctgtgttggagaccttgggaagctccgaacccgcaggtggagccctgcggcaaaggccaacatgtagtagcagctag

SEQ ID NO: 215920 - DNA, 672 bp, synthetic construct
  misc_feature 1..672: note = Description of Artificial Sequence: Synthetic coding sequence
  source 1..672: mol_type = other DNA
atggttaacgatcctcctgttcccgcactcctatgggctcaagaagtagggcaggtactggcgggacgtgccagacgcctcttactgcaattcggggtgctgttttgcaccatattgctgctgctctgggtctctgtgttcctctacgggtccttctactattcctacatgcctacggtttcacacctgtcccctgtacatttctactaccgcaccgattgcgactcgagcaccacctccctgtgttccttcccggtcgcaaacgttagtctcaccaaggggggtagggaccgcgttctgatgtacggacagccatatagggttaccctggaactcgagctccccgaatcaccagtgaaccaggacctcgggatgtttctcgtaactatctcttgctacactcgcggagggaggatcattagcacgagcagccgatccgtgatgctccactatcggtctgacctcctccaaatgctcgacactctggtgttcagctctttgctcttgttcggcttcgcagagcaaaaacagctgctagaagtggagctctacgcggactaccgagaaaactcctatgtcccaaccaccggggcaatcatagagattcatagcaaaaggattcagctgtacggagcatacctgcgcattcatgcacactttactggtctgtag

SEQ ID NO: 215921 - DNA, 282 bp, synthetic construct
  misc_feature 1..282: note = Description of Artificial Sequence: Synthetic coding sequence
  source 1..282: mol_type = other DNA
atgagcaccgagaaggtggaccagaaggaagaagccggtgaaaaggaagtttgtggcgatcaaataaagggccctgataaagaggaagaaccacctgccgcagcttcccatggacaaggatggagacccggtggcagagccgcacgcaacgctaggcctgagccaggcgcacgccaccctgcactccctgccatggttaatgaccccccagttcccgcactgctgtgggcgcaggaagtgggccaagtgctggctgggcgagcgagaaggctcctcctctag

SEQ ID NO: 215922 - DNA, 681 bp, synthetic construct
  misc_feature 1..681: note = Description of Artificial Sequence: Synthetic coding sequence
  source 1..681: mol_type = other DNA
atgtcaaccgaaaaggtggaccaaaaagaagaagctggtgagaaggaggtctgcggggatcagattaaagggcctgacaaagaggaagaacctcccgctgctgctagccatggacaaggttggcggccaggcggtagggctgcccgtaacgctcggccagagccaggtgcccgacatcccgcattgcccgctatggtgaacgaccccccagtgcccgcacttctgtgggctcaagaagttggacaggtgctcgctggaagggccagacggctgttattacagtttggagtgctgttttgcactattctgcttctactctgggtctctgtgtttctctacggatctttttactatagctatatgcccactgtctctcatctatcacccgtgcatttctattacagaacggattgcgacagctccaccaccagcctctgctccttcccagtagccaatgtgagcctcaccaaaggcggaagagaccgggtacttatgtatggacaaccctaccgcgttaccttggagttagagttgccagaatcaccagttaatcaggacctggggatgtttctggttactatctcctgctatacacggggagggagaattatatccacatcgtccaggtctgtgatgttgcactatcggtctgacctgctacagatgctcgacactttgtag

SEQ ID NO: 215923 - DNA, 72 bp, synthetic construct
  misc_feature 1..72: note = Description of Artificial Sequence: Synthetic coding sequence
  source 1..72: mol_type = other DNA
atgtctacggaaaaagtggaccagaaggaggaggccggagaaaaagaggtctgcggtgaccagattaagtag

SEQ ID NO: 215924 - DNA, 87 bp, synthetic construct
  misc_feature 1..87: note = Description of Artificial Sequence: Synthetic coding sequence
  source 1..87: mol_type = other DNA
atgagtacagagaaagttgatcagaaggaggaggctggggagaaggaggtttgcggggatcagataaaaggccctgacaaggagtag

SEQ ID NO: 215925 - DNA, 372 bp, synthetic construct
  misc_feature 1..372: note = Description of Artificial Sequence: Synthetic coding sequence
  source 1..372: mol_type = other DNA
atgtcaactgagaaagttgatcaaaaagaggaggcgggagaaaaagaggtgtgcggcgaccagattaaaggtccagacaaagaggaagaacctcctgcagcagcaagtcacggacagggatggcggcctggtggacgagctgctcgcaacgcacggcctgaacccggagcaaggcatccagcactaccagccatggttaacgatccaccggttccggcactgttatgggctcaggaggttgggcaggtcctggcaggccgagcgaggcgcctgctgcttcaattcggtgtgctgttttgcaccatacttctgcttctgtgggtatcagtctttctgtacggtagcttctattatagctatatgcctacgtag

SEQ ID NO: 215926 - DNA, 300 bp, synthetic construct
  misc_feature 1..300: note = Description of Artificial Sequence: Synthetic coding sequence
  source 1..300: mol_type = other DNA
atggttaacgacccaccggtgccagcactcctgtgggcccaagaagttggtcaggttctagccggacgcgctaggaggctgctgctgcagttcggagtattgttctgcactattctgcttctgctgtgggtgtccgttttcctttacggctctttctactatagctatatgccaaccgtttcacatctgtccccagtgcatttctattaccggacagactgcgattctagtactacgtctctttgcagttttcccgtggcgaatgtgtcccttactaaagggggtcgtgaccgagtgtag

SEQ ID NO: 215927 - DNA, 879 bp, synthetic construct
  misc_feature 1..879: note = Description of Artificial Sequence: Synthetic coding sequence
  source 1..879: mol_type = other DNA
atggaattccagccaaaccaggaggatgaggaagacgcgcatgcaggaatcataggcagatttctgggattacagagccatgatcatcaccccccaagggcgaactcgagaactaagctgctgtggccaaagcgcgaatctctgttacacgagggactgcccaagaatcacaaggccgcaaagcaaaatgtcaggggccaagaggataacaaggcttggaagttaaaggcagtagacgcctttaaatctgcgcctctgtaccaaaggcccggttactattcagctccccagacacccctgtcccctactcccatgtttttccccctcgaaccaagtgccccttccaagctgcattcagtgaccggaatagacacaaaagacaagagcctgaaaaccgtaagtagcggtgccaaaaaatcttttgagctgctgagtgagagcgatggggctctgatggaacaccctgaggtctcccaggtgcgacggaagacagtagaattcaacttaaccgatatgccggaaataccagaaaatcacctaaaggagcccctcgagcaatcaccaacgaacatccataccaccctgaaagatcatatggatccgtattgggccctggagaatcgaagcgtgctgcatctgaatcaaggtcactgcatcgcactctgcccgaccccggcaagcctggccttgagtctgccattccttcacaacttcctggggtttcaccattgccagagtacactcgatcttcgccctgcattagcatggggtatttaccttgctacatttaccgggatactcggaaaatgtagcggccctttcctaacctccccatggtatcacccagaggatttcctgggaccaggcgagggcagatag

SEQ ID NO: 215928 - DNA, 1497 bp, synthetic construct
  misc_feature 1..1497: note = Description of Artificial Sequence: Synthetic coding sequence
  source 1..1497: mol_type = other DNA
atgttcgagaaactgaccctgtactgtgactcatacatacaactcatccctatcagtttcgtcctggggttttacgtcacgctagtggtcacccgctggtggaaccagtacgagaatcttccatggcccgacaggctaatgagcctggtgtcaggctttgtggaaggaaaagatgagcagggtagactgctcaggcggactctcatcagatacgctaacctcggcaacgttctgattttacgcagtgtgtctaccgcagtttataagcggttcccatccgcacagcatcttgttcaggccggatttatgactccagccgagcataagcagctcgaaaaactctccctccctcataatatgttttgggttccatgggtctggttcgctaacttaagcatgaaagcttggctgggcggtaggatcagggaccccatccttctccagtctctactcaatgaaatgaacactctgagaacccaatgcggtcacttatatgcatatgactggatatcaataccgctggtatatacgcaggttgtcacagtggctgtgtactcattcttcctgacttgcctcgttggtaggcagtttctcaaccccgcaaaggcgtatcctgggcatgaactggacctggttgtccccgtcttcaccttccttcaattttttttctacgtcggctggctgaaggtgagcctcctggccgtggatgagatgcatcaggacctgccgcgtatggagcctgacatgtactggaacaaaccagaaccccagccaccatataccgctgcaagcgcccagttccggagggcttcctttatgggttcaacatttaacatctcactgaataaggaggaaatggaatttcaacctaatcaggaggacgaggaggacgcacatgccggaatcatcgggaggttccttggcctccaatcccacgaccaccatccccctagggccaactctcgcaccaagttgctgtggcctaagcgggagtcactacttcacgagggcctacctaagaatcacaaggcggcaaagcagaatgtgaggggtcaggaggacaataaggcttggaaactaaaggctgtggacgcctttaagagtgcgcctctctaccaaagacccggatactacagtgcaccacagacgcccctgtcccccaccccgatgttcttccctctggagccatctgccccatccaaactgcactctgtgacgggcatagataccaaggacaaaagtctgaaaacggtgagtagtggcgcaaaaaaatccttcgagctgctgtccgagtcagacggagcgttaatggaacaccccgaggtgtcacaagttcgaaggaaaacagtggagttcaacttgacagatatgcccgagatcccagaaaaccatttaaaggagccgctggagcagagtccaacgaatattcacactacactgaaggaccatatggacccctattgggcactggagaatagagatgaggcccactcatag

SEQ ID NO: 215929 - DNA, 1758 bp, synthetic construct
  misc_feature 1..1758: note = Description of Artificial Sequence: Synthetic coding sequence
  source 1..1758: mol_type = other DNA
atgacgatcacatatacttctcaggtggcaaacgctagactggggagtttcagtcgcctgttgctgtgctggcgtggatccatatataaactcttgtacggggagttccttatctttctcttatgctactatattatccgcttcatctacaggttggccctcactgaagaacagcagctgatgtttgaaaagctgactctctattgtgatagctatattcagctcattccgatctcatttgtcctagggttttacgtaacacttgtggtgacacgatggtggaaccagtacgaaaacctcccgtggcctgatagactcatgagtttggtgagcggattcgttgagggcaaagacgagcagggaaggctgctccgtagaacccttatccggtatgcaaatctgggaaacgtgctcatattaaggtccgtcagtaccgcagtatacaagagatttccctcggcccaacatctggttcaggccggattcatgacacctgccgagcataaacagttggaaaaactgagtttaccacataatatgttttgggtgccctgggtctggttcgcaaacctctctatgaaagcatggctgggcggaaggattcgcgaccctatccttttacaatcactccttaacgagatgaacactctcagaactcagtgtggacatctgtatgcctatgattggatcagtatacccttggtctacacccaggtggtcacagtcgccgtgtattcctttttcctgacttgtctggtgggccgacaatttttgaaccccgctaaagcctacccgggtcatgaactggacctggtcgtgcctgtctttaccttcttgcagttttttttttacgtcgggtggttgaaggtcgcagagcaactgattaacccgttcggagaggacgatgatgattttgagactaattggattgtggatcggaatttgcaagtgagcctgctggccgtcgacgaaatgcatcaggacctgccaaggatggaacctgacatgtactggaacaagcccgagccgcagccgccttacacagccgcatctgctcaatttaggcgagctagctttatgggcagtacattcaacatttctctcaataaggaggagatggaatttcagccaaaccaggaggacgaggaggatgcgcatgccggaattatcgggagattcctcggtctccagtcccacgaccaccacccccctagagctaatagtagaactaagctgctttggcccaaaagggaatctctgctccacgagggactgccaaaaaatcacaaggctgccaagcagaacgtgcgcggacaggaagataacaaagcatggaaactgaaggcagtggacgccttcaagtctgctcccctgtaccaacggcctggctactactcagccccacaaaccccactgagtccaacacctatgttctttccactcgaacctagcgccccttccaaattgcactctgtaacaggcatagataccaaagacaagtctctgaaaaccgtgtccagtggggctaagaagagttttgaactcctgagtgagagtgacggtgcactgatggaacaccctgaggtaagtcaggtacgcagaaagacggtcgagttcaacttgaccgatatgcccgagatccctgaaaaccacctgaaggaacccctggagcagagccccacaaacatccatactacactgaaggaccacatggatccttactgggcgcttgaaaatcgcgatgaggcacatagctag

SEQ ID NO: 215930 - DNA, 813 bp, synthetic construct
  misc_feature 1..813: note = Description of Artificial Sequence: Synthetic coding sequence
  source 1..813: mol_type = other DNA
atgaccatcacttatactagtcaggtcgctaacgcgaggctgggatccttcagtagactgctgctgtgctggcgcggtagtatttacaagttactctatggcgaattcttgatcttcctgttgtgttattacattatccgcttcatctatcggcttgcactgacagaggaacaacagctgatgttcgaaaaactgaccctgtactgcgactcgtacatccagctcatcccaatctcctttgtactgggcttttacgtcactctggtggttactaggtggtggaaccaatacgaaaatctgccgtggcccgaccgattgatgtctctggttagtggatttgtggagggaaaggatgagcagggcagattgctccgccgaacattaatacgctacgctaacctcggaaacgtgctcatcctgagatctgtgtcgacggccgtgtacaaaagattccccagcgctcagcacctcgtccaggccggttttatgacacccgctgagcacaagcagttagagaagttgtccttaccccataacatgttttgggtgccctgggtgtggtttgccaatctgtctatgaaggcgtggctgggtgggcgtattagagacccgatcctgctgcaaagtctgctgaacgaaatgaatactctccggactcagtgcgggcatctgtatgcctacgactggattagcatccccctcgtctacactcagccagagcagaggggcgacggagtgccagcacagagtgggggacgcggtggctgtagccggtggcaccactggccacttccccgacccgctgtgccctag

SEQ ID NO: 215931 - DNA, 1815 bp, synthetic construct
  misc_feature 1..1815: note = Description of Artificial Sequence: Synthetic coding sequence
  source 1..1815: mol_type = other DNA
atgtttgagaagctcacgctctactgcgactcatatatccagttaatacccattagctttgtgctcggtttctacgtgaccctggtcgtgacgcggtggtggaatcagtacgagaacttaccatggccagacaggctgatgagcctcgtctccggctttgtggaagggaaggacgaacagggcagattgctgcggaggacattaattcggtatgctaatctgggcaacgttctgattttgcgcagcgtgtctacggccgtgtacaaaagatttcctagtgcccagcatctagttcaggcaggctttatgacacctgccgaacataagcagcttgagaagcttagtttgccccataacatgttctgggttccatgggtctggttcgctaatctgagtatgaaggcctggttaggaggccgtattcgggatcctattctgctgcaaagccttctaaatgaaatgaacacacttcgaacccagtgcggacacctatatgcatatgactggatttcaatacccctggtatacacccaagtcgttaccgtggccgtctactcattttttctgacctgcctggttggccgacagttcctaaatcctgctaaagcataccccggacacgagctcgacctggtggttccggtgttcaccttcttgcaattttttttttacgtgggatggctcaaagtggccgaacagttgatcaacccttttggcgaagacgacgacgactttgaaacaaactggatcgttgacaggaacctccaggtgtctctgcttgctgtcgacgaaatgcaccaggacttgcctagaatggaaccagatatgtactggaataaaccagagccccagcccccttacacagctgcttccgcccaatttagacgtgctagcttcatgggaagcacttttaatatctccctgaacaaagaagaaatggagtttcagcctaaccaggaagacgaagaagatgcccatgccggaatcatcggacgattcctgggactccagtctcacgaccatcacccaccaagggcaaactcaaggacgaaattgttgtggcctaaaagagagtcactgctgcacgaaggcctgcccaaaaatcacaaggccgctaagcaaaatgtcagaggacaagaagataacaaggcttggaaactgaaagccgtcgacgccttcaaatcggcccctttatatcagaggccaggatattatagcgctccccagacacccttgtcccccactcccatgttcttccctctggagcctagcgcaccatctaagctccactccgtcacaggcattgataccaaggataagtcactgaaaacagtgagctccggggctaaaaagtcctttgagttactctcggagtcagacggggctctgatggagcatccggaagtcagccaggtacgcagaaaaaccgttgagtttaatttgacagatatgcctgagattcctgagaatcatcttaaggagcccctcgagcagtccccaacgaatatccacacgaccctaaaagatcatatggatccctactgggcactggagaataggtccgtcctccacctgaaccagggccattgcatagccctctgccctacccccgcttcgctcgctctgtcattgcccttccttcacaacttcctcggatttcatcattgtcagtcaactttggacttgagaccggcactcgcttggggtatttacctggcgacattcaccgggatactcggtaagtgtagcgggccattccttaccagtccctggtatcaccccgaggatttcttgggtccaggcgaaggcagatag

SEQ ID NO: 215932 - DNA, 1530 bp, synthetic construct
  misc_feature 1..1530: note = Description of Artificial Sequence: Synthetic coding sequence
  source 1..1530: mol_type = other DNA
atgacagttacttacaccgcaagggtggcaaacgctagattcggcggttttagccagttgctcctgctgtggcgaggctctatctataaactgctgtggcgggaattgctgtgcttcctcggtttctacatggctctgagcgcagcctaccggtttgtcctgaccgaagggcagaagcgatatttcgagaagctcgtgatctactgtgaccagtacgccagcttgattccagtgagttttgtgctcggattttacgtgaccctggtggtgaaccggtggtggtcacagtacctctgcatgcctctgcctgacgctctaatgtgtgtcgtggctggcacggtgcatggccgtgatgatcgcggtcgcctgtatcgcagaacattgatgcgatatgccggtctgtcagcagtgttgattctgagatctgtttctacggccgtgttcaaacggttccccactatcgatcacgtggtcgaagccggtttcatgactcgcgaggagcggaagaagttcgagaacttgaatagcagttataacaaatactgggtaccttgtgtttggtttagtaacctcgccgcacaagcccgtcgcgagggtcgaattagagacaattccgctttgaaactgctgctcgaagaactgaatgtcttcaggggtaagtgcggcatgctcttccattacgattggatatccgttcccctcgtatacacgcaggttgtgaccatcgccttgtattcatattttttggcatgccttatcggaaggcaatttcttgaccccgctcaggggtacaaggaccacgatctggacttgtgcgtccccatctttacgttgctgcagttcttcttttatgcgggttggcttaaagtagcggagcaactgatcaaccctttcggagaagacgatgacgatttcgagaccaatttccttattgatcggaatttccaagtctcgatgttggccgttgatgagatgtacgacgacttggctgtcctggaaaaggatctgtattgggacgcagctgaggccagagctccatatactgccgctacagtttttcaactgcgccagccatccttccagggttcaacttttgacatcactctggcaaaagaggatatgcagtttcagagattggatgggctggacgggcctatgggcgaagcgcctggagattttctgcagcgcctcctgccggcaggtgcaggcatggtagcaggtgggccactaggacgcagactttctttcctgctgagaaagaacagctgtgtgtcggaggcatcaaccggagcttcctgctcctgtgctgtggttcctgagggtgccgctccagaatgctcctgcggagacccactcctggaccccggtctcccagagcccgaagctccgcctcccgctggtcccgagccactgactctcattccagggccagtggaacccttcagcatcgtgaccatgccgggtcctagaggccctgcccctccctggctacctagcccaatcggtgaagaggaagagaacctcgcatag

SEQ ID NO: 215933 - DNA, 1530 bp, synthetic construct
  misc_feature 1..1530: note = Description of Artificial Sequence: Synthetic coding sequence
  source 1..1530: mol_type = other DNA
atgaccgtgacttacacagccagggtggccaatgcgagatttgggggatttagtcagctgctgctactttggaggggctctatttataagctgctgtggagagaactgttgtgcttcttaggcttctacatggcgttgtctgccgcttaccgctttgtgctgacggagggccagaagcgctacttcgaaaaactggtaatatattgcgaccaatatgcctcgctcattcccgtgtcttttgtgttgggattctatgtcacgttagtcgtgaatagatggtggtctcaatacctttgcatgcccttaccggacgccctgatgtgtgtcgtggctggtaccgtgcacggcagggacgatcgcggtaggttgtaccgcaggacactgatgcgctacgctggtctgagcgccgtgttaatcctccgcagcgttagtaccgctgtatttaaaagatttcctaccattgatcatgtggtcgaggcgggttttatgaccagggaagagcggaaaaagttcgaaaacctgaacagttcctataataagtattgggttccttgcgtgtggttttctaatctggcagcccaggctcgcagggaagggaggatacgtgataacagcgctctgaaactgctcttggaggagctgaacgtgtttcgcggtaaatgcggaatgcttttccactatgattggatctccgtaccactcgtttacactcaggtggtgaccatcgctctgtattcctatttcctggcttgcctgatcggccgacagttcttagaccctgcacaggggtataaggaccacgacctcgacctttgtgttcctatctttacactcctgcagttctttttctacgcaggttggttaaaagtggccgaacaactgataaatccttttggagaagatgacgacgattttgaaacaaacttcctgatcgaccgcaatttccaagtatcaatgctggctgttgacgaaatgtatgacgatctcgccgtgctcgagaaggatctttattgggatgcagcagaagccagggcgccttacaccgcagccactgtgtttcagttaagacaaccatcctttcagggatccacttttgacatcaccttggcaaaagaggacatgcaattccagagactcgacgggctggacggccctatgggggaggcccctggcgatttcctccagcgcttgctgcctgctggcgcagggatggtggcagggggacccctagggaggcggttaagtttcttgctgcgcaaaaatagctgcgtcagcgaggcctctactggcgcaagctgctcctgcgcagttgtgcctgagggggctgctcctgagtgttcgtgtggagatccactgctagaccccggactgcctgagcccgaagccccacccccagctggacctgagccacttaccctaatcccaggcccagtggaacccttctcaattgtgacaatgccagggcctagaggccctgctccaccttggctcccctctccaattggggaagaagaggagaacctggcctag

SEQ ID NO: 215934 - DNA, 1530 bp, synthetic construct
  misc_feature 1..1530: note = Description of Artificial Sequence: Synthetic coding sequence
  source 1..1530: mol_type = other DNA
atgacagtgacttacacagccagggtggcaaatgctcggttcggcggtttcagccagttgttgttattatggagaggctctatatacaaacttctgtggcgcgaacttctctgttttttggggttctacatggcgctttcagcagcctatcgctttgttctgactgaaggccagaaacgatattttgagaagttagttatttactgtgaccaatatgccagcctcatccctgtgtctttcgtcctcggcttctacgtaacgctcgtggtgaatagatggtggagtcaatatttatgtatgccacttcccgacgcgctgatgtgcgtggtggcaggaactgtccatggcagggacgaccggggaagactgtatagaaggaccctaatgagatatgctggcctgagtgctgttctgatcctgcgttcagtaagtaccgctgtgttcaaaaggtttcctactattgatcacgtggtagaagcaggctttatgaccagggaggaaaggaaaaaattcgagaatctgaatagctcctataataagtattgggtgccttgtgtgtggtttagtaatctggctgcacaggcccgtcgcgagggacgaatccgggacaactctgcccttaagttgctgctagaggaactaaacgtgttccggggtaagtgtggcatgctattccactacgattggatttcggtgccattggtgtacacccaggtggttaccatcgcactatatagttacttcctggcctgcctgatcggcagacagttcctggaccccgcacaaggttataaggaccacgatttagacctgtgtgttcccatcttcacacttctgcagttcttcttctacgccggttggctgaaagtcgcagagcaactgattaacccattcggtgaggatgatgacgattttgaaacgaactttttgatcgaccgaaattttcaggtgagcatgttggcagtcgacgagatgtacgatgacttagctgtgctagagaaagatctgtattgggacgctgccgaggcgagagcaccatacacagccgcaacggtgttccagctcaggcaaccgagcttccaaggaagcaccttcgacattaccctggcgaaggaggacatgcagtttcagaggttggatggactggacggacctatgggagaagcccctggagacttcctgcaaagactccttcctgccggagcaggaatggtggcaggtggcccattggggaggcgactaagttttcttcttcgcaagaatagctgcgtaagtgaggcaagcacaggagcctcctgttcatgtgcagtcgtcccagaaggagctgcccctgagtgcagctgtggtgaccccctgctggaccctggtctgcccgaacccgaggctccaccgccagccggacccgaacctctgacactcatccccggtcccgtagagcccttcagcatcgtaactatgcctggacctagaggtccggctcctccgtggctccccagccccattggtgaagaagaagagaaccttgcatag

SEQ ID NO: 215935 - DNA, 219 bp, synthetic construct
  misc_feature 1..219: note = Description of Artificial Sequence: Synthetic coding sequence
  source 1..219: mol_type = other DNA
atgttcctaatatccagctcggtacacggctccgacgaacatggaaggctgctgcggaggacactgatgagatatgttaatcttaccagcctcctgatatttcgtagtgtgagtaccgcagtgtacaagaggttcccaaccatggaccacgtggtggaggcagagcgcactggaatgaagcccattttacctagttcattcgagatgcagagcttttag

SEQ ID NO: 215936 - DNA, 2007 bp, synthetic construct
  misc_feature 1..2007: note = Description of Artificial Sequence: Synthetic coding sequence
  source 1..2007: mol_type = other DNA
atgacagttacttattcaagtaaggttgccaatgcaaccttttttggtttccatcgtctgcttctcaagtggagaggcagtatctataaactgttgtaccgcgagttcatcgtattcgctgtgctgtatacggcaattagtctcgtgtatcggctgttgctcacgggtgtgcagaaaaggtacttcgaaaagctgagcatctattgtgacaggtatgctgagcagatcccggtgacattcgtgctgggattctacgtgacgcttgtggtgaaccgatggtggaaccaattcgtgaatctgccttggccggaccgcttgatgttcttaatctcctcctccgtccacggcagcgacgaacacggacgcctcctcaggaggacacttatgagatacgttaacctgacctctctgctcatatttcggagcgtttccacagctgtgtataagcggttcccaacaatggatcatgtggtcgaggctgggtttatgaccacggacgaacgaaaactttttaaccatttgaagtctcctcacctgaagtactgggtcccatttatctggttcggaaatctggctacaaaggctagaaacgaaggcagaatcagggatagtgtggaccttcagtcactaatgacggagatgaacagatatagatcatggtgtagtttgctcttcggttatgactgggtcggaattccgttagtctacacgcaggtggtgacgcttgccgtctacacttttttctttgcttgtctgatcggaagacagtttctggaccctactaaagggtacgctgggcacgatctcgacttgtatattccaatatttaccctactgcagtttttcttctacgctggatggctgaaggtggccgaacagctgataaaccccttcggcgaagatgatgacgacttcgaaacaaactggtgcattgacagaaacctccaagtctctctgcttgcagtggacgagatgcacatgtcactcccaaagatgaagaaggacatttattgggatgactcggctgcgaggcccccttacaccctggccgcagccgattattgcatccccagtttcttaggatctactgttcaaatgggcctgtcaggatcagatttcccggatgaggaatggctgtgggattacgagaagcacgggcatcgtcactcgatgatcagaagggtgaagcgctttttatctgcacacgaacatccaagctctccgagacggagaagctatcgcaggcagacctctgacagtagtatgttcctgccgagagatgatctatcacccgctagagacctcctagatgtaccaagtaggaatccaccgagggcctctcccacctggaaaaagtcctgcttccctgagggatcccctacccttcatttctctatgggagagttgtcaactatcagggagacctcacagacttcgacactgcagagtctgacccctcaaagctcagtccggactagtccaatcaaaatgcctctcgttccagaagtgctcattacagccgcagaggcgccagtgcccacttctgggggttatcaccacgatagcgctacttccatactgtcttcagagtttactggagtccagccatcgaaaaccgaacagcagcagggccctatgggttcaatcctgtcccccagtgagaaggaaacgccgcctggagggccttccccccaaacggtgagtgcctctgccgaggaaaacatctttaattgcgaggaggaccctggcgatacattcctgaaacgttggtcattgcccggattcctgggtagctctcacacctctttgggcaatctgtcgcccgatccaatgtcctcacaacctgcgctgctcatcgacaccgaaacctcctctgaaatctctggaattaatatcgtggccggatcaagggtcagttccgatatgctttatctgatggagaatttggatacaaaagaaaccgacattattgagctcaataaagaaaccgaggagagccctaaatag

SEQ ID NO: 215937 - DNA, 1197 bp, synthetic construct
  misc_feature 1..1197: note = Description of Artificial Sequence: Synthetic coding sequence
  source 1..1197: mol_type = other DNA
atgaccgtgacgtattcgtcaaaggttgccaatgccactttttttggcttccatagactgttactgaagtggcgtggcagcatctacaaacttctttaccgagagttcattgtgttcgctgtcctctacacagcgatttctctggtatacagactgctcctgaccggtgtccaaaagaggtattttgagaagctgtccatttactgtgaccggtacgctgagcagatccccgtgacctttgtgctgggtttctacgtgacactggtggtcaacagatggtggaatcagttcgtcaacttaccttggcctgatcgcctgatgtttctgatcagctcatctgttcatggatccgacgaacacggacggctgttgagacgaactttgatgcgatatgtcaacctcacctctctcttaatcttccggtctgtgtctactgcagtgtacaagagattccctactatggaccatgtggtggaagccggtttcatgaccacggacgagcgcaagctttttaatcacctgaagtcaccccaccttaagtattgggttcctttcatctggttcgggaacctggcaaccaaagcacggaatgaggggagaatcagggactctgtggatctgcagtctttgatgacagagatgaaccgctaccggtcttggtgtagcctgctgttcggttatgattgggtagggattcccctcgtgtatactcaagtggtgacacttgctgtctacaccttcttctttgcctgtttgattgggaggcaatttctggatcctaccaaaggatacgctgggcacgacctggatctgtatatccctattttcactctgctgcagttcttcttctatgcagggtggcttaaagtggcagagcagctcatcaatcctttcggcgaggacgacgacgactttgaaacaaattggtgcatcgatcgcaatctgcaagtgtcactgctggccgtggatgagatgcacatgagcctgccaaagatgaaaaaagatatatattgggatgactctgcagcccgacccccttacacattggctgctgccgactactgcatcccatccttccttgggtcaacggtccagatgggcaagcagatgccgaaaaacgaatggaagatggaagatattaaaattccgctcccacagccacagtttcagtgtgccaaatccgatcccggaggttag

SEQ ID NO: 215938 - DNA, 219 bp, synthetic construct
  misc_feature 1..219: note = Description of Artificial Sequence: Synthetic coding sequence
  source 1..219: mol_type = other DNA
atgttcctgatttctagcagtgtgcatggaagcgacgaacacggtaggctgctgcgcagaactctcatgagatacgtcaacttaacatcactgcttatattccgctcagtatctacggccgtgtataagaggtttccaaccatggatcatgtggtcgaggctgaaaggactgggatgaagccgattctgcccagcagtttcgagatgcagtccttctag

SEQ ID NO: 215939 - DNA, 1368 bp, synthetic construct
  misc_feature 1..1368: note = Description of Artificial Sequence: Synthetic coding sequence
  source 1..1368: mol_type = other DNA
atgaccactgacgaaagaaagcttttcaaccatttgaaaagtccgcacctaaagtattgggttcctttcatatggtttggtaacctggccacaaaggcaaggaatgagggccgtatcagagacagcgtggacttgcaaagcctcatgaccgagatgaaccgctacagaagctggtgctccttgctgtttgggtacgactgggtcggtattccactggtgtacactcaggtcgcggaacaattgattaatccttttggtgaagacgacgacgattttgaaactaactggtgcatcgatagaaatctgcaggtgagcctacttgctgtcgacgagatgcatatgagcctgccgaagatgaagaaggacatttactgggacgactctgccgcacgcccaccttataccctcgcagccgcagactactgtattccgagtttcttaggttccacagtgcagatgggactgtctgggtctgattttcccgacgaggaatggctgtgggattacgaaaagcatggccatcggcattccatgatccggagagttaagagatttctgagcgcacatgagcacccgagttcccctcgtagaagatcttaccgacgacagactagtgattctagcatgtttctcccgagggatgacctcagccctgcacgggacctgctagatgtgcccagtcgcaatcctccgagggcaagcccaacatggaagaaatcttgtttccctgaaggctcaccgaccctgcacttctctatgggcgagttgtcgaccatccgggagacctcccagacatccacactgcagagtctcactccccaaagttctgtgaggaccagcccaatcaagatgcccctggtcccggaggtgctgatcacagccgctgaagcccctgttcccacttccgggggttatcaccacgactctgccacatccattctgagttccgaattcacgggggtgcagccttctaaaactgagcagcaacagggtcccatgggtagcatccttagtccctcggagaaggaaacacccccaggagggccaagtccccagaccgtttctgccagtgccgaagagaatattttcaactgcgaggaggatccaggcgatactttcttaaaacggtggtccttgccaggattcctgggctcgagtcatacgtctctgggcaatcttagccctgaccccatgtcatctcagcctgctctgctgatagatacggaaacttcttccgagatttccggaataaatatcgtagccggttcgagggtgtccagtgacatgttatacctcatggagaatctggacacaaaggaaacagatatcattgaacttaacaaagagacagaagagtcaccaaagtag

SEQ ID NO: 215940 - DNA, 219 bp, synthetic construct
  misc_feature 1..219: note = Description of Artificial Sequence: Synthetic coding sequence
  source 1..219: mol_type = other DNA
atgttccttatcagctcctccgtgcatggttcagatgaacacggacgcctcctccggcgtactctcatgagatatgtgaacttaaccagcctgctgatatttagaagcgtcagcactgctgtgtataagcggttccctactatggaccacgttgttgaagccgagcgcactggaatgaagcctatcctcccatcctcatttgagatgcagtctttttag

SEQ ID NO: 215941 - DNA, 1422 bp, synthetic construct
  misc_feature 1..1422: note = Description of Artificial Sequence: Synthetic coding sequence
  source 1..1422: mol_type = other DNA
atgactgtgagttacacccttaaggtggccgaagcccgatttggcggattcagtggcttactgttgaggtggcgtggaagcatttacaagctgctgtacaaggaattcctgctgtttggcgctctttatgcagtgctcagcataacttataggctcctcctcacccaggagcagaggtatgtatatgctcaggtggcccgttactgcaaccgatcagccgacttgatccctctctctttcgtgctgggattttatgttaccctggtggttaaccgttggtggagtcagtatactagcataccactgccagaccagctgatgtgtgtgatctcagccagcgtccatggcgtggatcagagaggaaggcttctgcgtcggacgctgatccggtacgccaatctcgccagcgtcctggtactcagatctgtaagcacccgcgtgcttaaacgcttcccaactatggaacacgtggtcgatgcaggctttatgagccaggaggaaagaaagaagttcgagtctcttaagagtgattttaataaatactgggtgccctgcgtgtggttcaccaatttggccgctcaggctagaagggacggacggatccgcgacgacatcgctttgtgtctgttgctggaagagctgaacaaatacagggcaaaatgctcaatgctatttcactacgattggattagcattccactggtgtacactcaggtcgttaccatcgccgtctattccttcttcgccctttctctcgtcggccgtcagtttgtagagcccgaagccggagccgcaaagcctcagaaattgctcaagcccggacaggaacctgctccagcgctcggcgatcccgatatgtacgtgccactaactacattattacagttcttcttttatgctggctggttaaaggtggcggagcagataataaatcccttcggggaggatgatgacgatttcgagaccaaccagctaattgacagaaatttgcaggtgtcactgctttctgtggacgagatgtaccagaacctgccacctgcagagaaggatcagtattgggatgaggatcagccccagcccccttataccgtggctaccgctgccgaaagcctgcggccaagttttctcggctctacctttaacctgagaatgtccgatgatccagagcagagtttgcaggtcgaagcatctccgggatctgggagacctgcaccggctgctcagacgccactcctgggccgtttcctcggggtcggtgctccatctccagccataagcctccgtaactttggtagggtgcgtgggacacccaggccccctcatctcctgaggttccgtgcagaagaggggggtgaccccgaggctgcagcccgaatcgaagaagaatcggctgagagtggcgacgaagcgctggagccctag

SEQ ID NO: 215942 - DNA, 294 bp, synthetic construct
  misc_feature 1..294: note = Description of Artificial Sequence: Synthetic coding sequence
  source 1..294: mol_type = other DNA
atgtatctcggtattacgccttcagtaacatgcaataactcttctaagaacgaattctccttgatcttggagaaaaatccactggtggagttcgttgaggaattacccgcaggtaggtccagcttgtgctattgtaacctgttgtgcggtatcatcaggggagccttagaaatggtccatctggcagctgatgtcaccttccttcaggatcgactcaagggggattcagtgactgagatcggaatcacatttttaaaaaagcgggacgaaaagaaataccgcggtaagaaatag

SEQ ID NO: 215943 - DNA, 546 bp, synthetic construct
  misc_feature 1..546: note = Description of Artificial Sequence: Synthetic coding sequence
  source 1..546: mol_type = other DNA
atgtcacggcctgcccaccgaagacctgagtaccacaaaataaacaaagatctctttgttctgacttatggcgcactggtagcccagctctgcaaagactacgagaaggatgaagatgtaaatcagtacctggacaagatggggtatggaataggcacccgacttgttgaagactttctggccaggagctgcgttggacgctgccattcttattccgaaattatagacattatcgcgcaggttgcctttaagatgtacctggggatcactccatcagtcacttgtaacaacagctctaagaacgagttttcgttaattctggagaagaatcctctagtggagtttgtggaggagctgccagcgggacgatccagtctgtgctattgcaatctgctctgcggcataataaggggagcactggagatggtacacctggctgcggatgtcactttccttcaggaccggttaaagggggactccgtcactgaaatcggcatcacgttcctgaaaaaacgcgacgagaaaaaatacaggggtaaaaagtag

SEQ ID NO: 215944 - DNA, 504 bp, synthetic construct
  misc_feature 1..504: note = Description of Artificial Sequence: Synthetic coding sequence
  source 1..504: mol_type = other DNA
aataaggatctcttcgtgctgacttacggcgcactggtggcccagttatgcaaggattatgaaaaggatgaggacgtcaatcagtatctcgacaagatgggctatggtataggcacacggctagtagaagatttcctagctcgaagttgcgtgggaaggtgccacagctattcagagatcatcgatatcatagcccaggttgctttcaagatgtatctcgggatcacaccaagcgtgacttgcaataatagttccaaaaatgagttttctctcatcctcgaaaagaatccgttagttgagtttgtggaagagctgccagccggaagaagttccctgtgttattgcaatttgctctgtggaattataaggggagccttagagatggtgcacctggctgccgatgtgacatttttgcaggacaggctgaagggtgattctgtgaccgaaattggaatcacatttctgaaaaagagagacgagaagaaatatagaggcaaaaagtag

SEQ ID NO: 215945 - DNA, 1497 bp, synthetic construct
  misc_feature 1..1497: note = Description of Artificial Sequence: Synthetic coding sequence
  source 1..1497: mol_type = other DNA
atgcgcccaccggcatgttggtggcttctggcccctcccgcactactggcactacttacgtgttccctcgcctttggcctcgcatccgaggataccaaaaaggaagtgaagcaaagccaggatctggagaaaagtggcatttccaggaaaaacgacattgatctcaaagggatcgtgtttgtgattcaatcccagtccaatagctttcatgctaaacgcgctgaacaactgaaaaaaagcatccttaagcaggccgctgatttgacacaggagctgccctctgtccttctgctccatcagttagcgaagcaggagggagcatggacaatcctgccactcctgccacacttcagtgttacatatagcagaaattcttcatggatctttttttgcgaagaagagacacgcatccagatccctaaattgctagaaacactcagacgctatgacccaagtaaggagtggtttctaggaaaggcgctccacgatgaggaggctaccattatccaccactacgctttctccgaaaaccccaccgtgtttaaatatcccgatttcgccgctggatgggcactgtctatcccccttgtcaataaactgaccaaacgattaaagtccgagagtctgaaatccgattttaccatagacctgaagcacgagattgctctgtacatctgggacaagggtggtggaccccctctcacgcctgttccagagttttgtacgaacgacgtggacttctattgtgctactaccttccactctttccttcccctgtgccgaaaacccgtgaaaaaaaaggatatcttcgtggccgttaagacgtgtaagaagttccatggcgaccgcattcccattgtcaaacaaacctgggagagtcaggcatcattgatcgagtattattcggactataccgagaactctatccccaccgtagatctggggatccccaatacagatcggggacattgcggaaaaactttcgcaatactcgagaggttcctgaacaggtcacaggacaagaccgcatggcttgttattgttgatgacgacactttaattagcatttcacgactgcagcaccttctttcttgttatgatagcggggagcctgtctttctgggagaacggtacggttacggtctgggcacgggcggatactcatatataacaggcggaggaggaatggtcttcagccgcgaagccgtgaggcgcctcctcgccagtaagtgtcgatgctacagtaacgatgcgcctgatgacatggttctcggcatgtgcttttcgggtttaggcatccctgtgacccattcacccctgtttcaccaagccaggccagtagattaccctaaggactacttatcacaccaggtccccatttccttccacaaacattggaatattgatccagtcaaagtgtattttacatggttggccccatcagatgaagacaaggcccgtcaggagactcaaaagggcttccgggaggagctgtag

SEQ ID NO: 215946 - DNA, 1005 bp, synthetic construct
  misc_feature 1..1005: note = Description of Artificial Sequence: Synthetic coding sequence
  source 1..1005: mol_type = other DNA
atgccgaaacgccgagacattctggcaatcgtacttattgtgctcccttggaccttgctgatcacagtctggcatcagtcgaccttggcccctctgcttgctgtccataaagacgagggcagtgacccacggcgagaaacccctcctggcgctgaccctcgtgaatattgcacaagcgatcgggatattgtggaggttgtccgcacagaatacgtctatacgcggccacctccatggagcgatacgttgcctacaatccacgtcgtcactcccacctattcgagacctgtgcagaaagccgaactgaccagaatggccaacacattgctgcatgtcccgaacctgcactggctggtggtcgaggacgccccaagacgaactccgctgacagccaggctcctgagagatacaggtctgaactacacccatctgcacgtggaaaccccgagaaattataagcttaggggcgacgcaagggatccacggataccaagaggcacgatgcaacggaacttagctttgcgctggttgcgcgagacctttccgagaaatagtagtcagccaggggttgtgtactttgctgacgatgacaacacatactccctggagctcttcgaggaaatgcggagtactaggcgggtgagcgtgtggcctgtcgcctttgtaggagggttgcggtacgaagccccaagagtgaatggcgctggcaaagttgtcggatggaagacagtgttcgatccacacaggccattcgctatcgatatggcaggctttgctgttaacctgcggttgatacttcagaggtcccaggcctactttaagctcagaggtgtcaaaggtggctaccaggagagctctctcctacgtgagttggtaaccctgaatgatctcgaacctaaggctgccaattgtacgaaaatcttggtctggcacactcgtaccgagaagccagttctcgttaatgagggcaaaaaaggtttcaccgatccaagtgttgagatttag

SEQ ID NO: 215947 - DNA, 1005 bp, synthetic construct
  misc_feature 1..1005: note = Description of Artificial Sequence: Synthetic coding sequence
  source 1..1005: mol_type = other DNA
atgcccaaaagaagggacattctggctatcgtattaattgtcctgccgtggacacttctgataaccgtgtggcatcaatctaccctcgctcccctactcgccgttcacaaagatgagggctctgatcccagacgcgagacccctcccggagccgaccctcgcgagtactgcacgtcagatcgagacattgttgaggtcgttcggacggaatatgtatatacacgacctcctccgtggtctgatactctgccaactatccacgtggtgacccctacctacagcagacctgttcagaaagctgaactgacaagaatggctaatactctgctgcacgttcccaacctgcactggctcgttgtcgaagatgcacctcgccgaacacccctgacagccaggctgctgagggacaccgggctcaattatactcacctgcacgtggagacccccagaaactataaattacgcggtgatgcacgggaccctcgtattccccgtggcacaatgcagcggaacctggctttgagatggcttagggaaacttttccacgaaacagttctcaacccggagtagtctattttgcagatgacgataatacctattctttggagctcttcgaggagatgagaagcaccagacgcgtttctgtctggcccgtggcattcgtgggcggactcagatatgaggctccacgcgtgaacggagcagggaaggtggtcggatggaaaaccgtgttcgatcctcacagaccattcgccatagacatggccggattcgcagttaacctccgcctcatcttgcagagatctcaggcgtactttaagcttcgcggagttaagggcggatatcaggaaagctcacttctgcgtgagcttgtcactctcaacgacctggagcctaaggcagctaactgcacaaagatcttagtgtggcacacaagaaccgaaaaacccgtcttagtcaacgaagggaaaaaaggatttacagatccatcagtcgaaatttag

SEQ ID NO: 215948 - DNA, 1005 bp, synthetic construct
  misc_feature 1..1005: note = Description of Artificial Sequence: Synthetic coding sequence
  source 1..1005: mol_type = other DNA
atgcctaagaggagggatattcttgccattgtcctcattgtcctgccgtggactctgctgatcacagtgtggcatcagagtacactggccccactgctcgcggtccacaaggatgaaggatctgaccctagacgtgagacccccccaggtgccgatcccagggagtattgcacgtccgacagagatatagtcgaggtggttcgcactgagtacgtttatacacgtccacctccttggtctgacacactgccaaccatacacgtggtgacccccacctatagccgtcctgtccagaaggctgagcttacaagaatggcaaacacactgttacacgttcccaacttgcattggctggtggtagaagatgctcctcggagaactcctctcaccgccaggctgttgagagatactggcctgaattatacgcacctccacgtcgaaacccccaggaactataaactgaggggcgacgctcgggatcccaggatcccacgaggtacgatgcagcgcaatttggcgctgcgctggctgcgagagacgtttcctcgcaacagcagtcagcccggagtggtgtatttcgccgatgacgacaacacatactccctcgagctattcgaggaaatgagaagtacccgcagagtgtctgtgtggcccgttgcattcgtgggaggacttagatatgaagccccacgcgtcaacggggcaggtaaggtcgttggctggaaaactgtgtttgatccccaccggccatttgcaatcgacatggccggatttgccgtgaacctccgtctgatactgcagcgctctcaggcatattttaagctgcggggagtgaaaggaggctatcaggagagtagtctgctgcgagagcttgtcaccctcaacgacttggagcctaaagctgcaaactgcacaaagattctggtctggcatactcgcaccgagaaacctgtactggtgaacgagggcaagaagggcttcacagacccaagcgttgagatctag

SEQ ID NO: 215949 - DNA, 1044 bp, synthetic construct
  misc_feature 1..1044: note = Description of Artificial Sequence: Synthetic coding sequence
  source 1..1044: mol_type = other DNA
atgggcaatgaggagccatgggtgcagccagctctcgaaatgcccaagcggagggacattctggcaattgtcctcatcgtgttgccttggacccttctgattaccgtgtggcatcagtccactctggccccactgctcgcagtgcataaagatgaggggagtgatccacgaagagagaccccacccggtgccgatcctcgggaatattgcacatccgatagagatattgtagaggtagtgcggaccgagtacgtctatacacgccctcctccttggtcggatacactcccaacgattcacgtggtgacacccacctacagtagacccgtacagaaggccgaactaacccggatggctaataccctgttgcatgtgccaaacctgcattggttagtagtcgaggatgcacccagacgtactcctttgacagccagacttctccgcgacactggccttaattatacccacctccatgttgaaacccctcggaattacaaactccggggtgatgccagggatccgaggattcctcgaggcaccatgcagcgaaacctggctctcagatggctcagggaaacattccctcgaaactcttctcagcctggagtggtttattttgctgatgatgacaacacgtattctctggagcttttcgaagagatgaggagcacacggcgagtgtctgtttggcctgtcgcatttgttggcggactgaggtacgaggcgcctagggtgaatggtgcagggaaggtggtgggttggaagacggtgtttgacccccacaggccattcgccattgacatggctggttttgcggtaaacctccggctgatattgcagcgtagtcaagcttatttcaaactgcggggtgttaaaggcggttaccaggaatcttcgctgttgagggagctggtgacacttaatgacctcgaacccaaggcagctaattgcacaaaaattctggtttggcacaccaggactgagaagccggtcctggtaaacgagggaaagaagggattcacggacccatccgtggagatttag

SEQ ID NO: 215950 - DNA, 1008 bp, synthetic construct
  misc_feature 1..1008: note = Description of Artificial Sequence: Synthetic coding sequence
  source 1..1008: mol_type = other DNA
atgaagctaaagctgaaaaatgtgttcctggcgtacttcctcgttagtatcgctggcctcctgtacgccctggtacaactgggccagccatgtgattgtctccccccactacgggctgctgccgagcagttaaggcaaaaggatctgcggattagccagctacaagctgagctccgaaggcccccacctgccccagcacagcctcccgagcccgaagcactgcctacaatttacgtggttaccccaacatacgccaggctggtccagaaggcagagctggtccgcctttcacagacactctctcttgtgccacggttacattggctgctcgtggaagatgctgaggggcctacccctcttgtaagtggtcttctcgccgctagcgggctgctgtttacacatttagtggtgctgacacctaaggcacagaggctacgtgagggggaacccggttgggtccacccgagaggggtggagcagagaaacaaagcgctggattggttgagaggaagaggcggagctgttgggggagagaaggacccccctccaccaggtactcagggggtcgtgtacttcgcagacgacgacaacacttattctcgcgagctgttcgaagagatgcgttggacacgaggggtctctgtatggcctgttggactggtcgggggactgcggtttgagggccctcaagtccaagatggccgagtcgtcggtttccacacagcttgggaacccagtcgccctttcccagtggacatggctggatttgcagttgctctgccgcttctgctcgacaagcctaacgctcaatttgattctacggccccaagaggacacctcgagagctctttactgagtcacctggttgaccctaaggaccttgagccacgggcagctaactgcactagggtcttggtctggcacacgaggaccgagaaacccaagatgaagcaggaggaacagctgcagcgtcaggggagggggagcgatcccgcaattgaggtgtag

SEQ ID NO: 215951 - DNA, 948 bp, synthetic construct
  misc_feature 1..948: note = Description of Artificial Sequence: Synthetic coding sequence
  source 1..948: mol_type = other DNA
atgaaactcaagctcaagaacgtcttcttagcgtattttttggttagtatcgctgggcttctatatgccctggtgcagctgggacagccatgtgattgcttgccccctctgcgcgctgcagcagaacagttgcgtcaaaaagatttgaggatcagccagctacaggctgaactaaggagaccccctcccgctccggctcaacccccagagcccgaggcgctcccgaccatttacgtggttaccccgacatatgcgagactggtgcaaaaggcagaactggtccgcctgtctcagacactatccctcgtgcctaggctccattggttgctggtggaagatgccgaagggccaacccctctggtgagcggcctgttggcagccagtggcctgttgttcactcatctcgtggttcttaccccaaaagcgcagcgactgcgggagggcgagcctgggtgggtacatccaaggggggtcgagcaacgcaataaagctctagactggctgcgtgggagggggggagctgtcggtggcgagaaggacccccctccgcctgggacacaaggggttgtatacttcgctgacgatgataatacttactcacgagaactgttcgaggaaatgcggtggactaggggcgtgtccgtgtggcctgtggggctggtaggaggactgcgctttgaaggacctcaagttcaggatgggcgagtggtgggattccacaccgcctgggagcccagtcgtccttttcccgtggacatggccggtttcgccgtggctctgcccctgctattggacaagcccaacgctcagtttgattctacagctcccaggggacacctggaatcctccctgttgtcccatctggtggacccgaaagatctcgagccgagggctgccaattgcaccaggactgaaagcaggtgcgtgactcaggccggagtacagtag

SEQ ID NO: 215952 - DNA, 2997 bp, synthetic construct
  misc_feature 1..2997: note = Description of Artificial Sequence: Synthetic coding sequence
  source 1..2997: mol_type = other DNA
atgggcagtcctcgggcagcccgtccgccactactgctgcgcccagttaagttgctgaggaggagattcagattactgctggctctggctgtggtaagcgttgggttgtggacactatacctcgagctcgtcgccagcgcacaggtcggaggtaatcccctaaaccgcagatacgggtcctggagagagcttgccaaagccctggcaagtcgcaatattcccgcagtggatccacacctacagttctaccaccctcaacgcctaagcctcgaggaccatgacattgaccagggtgtgagttcaaactcctcatatctaaagtggaacaaacctgtgccatggctgtctgagttccgaggcagggccaacttacacgtgttcgaagactggtgcgggagttccattcagcagctacgcaggaatctccacttccccctgtaccctcatattcgaactaccctgaggaaacttgccgtctctccaaagtggacaaattatggactccggatttttggatacttgcatccattcactgacggcaaaatccagtttgcaatcgcggcagacgacaatgcggaattttggctgtccctggatgatcaggtctcagggctgcagttgctcgctagcgtaggaaaaacaggaaaggagtggaccgccccaggtgaatttggcaaattcagatctcagataagcaaaccggtgtccctgagcgcctcgcaccggtactatttcgaagttctccataagcagaacgaggaaggcacagatcacgtcgaagtggcctggagacgaaatgaccctggagcgaaattcacgataatcgatagcctcagcctgtcgctgttcactaatgaaaccttcctgcagatggatgaagttggccatatcccccagaccgctgcttcacacgttgacagctctaacgcattgcccagagacgagcagcctccagcagacatgctgaggccagaccccagggatactctctatcgagtccctctgatccccaaaagtcatctgagacacgtcttacccgactgcccttataaaccttcttacttagtagacggtctccccctgcagcgataccaggggctcaggttcgtccatctgtctttcgtgtacccaaatgattacacccgattgtcccacatggagacacataataagtgcttttatcaggaaaacgcgtactatcaagacagattttcattccaagagtatattaaaatcgatcagcctgagaaacaagggctggaacagccaggcttcgaagaaaatctcctggaagagagccaatatggtgaagtggccgaagagaccccagcttctaacaaccagaatgctaggatgctcgagggcaggcagacacccgcaagtacactcgagcaagacgcaacggattatcgcttaagaagccttaggaagcttctggcccagccaagagagggactcctcgcacccttttctaagcgtaatagcacagcttcattccctggtcgcaccagtcatattcccgtgcagcagcccgagaaacgtaagcaaaagccgtctcctgagcccagccaagactcccctcattctgacaaatggcctccaggacacccagtgaaaaacctgccccaaatgcgtggcccaaggcctaggccagccggagattcaccacgaaagactcaatggctaaaccaggtcgaaagctatatagccgagcaacgtaggggcgataggatgagaccgcaggcacctggcagggggtggcatggggaggaagaagttgtcgcagctgcgggacaggagggccaggtggagggagaagaggagggagaggaagaggaggaagaagaagatatgagcgaggtgttcgaatacgtcccagtgttcgatcccgtggttaactgggaccaaactttctcagcacgcaatctggattttcaggctctccgaaccgactggattgacctgagctgtaacacttcgggaaacctactgttgcctgagcaggaagccctggaagtaacccgggtcttcctcaaaaagctcaaccagaggagcagaggcaggtaccaacttcaacggattgtgaacgtagaaaagcggcaggaccagctgcgtgggggtcgctacctactcgaattagagctgttggagcaaggccagcgcgttgttcggctaagtgagtatgtgtcggcaagaggatggcaaggcatcgatcccgcaggcggagaggaagttgaagccaggaatctgcaaggccttgtgtgggatccccataatcggaggcgccaagttttgaatacaagggctcaagaacctaaactgtgctggccacaggggttcagctggtcgcacagagccgtggttcacttcgtggtcccggtcaagaatcaagcgaggtgggtgcagcagttcataaaagatatggagaatttattccaagtgaccggggacccccattttaacatcgtgatcaccgattactccagcgaagatatggatgtggaaatggcactgaagcgatccaagctgagatcttatcagtatgtgaagctgagtgggaatttcgaaagatcagcagggctccaggcaggaatcgatctcgtgaaggaccctcattccataattttcttgtgcgacctgcatatacacttccctgcaggcgtcatcgacgccattaggaaacactgtgtggagggtaaaatggcatttgcaccaatggttatgaggcttcactgtggcgctaccccccagtggccggagggctattgggaagtgaatggcttcggattattaggcatttataagagtgacttggaccgaattgggggaatgaatacgaaagagtttagggacagatggggcggagaagattgggagctgctcgaccgcattctacaggcagggttggacgtggagcggctttctctgaggaactttttccatcacttccactcaaagcggggaatgtggagcaggcgccagatgaagacactttag

SEQ ID NO: 215953 - DNA, 306 bp, synthetic construct
  misc_feature 1..306: note = Description of Artificial Sequence: Synthetic coding sequence
  source 1..306: mol_type = other DNA
atgagcaggagtgtcgccttggccgttcttgcactgctttctctgtctggactcgaagccattcaacgaacaccaaaaattcaggtgtacagccgtcaccctgccgaaaacggtaagagcaactttctcaactgttacgtgtcaggattccatccatctgacatcgaagtggatctcttaaagaatggagaacgaattgagaaggtggaacactcagatctcagtttctccaaggactggtcattctacctgctctattacacagagtttacgcccacagagaaaatgagcatgcccgctgtttag

SEQ ID NO: 215954 - DNA, 369 bp, synthetic construct
  misc_feature 1..369: note = Description of Artificial Sequence: Synthetic coding sequence
  source 1..369: mol_type = other DNA
atgtctaggtcagtggcactggcagtgcttgcattattaagcctgagcgggctggaggccatccagcggacaccaaagattcaagtttattccaggcaccccgctgagaacggtaaatctaacttccttaattgttacgtatcaggtttccacccctccgatattgaagtggatctactcaaaaatggggaaagaattgaaaaggttgaacatagcgatctgtcgttcagcaaagattggtccttttacttattgtattacaccgagttcactccaaccgagaaagacgagtacgcctgcagggtcaaccatgtcaccctctctcagcctaagattgtaaagtggggaaaaagttatatccttttatag

SEQ ID NO: 215955 - DNA, 360 bp, synthetic construct
  misc_feature 1..360: note = Description of Artificial Sequence: Synthetic coding sequence
  source 1..360: mol_type = other DNA
atgtcccgctctgtcgcactggcggttctcgccctcttgagtctgtccggactggaagctatccagaggacgccaaagatacaggtctactcccgacatcccgcagagaacgggaagagtaacttcctcaattgctacgtgagtggctttcacccctcagacatcgaggtagacctgctcaagaatggagagaggattgagaaagtcgaacacagtgacctgtccttctccaaggactggagcttctaccttctgtattatacagagtttacacccacagagaaagacgagtatgcttgtagggtcaaccacgtgacactttcacagcccaagattgtgaaatgggatcgcgacatgtag

SEQ ID NO: 215956 - DNA, 369 bp, synthetic construct
  misc_feature 1..369: note = Description of Artificial Sequence: Synthetic coding sequence
  source 1..369: mol_type = other DNA
atgtctcgatccgtagcacttgcggtactcgccttactttctcttagtggcttggaggcgatacagcggaccccgaagattcaggtgtacagcagacatcctgctgagaacgggaagagcaactttcttaattgttacgtctccggctttcaccccagcgacatcgaagtggatctcttgaagaatggagaaagaatcgaaaaggtagaacattcggatctcagtttctcaaaagattggtcattctacctgctgtactatactgaatttacgccgaccgagaaggatgaatacgcctgtagagtgaatcacgtgacgctgagtcagccaaagattgtcaagtggggcaaatcctatatcctgttatag

SEQ ID NO: 215957 - DNA, 360 bp, synthetic construct
  misc_feature 1..360: note = Description of Artificial Sequence: Synthetic coding sequence
  source 1..360: mol_type = other DNA
atgagccgttctgtggcattagccgtccttgcattgctctctttgtcaggcctagaagcaatccagcggacacccaagatccaagtttactcaagacaccccgctgaaaatgggaaaagcaacttcctgaactgctatgtgtccggcttccacccctctgacatagaagtggacctgctgaaaaacggcgagcgtatagagaaagtagagcactcagacctcagcttctccaaggactggagtttttacctactttactacacggaatttactcctacagagaaggatgagtatgcgtgtcgggtcaatcacgtgactctatcccagcccaagatagtgaaatgggatagagacatgtag

SEQ ID NO: 215958 - DNA, 360 bp, synthetic construct
  misc_feature 1..360: note = Description of Artificial Sequence: Synthetic coding sequence
  source 1..360: mol_type = other DNA
atgtctcgatcggtggcgttggcggtgctggctctgctgagcctttcaggcctcgaggccattcagcggaccccgaaaattcaggtgtactcacggcatccagccgaaaacgggaagtcaaacttcctcaactgttacgtttctggcttccatccgtcagacatagaagttgacctgctaaagaatggggagcggatcgaaaaggttgaacatagcgatctgagcttctccaaggattggtctttttacctgttatattacaccgagtttacccccacagaaaaagatgaatacgcttgccgcgtgaatcacgtgaccctgtcccagccaaagatcgtgaagtgggacagggacatgtag

SEQ ID NO: 215959 - DNA, 1644 bp, synthetic construct
  misc_feature 1..1644: note = Description of Artificial Sequence: Synthetic coding sequence
  source 1..1644: mol_type = other DNA
atggacatcatcttcggcaggaaccgcaaggaacaactcgagcctgtcagggccaaggtgacaggtaaaatccctgcatggctccaaggaactctgctccgcaacggcccaggaatgcatacagtgggcgaatcgcgctataatcactggtttgatgggctggctctgctgcatagtttcactatcagagatggagaggtttactatcgctctaagtatctccggtctgacacatacaacaccaacatagaggctaaccggattgtggtcagtgaattcggaacaatggcgtaccccgacccatgcaagaatatcttctcaaaggcgtttagctacttaagccataccatccccgatttcacagataattgcttaatcaacattatgaagtgcggtgaagacttctacgctacgtccgagactaattatatccgcaaaatcaaccctcagaccttagaaacattagagaaggttgattaccgcaagtatgtagccgtcaatctggccacctcacacccccactatgacgaggctggaaacgttctgaacatgggaactagcattgtcgagaagggtaaaacgaaatacgtgatcttcaagatacccgctaccgtcccagagggtaaaaaacaaggaaagtctccatggaagcacacagaggtgttttgtagcatcccctctagatctctactctcacccagttattatcacagtttcggcgtgacagaaaattatgtcatctttctggagcagcctttcaggcttgacatcctgaagatggcaactgcgtacatccgtcgaatgagctgggcaagttgtcttgcattccaccgagaagaaaaaacgtacattcatatcatcgatcagcgcacacggcagccagtacaaaccaaattctacaccgacgcaatggtggtgtttcatcacgtcaatgcatacgaggaagacgggtgtattgtgtttgacgttatcgcatacgaagacaattcactgtaccagctcttttatctcgctaacctcaaccaagatttcaaagaaaacagccgactcacatctgtacccacgctcagaaggtttgctgtccccctccatgttgacaaaaatgcagaggttggaacaaatctgattaaagtagcaagtactactgctactgcactcaaggaggaagatggccaagtctattgtcagccagagtttctgtatgaagggcttgagctgcctcgggtgaactatgcgcataatgggaagcagtatcgctacgtattcgctacgggagtacagtggagcccgattcccacaaaaattattaaatatgacattctcaccaagtcaagccttaagtggagggaggacgattgttggccagctgaaccgctgtttgtcccagctcccggagcaaaggacgaggatgatggggtaattttgagtgccattgtatccactgatcctcagaaactgcctttcctcctgattttggatgcgaaatcttttaccgagctagccagggccagcgtggacgtagatatgcacatggatctccatggcttgttcattacagacatggactgggacaccaagaagcaggcggcatcagaggagcagagggatcgggcaagcgattgtcatggggctccattgacctag

SEQ ID NO: 215960 - DNA, 1437 bp, synthetic construct
  misc_feature 1..1437: note = Description of Artificial Sequence: Synthetic coding sequence
  source 1..1437: mol_type = other DNA
atggctgcaggcaaccccgcaccccagtgggcctgggacgctcactcgtggggggtgcaaatccagcccctggtccgcagaccttgtcctgcccctcagctccatcaccagcggagagcgttttcatatctgtcccatacaattcccgatttcactgataactgtctgataaatatcatgaaatgtggtgaggatttctacgccactagcgagactaactacattaggaaaattaatccacagaccctagaaactctggaaaaggtagattaccgcaaatatgtggctgttaatttagccacatcccaccctcattatgatgaggccggaaatgtgctcaacatggggacttccattgtggagaagggaaaaacaaaatatgtcatcttcaaaatcccagctacagtccccgaagggaaaaagcagggtaaaagtccctggaaacatactgaggtgttttgttccataccaagccgtagtcttctgtcgccatcctactatcatagttttggggtcaccgaaaactatgtgatttttttggaacagccatttcgattagacattttgaagatggccactgcatatattagacgaatgtcgtgggcatcttgtctcgccttccacagggaagaaaagacctacatacatattatagaccagagaaccagacagcccgtgcagactaagttttacacggatgctatggtggtgtttcatcacgtgaacgcctacgaagaggacggctgcattgtatttgatgtaatcgcctacgaagataatagcctgtaccagctgttttacctggccaacctgaatcaggacttcaaggaaaacagcagactgacctccgtcccgaccttgaggcgttttgccgtgcctctgcacgtggataagaatgctgaggtcggaaccaatctgattaaggtggctagtacaaccgcaaccgcactcaaggaagaggacggacaagtgtactgtcaacctgagtttttatacgaggggctcgagctgccgagggttaactacgcccacaacggaaaacagtataggtacgtgtttgcaaccggagtgcagtggagccctatcccaactaaaatcatcaagtacgacatcttaacaaaatcgtccctgaaatggagggaagacgactgttggcccgctgagcctctgttcgtcccagctccaggagccaaagatgaggatgatggtgtgatcctctctgctattgtgagtacagacccacaaaaacttccttttctgctaatcctggacgcgaagtcttttaccgagctggcccgagccagtgtcgatgtggatatgcatatggacttgcacggcctgtttatcacggatatggattgggacactaagaaacaggcggcttccgaagagcagcgagatagagcaagtgactgtcacggagctccattaacatag

SEQ ID NO: 215961 - DNA, 1740 bp, synthetic construct
  misc_feature 1..1740: note = Description of Artificial Sequence: Synthetic coding sequence
  source 1..1740: mol_type = other DNA
atgttttttcgagtctttctgcattttattcgaagccactccgctactgcagtggacttccttccagtcatggtccacagactccccgtgtttaaacgttatatgggaaatacccctcagaagaaggcggtatttgggcaatgtcgcggactgccatgcgtagcccctctgctgactacagtggaggaagcaccccgagggataagcgcccgtgtgtggggacactttcccaagtggctaaacggcagcttattacgcataggtccagggaagtttgagttcgggaaggataaatataaccattggtttgacggaatggccctgctccaccaattccgtatggctaaggggaccgttacctatcggagtaaattcctgcagagcgatacctacaaagcaaactctgccaaaaatcgtatcgtgattagcgaatttgggacgctggccctgcctgatccttgtaagaacgtattcgaacgattcatgtcaagattcgaactgccaggcaaggccgctgccatgactgacaacacgaatgtgaactatgtcaggtacaagggggactactatctttgcactgaaacaaactttatgaataaagtcgatattgagactttggaaaaaactgagaaggtcgactggtccaaattcattgccgtcaacggggcaacagcacatcctcattatgatctagatggtaccgcatataacatgggaaactccttcggcccttatggttttagctataaagtgataagagtgccgccagagaaagttgacctcggagagacaatccacggagtacaggttatctgtagcatcgcctcaaccgaaaaagggaagcccagctattaccatagcttcgggatgacccggaattacatcatattcattgaacagccacttaaaatgaacctctggaagatcgccactagtaaaatcaggggcaaagcattctctgatggaattagctgggagccacaatgtaacacgcgtttccacgtggtggaaaaacgtactggccagcttctgcccggtcgctattatagtaagccattcgtcacgttccaccaaatcaacgcatttgaggaccaaggatgcgtcatcatcgacctctgctgccaagacaacggacgcaccctggaggtctaccaacttcagaacctaaggaaggctggggaaggcctcgaccaggttcacaattcagccgctaaaagctttccacgacgctttgtcctccccttgaatgtatccttgaacgctcctgagggcgacaacttgtcccccctgtcatatacttccgcaagtgccgttaagcaggccgacggcaccatttggtgctcccacgagaatctgcatcaagaagatctggaaaaggagggagggattgagttcccacaaatatattacgacaggttttccgggaagaagtaccacttcttttacggctgcggtttcagacacttggttggagattccctcatcaaggtcgatgtggtcaacaaaactctgaaagtgtggagagaggacggcttttatccaagcgagccagtgttcgtccctgctcccggtaccaatgaggaggacggcggtgtgatcttgtcagtagtgattacaccaaaccaaaatgagagtaactttatcctggttctggatgctaagaattttgaagaacttggaagagccgaggtcccagtacagatgccatatggattccacggtacatttatccccatctag

SEQ ID NO: 215962 - DNA, 1638 bp, synthetic construct
  misc_feature 1..1638: note = Description of Artificial Sequence: Synthetic coding sequence
  source 1..1638: mol_type = other DNA
atgggtaacacaccacagaagaaggcagtctttggccagtgtcgtgggctgccttgtgtggctcctttgttaactaccgttgaggaggcccctagaggaatatctgccagagtttggggtcattttcctaagtggctcaatggctctctgttgcgcatcgggccaggcaaatttgaatttggaaaagacaagtataaccattggttcgacggcatggccttgctgcatcagttccggatggcaaaaggcaccgtaacttaccggtccaagttcctccaaagcgacacttataaggctaattctgccaagaatcggatagtcatctcagaatttggcacattggccctgcccgacccttgcaaaaacgtcttcgaacggtttatgtcccgttttgaactgcctggcaaggccgctgcgatgaccgataatactaacgtgaattatgtgcgatacaagggagattactatctgtgtactgagacaaacttcatgaataaggtagacatagagacattggagaagaccgagaaggtcgattggtctaagttcatagcagtgaatggcgctaccgcccacccccactacgatctggatgggactgcttacaacatggggaatagtttcggaccctacgggttctcctacaaggtaatcagggtgccacccgagaaggtggacttgggagaaacaatccatggggttcaggtcatatgctctatcgcgtcaacggagaagggtaagccctcttattaccactcatttggcatgaccaggaattacatcatttttatcgaacaacccttgaagatgaacctatggaagatcgccacgagcaagatcagggggaaggcgtttagcgacgggatcagctgggaaccccagtgcaacactcgattccatgtggtcgaaaaaaggactggtcagttgttaccagggaggtactatagtaagccattcgtgacctttcatcagatcaatgctttcgaggaccagggatgtgtcatcatcgacttgtgttgccaagataatggtaggaccctggaagtgtatcaattgcagaacctgcgaaaggccggtgaaggtctggaccaggtccacaattcagcggcaaaatcattccccaggcgatttgtgctcccccttaacgtgtcgctgaatgcacctgagggtgataatctgagccctctctcttacaccagcgcctccgcagtgaaacaagctgacggaacgatttggtgttcccatgagaatctgcaccaggaagatctggagaaagaaggcggtatcgagttccctcaaatttactacgacagattttcagggaaaaagtatcattttttctacgggtgcggatttcgccatttagtcggggattctctgataaaagttgatgttgtgaacaaaacactgaaggtgtggcgagaggacggcttctatccctcagaacctgtgttcgtacccgcaccaggaaccaatgaagaagacggcggtgttatcttgtccgttgtcattaccccaaatcagaacgagtcaaattttatcctagttttggacgctaagaattttgaggaactgggcagggcagaggtgcccgttcagatgccatatggattccacggcacgtttatcccaatttag

SEQ ID NO: 215963 - DNA, 1638 bp, synthetic construct
  misc_feature 1..1638: note = Description of Artificial Sequence: Synthetic coding sequence
  source 1..1638: mol_type = other DNA
atgggtaataccccccagaaaaaggccgtttttggtcaatgccgagggctgccctgcgtggcgcctttgcttaccactgtggaggaggcaccgagagggattagcgccagagtgtggggacacttccccaaatggttgaacgggagcctattaaggatcggccctgggaaatttgagtttggaaaagacaaatacaatcactggttcgacgggatggctcttctgcaccaatttaggatggccaaggggactgtcacttatcggtcaaagtttctgcagtcagatacttataaggccaactcagcaaagaaccgtattgtgatcagcgaattcgggaccctggcactgcctgacccgtgcaaaaatgtgtttgaacggtttatgagcagattcgaactaccaggaaaggcagctgccatgaccgacaacaccaacgttaattacgtgcggtacaagggagactactatctttgcaccgaaacaaattttatgaataaagtggacatcgagaccctggaaaagacggagaaggtggactggtctaagttcattgccgtcaatggtgcaactgctcacccacactatgatttagacggtaccgcctacaacatgggcaatagttttggaccttacgggttttcttacaaagttatcagggtcccccctgagaaggtggatctgggtgagacaatacacggggtgcaggtgatctgctccatagctagcacagaaaagggtaagccctcctactatcattcctttggtatgacaagaaactacattattttcatcgagcaaccacttaagatgaacctgtggaagatcgcaacctctaaaatccggggaaaagccttttctgacggcattagctgggagcctcagtgcaacactagattccacgttgtggaaaagcgaaccggccagctactgcccggtaggtactacagtaaaccctttgtgacgtttcatcaaattaacgccttcgaagaccaaggctgcgttatcatagatctctgctgtcaggacaacgggagaactcttgaagtgtaccaactccagaacttgcgcaaggccggtgagggattagatcaggtgcacaactccgcggctaaaagtttccccaggcgcttcgtactccctctcaacgtaagcctcaatgctccggaaggagataacctgtcaccgctaagctacacaagcgcttcggcagtgaagcaagctgatgggacaatatggtgtagtcacgagaacctccaccaggaggatctggaaaaagaagggggaatcgagttcccccagatttattacgatcgcttttctggaaagaaatatcacttcttttatggctgcggcttccgacatctggtgggggactctttaatcaaggtagatgtcgtgaataaaacgctgaaagtttggcgggaggacggattctacccatccgagcctgtgttcgtgcccgcacctggcaccaacgaagaagacggcggtgtgatcttgagtgtggtgatcacccctaaccagaatgagtcaaacttcattctcgttctggatgcaaagaactttgaagagctcggaagggccgaagtgcccgtccagatgccatacggctttcacggaacgtttatcccgatctag

SEQ ID NO: 215964 - DNA, 1620 bp, synthetic construct
  misc_feature 1..1620: note = Description of Artificial Sequence: Synthetic coding sequence
  source 1..1620: mol_type = other DNA
atggggaatacaccacaaaaaaaagcagtatttggacagtgcagaggcctcccatgtgtggcacccttactcactaccgtcgaagaggcaccccgtggaatttcagccagagtttggggtcacttcccgaagtggctcaacggctcgctgctccggatcggccctggaaagtttgaattcggcaaagataagtacaaccactggttcgatgggatggctctgctacatcaattcaggatggcaaagggcaccgtcacatatagaagcaagtttctccaaagcgatacatataaagcaaatagtgctaaaaatcgaatcgtcatctcagaattcggcacccttgcgttgccagatccctgcaagaatgtgttcgagagatttatgagcaggtttgaactcccaggaaaagctgccgcaatgactgacaacacaaatgttaactatgttagatacaagggcgattattatctgtgcacagaaacaaacttcatgaacaaggtggatatcgaaacgttggaaaagacggagaaagttgactggtcgaaattcatcgccgtaaacggcgcaacagcacacccccactacgatctggatgggaccgcttacaacatggggaatagcttcggaccctacggatttagttacaaggttatacgggtgcccccagagaaagttgacttgggagaaacaatacacggcgtgcaggttatatgcagcatagcctccaccgagaaaggaaaaccctcttattatcatagctttgggatgaccaggaattacattatatttatcgagcaacccctgaagatgaatctgtggaagattgcgaccagcaaaatacgagggaaagctttcagcgatggtatttcttgggagccgcaatgcaatacgagattccacgtagttgaaaaaaggaccgggcagcttctgcccggacggtactattctaaaccgtttgtgacctttcatcagattaatgccttcgaagatcagggatgtgtaatcattgacttgtgttgccaggacaatgggcgtacattagaagtatatcagctgcagaaccttaggaaggcaggcgaaggcctagatcaggtacataactccgcagcgaagagcttcccccgaaggtttgtgcttccacttaatgtttcccttaacgcgcctgaaggagacaaccttagcccacttagctatacatcggcatctgcggtcaagcaagccgacgggacgatctggtgtagtcacgaaaatttgcaccaagaagatttggagaaggagggcggtatcgaatttccccaaatctattatgacaggttctctgggaaaaagtaccattttttctacggctgtggcttcaggcacctggtgggggacagtttgatcaaggtggatgtggtttggcgggaagacggattctacccttcggagcctgtcttcgtgccagctccgggtactaatgaagaggatgggggtgtgatcctttctgttgttattacacccaatcagaacgagagtaattttattttggtgctggacgctaagaacttcgaagagcttggcagggctgaagtgcccgttcagatgccgtacggctttcatggaaccttcatccccatctag

SEQ ID NO: 215965 - DNA, 1638 bp, synthetic construct
  misc_feature 1..1638: note = Description of Artificial Sequence: Synthetic coding sequence
  source 1..1638: mol_type = other DNA
atgggaaatacccctcaaaaaaaggctgtgttcgggcagtgccggggactcccatgcgtggccccacttttgacgaccgtcgaggaagctcctagggggattagtgcaagggtctggggtcacttcccaaaatggcttaatggatcccttctcaggattgggcctggcaagtttgagttcggcaaggacaaatataatcactggttcgacggcatggcgctgcttcatcaatttaggatggccaagggaaccgtcacatatcgttccaagtttctgcagtctgatacttataaggccaacagtgcaaagaacagaattgtcatcagcgagtttgggacactcgctttgcctgacccttgcaagaatgtcttcgagcgtttcatgagcaggtttgaattgcccggtaaggccgctgcaatgactgacaataccaacgtgaactatgtgcggtataagggagactattatctctgtacggaaacgaattttatgaataaagtggacatcgaaactctggagaaaaccgaaaaggttgattggtctaagtttatagccgtcaatggcgctactgcccacccccattatgacttggatggaacggcctacaacatgggaaactcattcggcccatacggtttttcatacaaggtcattagagtcccacccgagaaggtggacttgggcgagactatccatggcgtacaggttatatgcagcatagcttctactgagaagggcaaaccgtcctactaccatagctttggcatgaccagaaactacattatctttatcgaacagcctcttaaaatgaacttgtggaagattgcaacctcaaagattcgaggcaaggcctttagcgatggaatttcatgggagcctcagtgtaatacccgatttcacgtggtggaaaagcgaacaggccaactcctgcccggacggtactatagcaagccctttgtcactttccaccagatcaacgcctttgaagatcagggctgcgtcattatagacttatgctgccaagataacgggcgtacacttgaggtctatcagctgcagaaccttagaaaagctggcgagggtctggatcaggtccacaacagtgctgcaaaatcttttcccaggcgtttcgtgctcccgctgaacgtatccctcaatgcccctgaaggagataacctctctcccctaagctatacctccgcgtccgccgtgaagcaagctgatggcaccatatggtgcagccatgaaaatttgcaccaggaggacctggagaaagagggaggtatcgaatttccccaaatctattatgataggttctccggcaagaaataccactttttttacggctgtggatttcggcatttagtgggagacagtctcatcaaggtggacgtcgtcaacaagaccctgaaggtgtggagggaagacggattctacccttccgaacccgtgtttgtaccggcacctggtacaaatgaggaagacgggggagtaatactgtctgtggtcataacccctaaccaaaatgagtccaatttcatcttggtcctggatgctaagaatttcgaagaactaggacgcgctgaagtaccggtgcagatgccgtatggctttcacggtacatttattcccatatag

SEQ ID NO: 215966 - DNA, 1221 bp, synthetic construct
  misc_feature 1..1221: note = Description of Artificial Sequence: Synthetic coding sequence
  source 1..1221: mol_type = other DNA
atgccgccagtcgggggaaagaaagctaaaaaaggaatactggaacggcttaacgctggggaaattgtgattggggacggaggcttcgtgtttgccctggagaagagaggatacgtcaaggccggaccatggactcccgaagctgccgttgagcacccggaagcggtgaggcaactgcatcgtgagttcctccgcgctggttccaatgttatgcaaaccttcaccttctacgctagcgaggataaattggagaacagaggtaactacgtcctcgagaagattagcggacaggaagttaatgaggcagcctgtgatatcgcccgacaggtcgctgacgagggagacgccctggttgccggtggtgtcagtcagactccttcgtacttatcttgtaaatccgaaacagaggtaaagaaagtttttctgcagcagttggaggtttttatgaaaaagaacgtagactttctgatagcagagtatttcgaacacgttgaggaggctgtttgggcggttgagacgctgattgcctcaggcaagcccgtcgcagcaacgatgtgtatcggtcccgaaggagatctgcatggcgtaccccctggtgagtgcgccgtgagacttgtaaaggccggagccagcatcatcggggtaaattgccactttgacccaacgatttccctgaaaacggttaagcttatgaaagagggactcgaagctgcacgcctgaaagcgcatctaatgtcccaacctctggcctatcacacccctgactgcaataagcaaggatttatcgatctccccgagtttccttttgggctggaaccgagagtggcgacaaggtgggatattcagaaatatgctcgggaagcatataacctcggcgtccggtatattggagggtgctgtggctttgagccataccacatcagagcgatagcagaggagctagcccctgaaaggggatttctgcctcccgctagtgaaaagcacgggtcctggggctccgggctggacatgcacaccaagccatgggtgagagctagagcgcgaaaagagtattgggaaaacctgcggattgcttcaggcagaccctataacccatccatgtcaaaacctgacggttggggtgtcacaaaaggaaccgccgaactgatgcagcaaaaagaggcgacaaccgagcaacagctgaaagagctgttcgaaaagcaaaagttcaaatctcagtag

SEQ ID NO: 215967 - DNA, 612 bp, synthetic construct
  misc_feature 1..612: note = Description of Artificial Sequence: Synthetic coding sequence
  source 1..612: mol_type = other DNA
atgccaccggtcggcggtaaaaaagcaaaaaagggtatcctcgagagactcaatgctggggagatagttataggagacggtggcttcgtttttgcactcgaaaaacgtggatacgtgaaagccggaccctggaccccagaagcggcagtggagcaccccgaggccggagcatctatcatcggcgttaactgccatttcgaccccacaatctcacttaaaaccgtcaagctcatgaaggaggggctagaagccgctagactcaaggcccacctaatgtcacagccccttgcttaccacacccctgattgcaacaagcaggggttcattgacctgcccgaattcccttttgggctagaacctgagttaccgccagacgggatttttaaaaatactccagagcgccctaccacttggggatctgggaccctagcgggtgccgtagatctctcgccaaccacctcgggtcagctgcagcggagctggccccagaagggcgctttttgtcatcagctgcagaagaatatggcggcaggtgaagtggtctggacttgtacacctaaccccggattggagcaaggtcctggcaggaacacaggccgaattttcggatag

SEQ ID NO: 215968 - DNA, 1092 bp, synthetic construct
  misc_feature 1..1092: note = Description of Artificial Sequence: Synthetic coding sequence
  source 1..1092: mol_type = other DNA
atggcaccagcaggaaggccgggagccaaaaagggcatccttgaaagactagaaagtggtgaagtggtgatcggagacgggagctttctaatcaccttggaaaaacgaggctatgttaaggctggactgtggacaccagaggcagttattgaacaccccgacgctgtgcgccaactgcacatggaattcctgagggcgggaagtaacgtaatgcagactttcaccttttcagcatcagaagacaacatggagtctaagtgggaagatgtgaacgccgctgcatgcgacctggcccgtgaggtcgccggaaagggagacgcattagtggctggcggaatatgccaaacaagcatttacaaatatcagaaggatgaagctaggattaagaaactgttccgccagcagttggaggtctttgcttggaagaatgttgatttcttgatcgccgagtactttgagcatgtggaagaggcggtgtgggccgtcgaagtgctgaaggagtctgatcgacctgtggccgtcacaatgtgcattggaccagagggcgatatgcacgatatcacccctggcgagtgtgccgtacggctggtgaaggccggtgctagtatagtcggggtgaactgcagattcggcccagacacatcgctgaagaccatggagctcatgaaagagggtttagagtgggctggtctgaaggcccatctcatggtgcagcctctgggcttccacgccccagattgcggaaaggaaggatttgtcgatctgccagagtatccgttcgggctggagagtcgagtggccaccagatgggatatccagaagtacgcacgggaagcctacaacctcggggtgcgctatataggcggttgttgcggatttgaaccttaccacatcagggccattgcagaggagctcgcacctgagcgcggatttctgccaccagcctccgaaaaacatgggagctggggctccggcctggacatgcataccaaaccttggatccgtgcacgcgcaagaagggagtactgggagaacctcctgcctgccagtggaaggcccttttgtccatccctgagtaaacctgacttctag

SEQ ID NO: 215969 - DNA, 900 bp, synthetic construct
  misc_feature 1..900: note = Description of Artificial Sequence: Synthetic coding sequence
  source 1..900: mol_type = other DNA
atggcccctgctgggagacctggagccaagaagggcatcctagaaaggttagaatcaggcgaggttgtcatcggcgacggtagcttcctcattacactggaaaagcggggttatgtaaaagctggactgtggaccccagaagccgtgattgagcacccagatgcagtgcgtcagctacacatggaatttctccgcgctgggagtaatgtgatgcaaaccttcactttttcagcttcagaggacaatatggaaagtaaatacttcgagcatgttgaggaggcagtgtgggccgtggaagtccttaaagaaagcgaccggcctgtggctgtaactatgtgcatcggtcccgagggcgatatgcacgacatcacccctggggagtgtgctgtgcgactggtgaaagcgggagccagcattgtcggggtcaactgccggttcggtcccgacacctcactcaagacgatggagctgatgaaggagggtctggagtgggccggtttaaaagctcacctgatggtgcagccactgggcttccacgctccagactgtggaaaagagggcttcgtagatctgcctgaatatcctttcggcctggagtccagagtcgcaactcgctgggacatacagaagtacgcccgtgaggcatataacctgggggtgcgctacattggtgggtgttgcgggtttgagccatatcacatcagggcaatagccgaagagctcgccccagaacgcggatttctaccacccgcatcggaaaagcacggttcctggggctccgggcttgacatgcacacaaagccatggatacgggctcgagcccgtcgggagtattgggaaaacctgctgcccgcaagtggtagacccttttgcccatctctctcgaagcctgacttttag

SEQ ID NO: 215970 - DNA, 639 bp, synthetic construct
  misc_feature 1..639: note = Description of Artificial Sequence: Synthetic coding sequence
  source 1..639: mol_type = other DNA
atgattatagggggaatagatcactccctctacaccggcagcctgtggtatactcccatccgtcgcgaatggtattacgaagtaataatcgtccgcgtggagataaacggccaagatctgaagatggactgcaaagagtataattacgataaaagcattgtggatagtggcactacgaacctgcgcctgcccaaaaaggtcttcgaagcagccgtgaagagcattaaagctgcctcttcaactgagaaattccccgatggcttctggcttggagaacagctggtgtgttggcaggctggcactactccttggaatattttccccgtgatctccctatatctgatgggcgaagtgactaaccagagctttaggataacgatcctcccccagcagtatctgcgctggaaaatgtggccgcgaccgaaaacaacggtcacctgccaccttaccgttatccacgggcattgctatggatcgtgttaccatggtggattgctgcttagcctgatagggccagagaatgaacttgcactactctcggcgctcgcaatgtgcacaatgagctccggtaggcaacgatggaaggcttgtcatcttggacacggcaggctgtggctgcagcactccaccgatcgttag

SEQ ID NO: 215971 - DNA, 1506 bp, synthetic construct
  misc_feature 1..1506: note = Description of Artificial Sequence: Synthetic coding sequence
  source 1..1506: mol_type = other DNA
atggcacaggccctgccttggctacttttatggatgggggcaggagtcctgccagcccatgggacgcagcatggaatccgcctgcctctgcgctcaggacttgggggtgctcccctcgggttgagattaccccgtgagactgatgaagaacccgaagaacccggtagacgagggtctttcgtggaaatggtcgacaacctccgaggtaagtctggccaagggtactatgtagagatgaccgtgggcagccctccacagactctcaacattctggttgacaccggcagttcaaatttcgctgtcggggcagctccacaccccttcctccacaggtattaccaaagacagctctcaagtacctatagggatctgcgcaaaggggtgtatgttccttacacccagggcaagtgggagggagagctgggcactgatctcgtgagcattcctcatggccctaatgttaccgtgcgtgctaacattgctgctattaccgagagcgacaagttttttataaacggctcaaattgggaagggatcctgggcttggcctatgcggagatcgcacggcctgacgactcgcttgaacccttttttgattctctggtgaaacagactcatgtgcctaatctgttctcgttgcagctctgtggcgcaggattcccattaaaccaaagtgaggtgctcgcttcagtggggggtagcatgatcattggcggaattgaccactctctgtacaccggctccttatggtacacccccataaggcgggaatggtattatgaggtgataatcgtgcgcgtcgaaattaacgggcaggacctcaaaatggactgcaaggagtacaactatgacaaaagcattgtcgattcaggtacaactaacctgaggttgcccaagaaagtctttgaggccgctgtgaaaagcatcaaagccgcttcgtccactgaaaagttcccagacggcttctggcttggagagcaactcgtttgttggcaggcgggtactactccatggaacatattccccgtgatctccctgtatttgatgggggaggtgactaaccaatcttttagaattaccatattgccacagcagtacttaaggccagtggaggatgtcgccacatcgcaggacgattgctacaagttcgcaattagtcagtcatctaccggcactgtgatgggcgctgtgatcatggaaggattttatgtcgtgttcgaccgggcaagaaagaggatcggctttgcagtcagtgcatgccacgtccatgacgagtttcggacagccgcagtagaagggccttttgtgacactagacatggaggattgtgggtataacatcccccagaccgacgagagtaccctgatgacgatagcttacgtgatggccgcaatttgcgctttgttcatgctgcctctgtgtctgatggtttgtcagtggtgttgccttcgctgcctgcgtcaacagcacgacgatttcgcagacgacatcagcctcttaaaatag

SEQ ID NO: 215972 - DNA, 1299 bp, synthetic construct
  misc_feature 1..1299: note = Description of Artificial Sequence: Synthetic coding sequence
  source 1..1299: mol_type = other DNA
atggcccaagcactgccgtggctgcttctgtggatgggcgctggagttctgcccgctcacggtacacagcacggcataagactacccctgagaagcgggctcgggggtgcacctctcgggttgcgcctgcccagagaaacggacgaagaacccgaagagcccggacggaggggctcgtttgtggagatggtcgataacctccgcggtaagtcaggacaggggtactatgtggagatgaccgtgggtagcccacctcaaacacttaatatccttgtggacactggctcaagtaattttgctgtgggcgctgcccctcatccattcctgcacaggtactaccagcgacaactctccagcacatatcgcgaccttcggaaaggggtatatgtgccctacactcagggaaaatgggagggtgagctcggaacagatctgctgtgcggggcagggttccccttaaaccagtccgaggttttagccagcgtgggcggtagtatgattataggcggaatcgaccactccctgtacactgggtcactttggtatactcctattcgcagggaatggtactacgaggtcatcatagtaagagtagagataaacggacaggacctgaaaatggattgtaaagaatacaactacgataagtcgattgttgattctggaactactaacctgagactccctaaaaaggtcttcgaggctgccgtcaagtctatcaaggctgctagttccacagagaaattccctgacggcttctggcttggggagcagctggtctgctggcaggctggcacaacgccttggaatatctttcctgttatctcactgtatctgatgggcgaggttacgaatcagagcttccgcattaccatccttcctcagcagtatttacgtcccgtggaagatgtcgccacctctcaggatgactgctataaattcgcaatatcccagtcctccacagggactgtgatgggggctgttataatggaaggcttctatgtggtttttgaccgcgctaggaaaagaatcggcttcgctgtgagcgcatgtcatgtgcacgacgagtttcgcacagccgcagtggaagggccattcgttaccttggatatggaggattgcgggtacaatatcccccaaaccgacgaaagcacactgatgactatcgcatatgttatggccgcaatttgcgctctctttatgcttcccctgtgtctgatggtctgtcagtggtgttgcctgcgatgccttaggcagcaacacgatgattttgcagatgatatctcacttctgaaatag

SEQ ID NO: 215973 - DNA, 1374 bp, synthetic construct
  misc_feature 1..1374: note = Description of Artificial Sequence: Synthetic coding sequence
  source 1..1374: mol_type = other DNA
atggcccaggcattgccatggttgctcctgtggatgggagccggtgtcctgccagcacatgggacgcaacacggtatcagactgcccctgcggtcaggcttgggtggcgcacccctggggctgcgcctccctcgcgagacagacgaggaacctgaggaaccaggccgaagagggagttttgtggaaatggtggacaatctgcgagggaaaagcgggcaaggatattatgtcgaaatgactgtcggatcgcccccacagactttgaacattctggtcgataccggttcatcaaactttgctgtgggagctgcccctcatcctttcctgcatcgctactaccagaggcaactcagcagcacttatagggatctgagaaagggcgtgtacgtgccctacacccagggaaaatgggagggcgagctgggcacagacctacccgacgattctctggaaccattctttgattccctcgtgaaacaaacacacgtcccaaatttgttctccctgcagctctgcggagccggatttccacttaatcagtccgaggtcctggcaagtgtcgggggtagcatgatcataggcggaatcgaccactcactgtacacaggctctctctggtatacacccatccgcagggaatggtattacgaagttatcatcgttcgcgtggagataaatggacaagacttaaaaatggattgtaaggagtataattacgacaaatccatcgtcgatagtggaacaaccaatctgaggctgccaaagaaggtctttgaagcggctgtgaagtctattaaagcagcatcttctaccgaaaaattccccgatggcttttggctaggggagcaactagtctgctggcaagctggcactacaccgtggaacatctttccggttatatcactttatttgatgggcgaagtgacaaatcagagctttcggatcaccatcctcccccagcagtacctgaggcccgtggaggacgttgccaccagtcaggacgattgttataaatttgctattagtcagtctagtaccggtaccgtaatgggggctgtgatcatggagggcttctatgtggtgtttgatcgagcgagaaaaaggatcggcttcgccgtttccgcctgtcatgtacacgacgagtttcgcacagccgctgtcgagggtccttttgtgaccctcgatatggaagactgcggatataacatcccccagacggacgaatctacacttatgactatcgcatacgtgatggctgccatctgcgcgctgttcatgttaccattatgcctcatggtgtgccaatggtgctgtctccgttgcttacggcagcagcacgatgactttgccgatgacatctcattgctgaaatag

SEQ ID NO: 215974 - DNA, 1431 bp, synthetic construct
  misc_feature 1..1431: note = Description of Artificial Sequence: Synthetic coding sequence
  source 1..1431: mol_type = other DNA
atggctcaggctcttccttggctgctgctgtggatgggtgcaggagttctgcccgcacacggcacacagcacggaatccggctaccactccggagtggcttgggtggagcacccctgggcctccgactgcccagagagacggacgaggagcctgaggagcctggacgtcggggtagcttcgttgagatggttgataatttgagaggcaagagtgggcagggttactatgttgagatgaccgtcggttcacccccacagacgctgaatattttggttgacaccggctcatccaatttcgccgtcggtgccgcaccgcacccatttctccacaggtactatcaaaggcagctctctagcacctatagagacctgcgaaagggcgtctatgtaccatatacacagggaaagtgggagggggagcttggaacagatttggtctcaatcccccacggacccaatgttacggtccgggctaatatagccgcaattacggagagcgataaattctttatcaacggatctaactgggagggcatactggggctggcctacgccgaaattgctagactgtgtggtgccggatttcctctcaatcagtcggaagtgctcgcaagcgtggggggaagtatgattataggagggattgaccatagcctctatacgggatctctatggtatacccccatccggagggaatggtactacgaagtgattatcgtgcgggtcgagatcaatggccaggatctcaaaatggactgcaaggaatacaattacgacaaatcgatcgtggactcaggcaccactaatttgcgactccctaaaaaagtgtttgaggctgctgtcaagtcaataaaagccgcttccagcaccgaaaagtttcccgacggcttctggttgggtgagcagctcgtgtgctggcaggccggaactactccctggaatatttttcccgtgatcagcctctacctcatgggggaagtaacaaatcagtctttccggattaccattctcccccagcaatatcttcgaccagtggaagacgtagctacttcacaggatgattgctataagttcgctattagtcagtcctccacaggaacagtgatgggagccgtaataatggagggcttttatgtggtcttcgatagggcaaggaagcgaatcggattcgcagtgtccgcctgccatgtacatgatgagtttcggacggccgcagtggaggggccatttgttactctcgacatggaggattgcgggtataacatcccacagacagacgagagcacattgatgactatcgcctacgtgatggctgctatttgcgccctcttcatgcttcccctatgccttatggtctgtcagtggtgctgtctgcggtgtctgagacagcagcacgacgatttcgccgatgacatctccctgctaaaatag

SEQ ID NO: 215975 - DNA, 1131 bp, synthetic construct
  misc_feature 1..1131: note = Description of Artificial Sequence: Synthetic coding sequence
  source 1..1131: mol_type = other DNA
atggttccatttatctatctgcaagctcactttactctgtgttccggttggtcttcaacatatagggacttacgtaaaggcgtctacgtgccttacacccagggaaagtgggaaggagagctgggaactgatctggtgagtatcccacatggacccaacgtgacagtccgagctaatatagctgctatcacagaatcagataaattctttatcaatggttcaaactgggagggaattttaggcctcgcttacgcagagattgccagactgtgcggcgctggcttccctcttaaccaaagcgaagtcttagctagtgtaggagggtctatgatcattggaggtattgaccacagcttatacacaggttcactctggtacacacctattagaagagagtggtattatgaagttatcatcgtcagggtggaaattaacggtcaggacctcaaaatggattgcaaggagtacaactatgataaaagtatcgtggactcgggaaccaccaatttgaggctcccaaagaaagttttcgaggcggcagtgaaaagcatcaaggccgcatctagtaccgagaagtttcctgatggcttttggctcggtgagcagttggtgtgttggcaagctggcacgaccccctggaatatcttccccgtgatttccctgtacctcatgggcgaagtcacaaaccagtctttccgaatcactattctgccccaacagtatctgcggcctgtggaagacgttgcaaccagccaagatgattgttataagtttgccatcagccaatcatctacaggtacggtaatgggagctgtgatcatggaaggcttctatgtcgtgttcgatagggcgcgtaagcgcatcggctttgctgtatctgcgtgtcatgtgcacgacgagttcagaaccgcagccgtcgagggtcccttcgtcacgttggatatggaagactgcggatacaatataccccagacggatgagtccacattgatgacgatcgcttatgtgatggctgcgatctgcgccttattcatgttgcctctctgtctgatggtgtgccagtggtgttgccttcgttgtctgagacagcagcacgacgacttcgccgacgacatttccttactgaaatag

SEQ ID NO: 215976 - DNA, 1191 bp, synthetic construct
  misc_feature 1..1191: note = Description of Artificial Sequence: Synthetic coding sequence
  source 1..1191: mol_type = other DNA
atgggggcattagccagggccctcctcctacctctgctcgctcagtggttgctgagggcagcccctgagctggccccagcaccgttcacacttcccttgagagttgctgcagccaccaatcgggtggtggcaccaacacctgggcctggaactccagctgaacgccatgctgacggactcgcacttgccctggagccagcgctggcttccccagctggtgcagcaaatttcctagctatggtagataatttgcagggagactctggaaggggatactacttggaaatgcttatcggtacaccgcctcagaagcttcagatcctagttgatacagggtcttcgaactttgcagtggccggaaccccacattcgtatatcgacacttacttcgacaccgagagatcgagcacttacagatcaaaaggttttgacgtgacagtcaagtacactcaggggtcctggaccggctttgtgggcgaggatctcgtaacgatccccaagggatttaacacaagtttcttggtgaacattgccaccattttcgagtccgaaaacttctttctccctgggataaaatggaacgggatattgggacttgcgtatgctactctggcaaaaccatcctcctcgctggaaacgttcttcgactcgttggtcacccaggccaatatccccaacgtctttagtatgcagatgtgcggcgcaggtttgcccgtcgccggaagcggaacaaacggcggttctctcgtgctgggaggtatcgagccgagcctctataaaggggacatctggtacacaccgatcaaagaggagtggtactatcaaatagagatactgaagctggagataggtggacagagccttaacctcgactgtcgggagtacaacgccgacaaggctattgtagatagtgggactacacttcttcgcctgcctcagaaagtgttcgatgcagttgttgaggctgtggcgagggcttccctaatccccgagttcagcgacggcttttggaccggatcccagctcgcatgttggactaactcagagaccccatggtcatattttcctaagatttctatctacctgcgagacgagaatagcagccgaagttttagaatcactatcctgccccagaagcttcaggtgctgcaatgtttaaaattccctggactaagccagcagcggatgtag

SEQ ID NO: 215977 - DNA, 1557 bp, synthetic construct
  misc_feature 1..1557: note = Description of Artificial Sequence: Synthetic coding sequence
  source 1..1557: mol_type = other DNA
atgggggcactggccagggctctcctgctccctctccttgctcagtggttactaagggcggctcccgaactggcgccagccccattcaccctgccccttagggtggctgccgcaacaaacagggtagtggctccgacaccgggaccaggtactccagctgaacgtcatgctgacggccttgctttggctctggaaccagcactggcttcccccgctggggcagccaacttcctcgccatggtagacaacctccagggcgactcaggtcgaggctattatctcgagatgctgattggaacacccccacagaaactgcagatcctggtggacactggctccagcaacttcgctgttgcgggtactccgcactcctatatagacacatatttcgataccgagcgatccagcacataccgcagcaaaggctttgacgtgacagtgaaatatacccagggcagctggaccggctttgttggcgaggatctggtgacaattccaaaaggtttcaacacatcattccttgtcaatatcgccactatcttcgaatccgaaaacttcttccttccgggaatcaagtggaatggcatcctcgggctggcctatgccactttagcgaagccgtctagctccttggagacattttttgactccctggtcacacaggccaacatccccaatgtgttctccatgcagatgtgcggtgcaggcctgcccgttgccggatccgggacaaatggcggaagccttgtattgggtgggatcgagcctagcctctacaaaggagacatttggtatacccctataaaggaggagtggtattaccaaattgagattttaaagctggagatcggcggacagagcctaaacctagattgccgagagtacaacgcggacaaggccattgttgactcaggcacaaccctactgcggctgcctcagaaagtcttcgacgctgttgtggaggctgtagcacgcgcttcacttatacctgagttctcagatggattttggactggtagccagctggcttgctggactaactccgagaccccctggtcctatttccccaaaatcagcatctatcttagagacgaaaactcatcccggtcgttccgcattaccatcttacctcagctttatatacaaccgatgatgggggcaggtctcaattatgagtgctatagatttggtatcagcccgagcaccaacgcgttagttattggggcaaccgtgatggaggggttctacgtgatttttgaccgcgctcagaagcgcgtgggttttgctgcctcaccgtgtgcagaaatagctggggcagcggtgagcgagatcagcggcccattttccacagaggacgtcgcctcaaattgcgttcccgctcaatctttgagcgaaccgatcttatggattgtgtcgtacgcattgatgagtgtgtgtggggctatactgctggttctaatcgttttgttgctgctccccttccggtgccagagacgccctcgcgatcctgaggttgtgaatgacgaatcctccctagtgcgccaccggtggaaatag

SEQ ID NO: 215978 - DNA, 1407 bp, synthetic construct
  misc_feature 1..1407: note = Description of Artificial Sequence: Synthetic coding sequence
  source 1..1407: mol_type = other DNA
atgggcgctctggccagagccctgctgctccctctccttgctcagtggttgctcagagccgctccggagctggcacctgctccgtttacattgccactccgggttgccgcagctacaaaccgagtcgtagctccaactccagggcctggaactccagcagagcggcatgctgatggcctggcactggcgcttgaaccggcactggcctccccggctggcgctgccaacttcctcgccatggtcgacaatctgcagggggatagtgggcgtggatactacctggaaatgctaatcggcacacccccacagaaactacagattctcgtagataccggatcctctaatttcgccgtagcaggaacaccacattcctacattgacacctatttcgatacagagaggtcctcaacgtaccggtccaagggatttgatgtgaccgttaaatacacacagggaagctggactggcttcgtgggtgaggacttggtgacaatcccaaaagggttcaatacctcatttttggtcaatatcgctacaattttcgagagcgaaaacttcttcttacccggaatcaaatggaacggcattctgggcctggcctacgcaacacttgccaaaccctctagcagcctcgaaaccttctttgatagcctcgtcacccaagctaacatccccaacgttttttccatgcaaatgtgcggagctggattaccagttgctggcagcggcactaatggcggttctttggtgctcggaggcattgagccttccctatataagggagacatttggtatacgcctatcaaggaagagtggtactaccagatcgaaatattgaaactggaaatcgggggacaatctctcaatctcgattgcagggagtacaatgccgataaggcaattgtggactctggaacaacccttctgagattaccgcagaaagtgttcgatgccgtggtggaggccgtggcaagggcttccctgctgtatatacagcctatgatgggcgctggcctgaattacgaatgctacagattcgggatctctccctcgactaacgctctcgttattggagctactgtgatggaggggttctatgtgatctttgaccgcgctcagaaacgagtggggttcgcagccagcccgtgtgccgagatcgctggtgccgctgtttccgagattagtgggcctttctcgacagaagacgtcgctagcaactgcgtgccagcccaaagtctgagtgagcctattctttggattgtgtcttatgctctcatgtccgtgtgtggagccatcctcctggtgctgatcgtgcttttactccttccgtttcggtgccagcgcagaccccgagatccagaggtcgtgaacgatgaaagttccctcgtgcgccacagatggaagtag

SEQ ID NO: 215979 - DNA, 1272 bp, synthetic construct
  misc_feature 1..1272: note = Description of Artificial Sequence: Synthetic coding sequence
  source 1..1272: mol_type = other DNA
atgcttatcggaacacctccacagaagctgcagatcttggtggataccggctctagtaattttgcggtggcaggcacaccccattcttatatagacacatattttgacacagagcgatcttcaacctataggagcaagggcttcgacgtgactgtgaagtacactcagggatcttggaccggttttgtcggagaagatcttgtgacaatccctaaagggttcaatacttcttttttggtcaatatcgccacgattttcgaatcagagaactttttcttgccagggataaagtggaatgggattctggggctggcttacgcaacactggccaagcctagttcatcgctggaaaccttcttcgattcactagtgacacaggccaacattcccaacgtctttagtatgcaaatgtgcggggctggtctgccagttgccggaagcggaacaaacggcggaagtctggtgctgggcggtattgaacccagtctgtataagggggatatttggtacactcccataaaagaagagtggtactaccagatcgagatcctgaaacttgagataggcggacagtctttaaacctggattgtagggaatacaacgcagataaggccatcgtagactctggaaccacccttctgcgattaccccagaaggtattcgacgcagttgtcgaggccgttgctagggcatcgctgattcccgaattttctgacggattttggaccgggtctcagctggcttgctggaccaacagtgagacaccgtggtcatattttcctaagatttctatatacctaagagacgagaatagctctcgctccttccgaattacaattctgccacaactgtacatccaaccaatgatgggcgctggtctgaactatgaatgttacagattcgggatttctccttccaccaatgccctggtcattggcgctacagttatggagggcttttacgtgatttttgaccgagcccaaaaaagggtcggatttgctgccagcccctgcgcagagatagctggagccgcagtaagtgaaatctccggccctttttctaccgaggacgtggcttcaaattgtgtgccggcacagagtctcagtgaacctattctatggatcgtgagttacgctcttatgtcagtgtgtggggctatcctgctcgtgttgatagttttgctgctgctccccttcagatgccagcgcagaccaagagatccagaagtcgtgaacgacgagagctccctggtacggcatagatggaagtag

SEQ ID NO: 215980 - DNA, 576 bp, synthetic construct
  misc_feature 1..576: note = Description of Artificial Sequence: Synthetic coding sequence
  source 1..576: mol_type = other DNA
atgccgcgttcactttggctgggctgtagcagtctcgcagacagcatgcccagccttcggtgcttatacaatcccggtaccggcgcacttaccgcctttcagaatagctccgaacgggaagactgcaacaatggagaaccacctcgaaaaatcataccagaaaaaaactctcttcgccagacatacaacagctgcgccaggctgtgtcttaatcaggagaccgtttgtctggcctccacagccatgaaaactgagaactgcgtggccaagaccaagctcgccaacggaacttcttcaatgatcgtgcccaaacagcggaaactcagtgcctcttatgagaaagaaaaagagctatgtgtgaagtattttgagcagtggtccgagtcagaccaggtggagttcgttgaacatctgatttcccaaatgtgtcattatcagcacggacacattaactcgtacctcaagcctatgcttcagagggactttatcacagcgctacctgcgagagggttggaccacatcgctgagaatatactgtcttacctcgacgccaaatctctctgtgctgccgagtag

SEQ ID NO: 215981 - DNA, 1818 bp, synthetic construct
  misc_feature 1..1818: note = Description of Artificial Sequence: Synthetic coding sequence
  source 1..1818: mol_type = other DNA
atggatcccgcagaggcagtactccaagagaaagctctgaaattcatgtgctcaatgcctcggtctctctggctcgggtgctcatccctcgctgactcgatgcccagtttgcgctgtctgtacaaccctgggactggcgcattgacagcattccagaactcctccgaaagagaggattgcaacaacggagaaccaccaaggaagatcatcccagagaagaatagccttcgtcagacctacaactcctgcgcaaggctctgccttaaccaggagaccgtctgcttggctagtacggctatgaaaactgaaaactgtgtggctaagaccaagcttgccaacggcacctcatctatgattgtccccaaacagaggaaactgagtgcttcttatgagaaggagaaagaactctgtgtaaagtattttgagcaatggagtgagagcgatcaagtcgaattcgtggagcacctgatctctcagatgtgtcactaccagcacggacacattaattcgtatctgaagcccatgttgcagagggattttatcactgctctcccagctcggggactggaccatatagctgagaatattctgagctacctggacgccaaatcgctttgcgctgcggagctggtgtgtaaagagtggtaccgggtcacaagcgacggcatgctctggaaaaaactgatcgaacgcatggttagaaccgactccctctggagaggcctggccgagcgtcgcggatggggtcagtacctcttcaagaacaagccgcctgatggcaacgcccctccaaacagtttttatagggccctgtacccaaagataatccaggacattgagaccatagagagcaactggcgatgcggtaggcacagcttgcagcggatccactgcagaagcgaaacaagtaagggggtttactgcctgcaatacgatgatcagaagattgttagtggtcttagagataacaccattaaaatatgggacaagaataccttggaatgtaaaaggatcctcaccggtcatacgggttctgtgttgtgcctccagtacgatgagagggtcattattaccggcagtagcgacagcacggtgagggtgtgggacgtgaacaccggggagatgctgaatacattaattcatcattgtgaggccgtcctgcacctcaggttcaacaacggtatgatggtgacctgtagtaaggaccgcagcattgcagtctgggatatggcttctcccacggacatcaccctgagacgcgtactggtcgggcacagagcagccgtgaatgtcgttgatttcgatgacaagtatattgtgtccgcttctggggaccggacaatcaaagtgtggaacacctccacgtgtgaattcgtgaggacactaaacgggcataagagaggcatagcatgcctgcagtatcgggatcggctcgttgtatccggctcaagcgacaataccatcaggctctgggatatcgagtgcggcgcttgtctccgggtgctggagggccacgaagagctcgtgaggtgcatccggtttgataacaaacgcatcgtgagcggcgcatatgacgggaaaattaaagtgtgggatctcgttgcggctctcgatcccagggctcccgcagggacactttgcctgcgtacactggtggaacactctggaagggtctttcggctccagttcgacgaattccagattgtgtcctctagtcacgacgatactatcttgatctgggacttcctcaatgatccggctgctcaagctgagcccccaagaagtccttctcggacgtacacttatattagcagatag

SEQ ID NO: 215982 - DNA, 1695 bp, synthetic construct
  misc_feature 1..1695: note = Description of Artificial Sequence: Synthetic coding sequence
  source 1..1695: mol_type = other DNA
atgtgctccatgcctcggtctctgtggttgggatgtagttctctcgcggattctatgccatccctacgatgcctctacaaccccggtaccggggctcttaccgcctttcagacatacaactcatgtgcccgtctgtgcttaaaccaggagacagtatgtctggcatccacagccatgaaaacggagaattgtgtcgcaaagacaaagttggccaacggcaccagcagcatgattgtgccgaagcagagaaaactcagtgcatcttatgagaaggaaaaggagctttgcgtgaagtattttgagcagtggtctgaaagcgatcaagtcgaattcgttgaacatctgatatcccagatgtgccattaccaacacggccatatcaatagctacttgaagccaatgctgcaaagagatttcatcactgctctgccggctagagggctcgaccacatcgccgaaaatattctgtcctacctggacgcaaagtctctgtgcgccgcagaactggtctgtaaggagtggtaccgcgtgaccagcgacggtatgctgtggaaaaaactcatagagaggatggtccggacagatagcctctggcgagggctcgccgagcggaggggttgggggcagtatttgtttaagaataagcccccagatggcaacgcccctcccaatagtttctatagagctctgtacccaaagataatacaggacatagaaaccattgaaagcaactggaggtgcggcaggcactcactgcaacggatacactgtaggagtgaaacatctaaaggggtgtattgcctacaatacgacgaccagaaaatagtgtccggactgcgagataacactatcaaaatttgggacaaaaacaccctggagtgcaaacgtatcctgacagggcacaccggaagcgtgctgtgtcttcagtatgatgagcgggtgattattaccggaagctcggattccaccgtccgggtctgggatgtgaacaccggcgagatgttaaataccttaatccatcactgcgaagctgtgcttcatctccgcttcaacaacggcatgatggtgacgtgcagtaaggacagatccatcgcggtttgggatatggctagcccgactgatattacactccgtagggtgcttgtgggacatagggcagctgttaatgtagttgattttgatgataaatatatcgtttctgcttcaggcgatcgcacgatcaaagtttggaatacttctacatgcgagttcgtgaggaccctgaatggccataaacggggaattgcctgtcttcagtatagggaccggctggttgttagcgggagctccgataatacaatacgcctctgggacattgagtgcggggcatgccttagggtgcttgaaggccacgaggaactggtgcgctgcattagattcgataacaagaggatcgtgagcggtgcttacgacggaaagataaaagtgtgggatctggtggctgccctggatccacgagccccagccggaaccctgtgtctgagaactttggtggaacatagcggccgagtgttccgattgcaatttgacgaattccaaatagtgtcttcgagccacgatgatactatactcatctgggacttcttaaacgaccctgctgcccaggccgaaccccctaggagcccgagccgaacctatacttacatttcgagatag

SEQ ID NO: 215983 - DNA, 1710 bp, synthetic construct
  misc_feature 1..1710: note = Description of Artificial Sequence: Synthetic coding sequence
  source 1..1710: mol_type = other DNA
atggaccccgctgaggcagtcctccaggaaaaagccctcaaatttatgaactcttcagagcgggaggattgtaataacggagagcctccgaggaaaattatccctgagaagaactccctcagacagacttacaattcttgcgccagactgtgccttaaccaggaaactgtgtgcctcgcgagtacagccatgaaaacagagaactgcgtggccaagaccaaactagccaatggaacgagctctatgattgttccaaagcaacggaaactttcagcctcctatgagaaggagaaggagctgtgcgtcaagtacttcgaacaatggtccgaatcagatcaggttgagtttgttgagcatttgatcagccagatgtgccactatcagcacggccatatcaacagctacctaaaacccatgttacaaagagacttcatcaccgcactcccggcaagggggctcgaccatattgcagaaaacatactctcttacctagacgccaaatctctctgtgcagccgaactcgtgtgcaaggaatggtacagggtgacatcagacggaatgctgtggaagaagctcattgagaggatggtccggacagattccctgtggagaggcctcgccgagagacggggatgggggcagtatctgttcaagaacaagcccccagacgggaatgcgcctcccaatagcttttacagagcactctaccccaagatcattcaggacatcgagaccatcgagtccaactggcgatgtggaaggcattcccttcagaggatccactgcagaagcgaaacttccaagggtgtgtattgtctccaatacgacgaccagaagattgtgagcggcctgcgggacaatactattaaaatttgggataagaatacactagagtgcaagaggatattgacaggtcacacagggtccgtgctgtgcctccagtatgacgagcgagtgatcattacaggcagctccgattcaacagtcagagtgtgggacgttaacaccggcgagatgttaaacaccctcatccatcactgtgaggctgtcctccacctgcgctttaataacggaatgatggtcacatgtagcaaggacagatccatagcagtgtgggacatggccagcccgactgatattacgctccggagagtgctggtgggacatcgggcagctgttaatgttgtggatttcgatgacaagtatattgtgtccgcaagtggtgacaggactattaaagtgtggaacacgtccacatgtgaattcgtcaggaccctgaatggccacaaaagaggcattgcgtgcttgcagtaccgggatcggctggtagtgtctggttcttctgacaatactatccgactatgggacatcgagtgcggggcttgcctgcgcgtgttggaaggacatgaggagctggttaggtgtatcaggttcgataataaaagaatcgtttcaggagcttatgatggcaaaattaaagtatgggacctggtggccgctctggatcccagagcacccgcaggcacactgtgtctgagaacactggtggagcactctgggagagtttttaggctgcaattcgacgagtttcagattgtgtcttctagccatgacgatacaatcctgatttgggactttctgaatgatccggcagctcaggcggaacctcctcgttcgccgtcacggacctacacctacatatccagatag

SEQ ID NO: 215984 - DNA, 126 bp, synthetic construct
  misc_feature 1..126: note = Description of Artificial Sequence: Synthetic coding sequence
  source 1..126: mol_type = other DNA
atggatcccgctgaagccgttctgcaggaaaaggccttgaagtttatgacctataatagttgtgcccgactttgcctgaaccaagagactgtttgtcttgcttcaaccgcaatgaagacagagtag

SEQ ID NO: 215985 - DNA, 327 bp, synthetic construct
  misc_feature 1..327: note = Description of Artificial Sequence: Synthetic coding sequence
  source 1..327: mol_type = other DNA
atggtcacattactgccaatagagggtcaggaaatccatttctttgagatactagagtcagaatgcgtgctatacaccggctggatcgagcgggcatccggctcctctatttaccctgaggctaaagcccgactccccctggaggcactcctggggagcaacaaagagcctatgcttcctaaagagaccgttttgtcactcaagaggtataatttgggctccagcgccatgaagcgcaatgtgcccggacatgtcctgcagcgcccttcctacctcacaaggatacaagtcacactcttatgcaatagctctgctgaggcgctgtag

SEQ ID NO: 215986 - DNA, 1521 bp, synthetic construct
  misc_feature 1..1521: note = Description of Artificial Sequence: Synthetic coding sequence
  source 1..1521: mol_type = other DNA
atggaacagctggacgtttttatctccatcaaacccaagcccaagcagcccagtaagtccgtgattgtaaagagtgtggagcgcaatgctctaaacatgtacgaggcgcgaaaatgcttgcttgggctcgaaagcagcggcgtgacaatcgccacatctccctcccccgcatcgtgccctgccggtctagcttgcccctcattggacatactggcttctgctggcctgggcttaactggactcggtctgttagggccaaccaccttgtcactgaatacctcaactacccccaacagcctgcttaacgcgttgaactcttctgtgtcgccactgcagtcaccttcttccggcaccccctctcctaccctttgggctccccctttggccaacacctcttcagccactggattcagcgccatcccccatttaatgatcccctccactgcgcaggcaacactaactaatatcctgctgagcggtgtgcctacctacggccataccgccccttcccccccaccaggcctgacacctgtggatgttcacatcaatagcatgcagaccgagggtaagaagatatcggccgctcttaacggccacgcccagtctcccgacataaagtacggggcaatatcaacgtccagcctcggggagaaggttctctccgcaaaccacggagatccctccattcagacctccgggtcagagcagaccagccctaagtcctctcctactgaagggtgtaacgacgcttttgtcgaggtcggtatgccgagaagtccatctcacagcggcaatgctggagatctgaaacagatgatgtgtccctccaaggtctcttgcgcaaagagacagacagtggaactgctccaaggtaccaaaaacagccaccttcatagcacagatcgactcctgagcgacccggagctctctgctactgagagccccctagcagacaagaaagccccaggctccgagcgggctgcagagcgcgcagccgcagcacagcaaaactcagagagggcccacctggctccaaggtccagttatgtaaacatgcaggcctttgattacgaacagaagaaactcctagcaacgaaggccatgctgaagaagcctgtggttactgaagttcgcacccccacaaatacatggagcggattgggatttagcaagtcgatgcctgctgaaactattaaagagctgcgcagggcgaatcacgtgtcgtacaagcccaccatgaccaccacgtatgagggaagttcaatgtctctctcaagaagcaacagtagggaacacctcggaggaggttccgagagtgacaattggcgggatcggaatggcataggacctggcagtcactcagagttcgctgcgtccattggttccccaaaacgtaaacagaataaatcttctgaaagatgtgttctgtgcacacttctgggcattcctcgccttgagtgcgtgtacctaggttggtccattaccgactgtgggctttcagactttaaatgcttggtgtag

SEQ ID NO: 215987 - DNA, 2925 bp, synthetic construct
  misc_feature 1..2925: note = Description of Artificial Sequence: Synthetic coding sequence
  source 1..2925: mol_type = other DNA
atggcagctcaaggggagcctggctacttagccgctcagagtgatcccggatcaaacagcgagcggtctaccgactcaccagttcctggctccgaggacgatttagtggccggtgccactctccattccccagaatggagcgaggaacggttcagagtggatcgtaagaaacttgaggctatgttgcaggcggctgccgagggtaagggccgatctggagaggatttcttccagaagattatggaggagacaaatacccagattgcatggccgtccaagcttaagatcggcgcaaagtccaagaaggatcctcacattaaggtgtcaggcaaaaaagaggacgtgaaagaagccaaagagatgattatgtcagttctggatactaagtcaaaccgggtgacacttaaaatggacgtgtcccacacagaacactcccatgtgattggaaaaggtggaaacaacatcaagaaagtcatggaagagacaggatgtcatatacatttccccgactccaacagaaataatcaagccgaaaaaagcaaccaagtgagtattgcaggtcagccagctggggtcgagtctgctagggtaaggatacgagagttactgcctctcgtactgatgttcgagctgcccatcgctggcatcttacagcccgtgccagacccaaattccccaagcattcagcacatatcccagacctacaatatatccgtgagcttcaagcagcggagcagaatgtatggcgctactgtcattgttcggggttctcagaacaacacctccgctgtcaaagagggcacagcaatgctcctggagcatctggccggatcccttgctagcgctatacctgtgtccacccagctggatatcgccgctcagcaccacctgttcatgatgggacgcaatggctccaatatcaaacatatcatgcagaggaccggtgcacaaattcatttccctgacccctccaaccctcagaagaagtctacagtttatctgcaaggcaccattgagtctgtgtgcctggcccgacaatatctgatgggctgtctgcccctggtactaatgtttgacatgaaagaggagattgaagtggatccacaatttatcgcacagttgatggagcagttagacgtcttcatctcaattaagccaaagcctaagcaaccctcgaagagtgtcattgtgaagtccgtcgaacgtaacgccctcaatatgtatgaggcaaggaagtgtctcctgggcctggagtcctccggtgtgactatcgcaacttcgccttctccagctagttgtccagccggactggcgtgccccagtctcgatatccttgcttccgctggccttggtctgacagggctgggactgctcggtcccacaacattgagtttaaatacatcaaccacacccaattcccttttaaatgctctgaacagttcagtttccccactgcaaagcccatcttccggaaccccaagcccgactctgtgggcgcctcccctagctaacacttctagcgctacggggtttagcgcaattccccatctcatgatcccgtccaccgcgcaagcgacactgactaatatactgctgagcggggttcccacgtacggtcacactgcacctagtcccccacccggacttactccagtggatgtgcacattaactcaatgcagaccgaaggcaagaagatttcggcggctctgaacggtcatgcccagtctcctgatatcaaatatggggctatcagcacatccagtctcggcgaaaaggtgctatcagcaaaccacggagacccatctattcaaacatccgggtcggagcagacctctccgaagtcctcccctacagaaggctgcaacgacgcttttgtcgaggtcggaatgcctagatccccgtcccacagcggcaatgctggggatctaaagcaaatgatgtgcccatccaaagtcagttgtgctaagagacagacagtggagctgttgcaaggcaccaagaattcacatctccattccacggaccgcctgctcagtgaccccgagttaagcgccacagagagcccactagcagataaaaaggccccaggctccgagcgcgctgcggagagagccgcagcggctcagcaaaactcggagcgcgctcatctggctccaagaagctcctacgtcaacatgcaggccttcgactacgaacagaagaagctcctggccaccaaggcaatgctgaagaagcctgtcgtcacagaagtgcgtacaccaacaaacacgtggagcgggctcggcttctctaagtctatgcccgcagaaaccattaaggaactgagacgtgccaaccacgtgagctacaagcccaccatgactacaacatacgaaggctccagcatgagcctaagtagaagcaattctcgggagcacctggggggagggtccgagagcgacaactggagagatcgtaatgggatcggtcctggaagccatagcgagttcgccgcaagtattgggtcccccaaacggaagcagaataagagcaccgaacactacctatcttcatctaattacatggattgcattagcagtttaacagggtcaaatggctgtaatctgaactccagcttcaaaggttccgacctgcccgagctgttctcaaagctcgggttagggaaatatacagatgtgttccagcagcaggaaatcgacctgcagacattcctcactctgactgatcaggacctgaaagagttgggtataacaacattcggggctagaagaaagatgctgctcgccatcagtgagctaaataaaaatcgacggaaacttttcgagtctccgaacgccagaacctccttccttgaaggcggagccagtggtagactccctcggcagtatcactccgatattgcctctgtctccgggcgatggtag

SEQ ID NO: 215988 - DNA, 2928 bp, synthetic construct
  misc_feature 1..2928: note = Description of Artificial Sequence: Synthetic coding sequence
  source 1..2928: mol_type = other DNA
atggccgcagaggaagttttacagactgtggaccactacaagaccgagatcgaaaggctcaccaaagaactgaccgagacaacgcatgagaagatccaggccgctgaatacggtttggttgtactagaagaaaagcttaccttaaaacagcagtacgacgagctggaagctgaatacgattcattaaagcaagagttggaacaactgaaagaggcttttggccagagctttagcatccaccgcaaagtcgccgaggacggcgaaacacgggaggagaccctacttcaagagagcgcaagtaaggaggcatactatttaggcaaaatattggagatgcagaacgaattgaaacagtcacgtgctgtggtgaccaatgtacaggctgagaacgaaagactgactgcagtggttcaggacttgaaggagaacaatgagatggtggagctgcaaaggatccggatgaaagatgaaatccgcgagtataagtttcgcgaagctcggctgcttcaggattatacagaactcgaggaagagaatatcactttgcagaagctggtttccacccttaagcagaaccaagtggagtatgaggggctgaaacatgagattaagcggttcgaggaagaaactgtattattaaattcccagctagaggacgctatccggttgaaggaaattgccgagcaccagctggaggaagcgctggagactctgaaaaatgagagggagcagaaaaataatttgcgcaaggagctgagtcaatacatttctctgaacgataaccatatttcaatcagcgtagacgggcttaaatttgctgaagacggctccgagccgaataacgacgataagatgaatggccacattcacggccctctagtgaaactcaacggagactacagaacgcctaccctgcgtaaaggagaaagtcttaacccagttagtgatctattctcagaactcaacatttctgagatccagaaactcaaacagcagctgatgcaggtagagagggagaaagccattttgctagccaatttgcaggaatctcagactcaactagagcatactaagggtgcactcaccgagcagcacgaaagagtgcaccggttgactgagcatgtgaatgctatgcgcggactccaaagctctaaagaactcaaagccgagcttgatggagaaaagggccgagactcaggagaagaggcacacgactatgaagtcgacatcaatgggctggagattcttgaatgcaaataccgcgtcgccgtcactgaggttatcgacctaaaagccgagatcaaagccttgaaggagaagtacaacaagtcagtagagaattacacagatgagaaggctaaatacgagtcaaagattcaaatgtatgatgaacaggtcacaagcctcgaaaagacaacgaaggagtcaggggaaaaaatggcccacatggagaaagagcttcaaaagatgacctcaatcgcgaatgaaaaccattccactctgaatacagcccaggacgagttagtgacattttctgaggagctggcccaactctatcaccacgtgtgtctgtgcaataacgagacacccaatcgcgtgatgttagattactacagacagtcccgtgtgacacgctctgggtctctgaagggtccagacgacccccgtgggcttctatctcccagactggcccgtcgaggagtgagcagccctgtcgagacccggaccagttcagaacccgtagccaaagagtccaccgaggcctctaaggaaccatctcctactaaaacgccaaccatcagtcctgttatcactgcgccacctagctcacctgtcctggataccagcgacatccgtaaagagccaatgaatatctacaatctgaacgctatcataagagatcagattaagcacctgcagaaggccgtggaccgcagtctgcaactgtcgcgacagagggcagcggcaagagagctggcaccgatgatagacaaggacaaggaagccctgatggaagaaattcttaaactcaagtccttgttaagtacaaagcgggaacagatcgccaccctgcgtgccgtgctcaaagcaaacaaacagacagccgaggtagctctggctaatttgaagaacaagtacgaaaacgaaaaggcaatggtgaccgaaactatgacgaaactccggaacgagcttaaggccctaaaagaagatgccgcaaccttctctagtcttcgggctatgtttgcaacccggtgcgacgagtatgtgacacagcttgatgagatgcagcggcagttagcggctgcagaggatgaaaagaaaactctgaatacactgttacgaatggccattcaacagaaattggccctgacccagcggctagaggacttagagtttgaccacgagcagtctaggcgaagtaagggtaagctgggcaaatccaagatcggctctccaaaggtttccggagaggcaagtgtgactgttcctactatagatacctacctgctgcatagccagggaccccaaacccctaacatccgcgtaagtagtggcacccagaggaagcggcagttctcaccgtccctgtgtgaccagagcagaccgcgaacaagtggagcttcctacttgcagaatctcctccgagtccccccagaccctacgtctaccgagtctttcctcctaaaaggccctccctctatgtccgagtttattcagggccaccggctgtccaaggaaaagcggctgactgtggcaccgcctgattgccagcaaccagccgcttctgtgccgccacaatgttcgcaactcgcgggaagacaggattgcccgacagtaagtcccgacacagcccttccagaagaacaaccacacagcagcagtcagtgtgctcctctgcactgtctctctaagccccctcacccctag

SEQ ID NO: 215989 - DNA, 2484 bp, synthetic construct
  misc_feature 1..2484: note = Description of Artificial Sequence: Synthetic coding sequence
  source 1..2484: mol_type = other DNA
atggccgcagaggaagttctgcagacggtggatcactacaagactgagatagaaaggctcacgaaggagctgactgagactacccatgaaaaaatccaggcagcagagtacgggctcgtcgttcttgaggagaaactcacactgaaacagcagtacgatgagttggaagccgagtatgacagcctcaaacaagaattagagcaattgaaggaggctttcggacaaagcttttcaattcatcgaaaagtcgcggaagacggcgagactcgtgaagagaccctcttgcaggaatctgcatctaaggaggcatattaccttggtaagattttggagatgcaaaacgagcttaagcagagccgagcggttgtcacgaacgttcaggcagaaaatgagcgactcacagccgttgtccaggacctgaaggaaaacaacgagatggttgagctccaacgcataaggatgaaggacgaaattcgggaatataagttccgggaagctagactgctacaagattacacagagctcgaggaggagaacataactcttcagaaacttgtttcaacactgaaacagaaccaggtcgaatatgagggtctcaaacacgagatcaagcgctttgaggaagaaaccgtcctcctgaactcccaattagaggatgctatcaggttgaaagagatcgctgagcatcaactggaggaggctcttgagacgctaaagaatgagcgggagcagaaaaataatttgagaaaagaactctcacagtatatttctcttaatgacaaccacattagcatctcggttgatggcttgaaattcgcagaggatggatctgaacccaacaatgatgacaagatgaacggtcatatccatggcccacttgtgaagcttaacggggactataggacacccactctgcgaaagggtgagagcctgaaccctgtgtccgatctgtttagcgaactgaatatatcagaaatccaaaagcttaagcaacaactgatgcaagtcgagagggagaaagccattctgttagcaaatctgcaggaatcccagacccagctcgagcataccaaaggagctctgaccgagcaacacgaacgagtgcacaggcttaccgagcacgtgaatgccatgcggggactgcagtcaagcaaggaactgaaggccgagctggatggagagaaggggcgtgactccggagaggaggctcatgactatgaggtcgacatcaacgggctggaaatcctcgagtgcaaatatagagtggctgtcaccgaagtgattgatttgaaggccgagatcaaggcactgaaggagaagtacaacaagtccgtcgaaaattatacagacgagaaggccaagtacgagtctaaaatacagatgtatgacgaacaggtgacctcactggaaaagacaaccaaggagtctggggagaaaatggcccacatggaaaaggaactccagaaaatgacctccatcgctaacgagaatcattctacgctcaacactgcccaggatgagctggtaacatttagcgaggagttagcccagctttatcaccacgtgtgtctgtgtaataacgaaacacccaaccgggtcatgcttgattactacagacaaagcagagtcacaaggagcggaagtctcaaggggcctgacgatccaagagggttactgtccccccgtcttgcgagaaggggagtatctagtccagtcgagacccggaccagctccgagccggtggccaaggagtcaacagaagcctcaaaagagccgtctcctacgaaaacccctacaatcagccctgtaataaccgccccacctagctccccggtgctcgacacctccgatatcagaaaggagcccatgaacatatataatctgaatgcaatcatcagagaccagatcaagcatttgcagaaagctgttgataggtcgctgcagctgagccgccagcgagctgccgcacgcgagctggcacccatgattgacaaagacaaggaggctttgatggaagaaattttaaaactcaagtctctgctttcaacgaagagggagcagattgccacccttagagctgtcctcaaagctaataaacagaccgctgaagtcgcgctggctaatcttaaaaataagtatgaaaacgagaaagccatggtcacagaaaccatgaccaagctgagaaatgagcttaaggccctgaaggaagacgcggcaaccttctctagtctgcgtgccatgtttgccaccagatgcgacgaatacgtaacacaattagacgagatgcagagacagctcgcagcggcagaagacgagaaaaagaccctgaacactcttctcagaatggctatccagcagaaactggcgttgactcagcggcttgaggatctcgaatttgaccacgaacagtctcggagaagcaaaggaaaactggggaagagcaaaatcgggtctcctaagacaatcttcactttcccactatag

SEQ ID NO: 215990 - DNA, 2508 bp, synthetic construct
  misc_feature 1..2508: note = Description of Artificial Sequence: Synthetic coding sequence
  source 1..2508: mol_type = other DNA
atggccgcagaagaggtgctccaaaccgtggatcactataagaccgagatagagaggttgaccaaggaattaacggaaaccacacatgaaaaaatccaggctgccgaatatgggctagtggtgctcgaagagaaactgacacttaagcaacagtacgatgaactggaggccgagtacgactctttaaagcaggagctcgagcagctgaaagaagcctttgggcagagtttttctatccatcggaaggttgcagaggacggcgaaacaagagaggagaccctgctacaggagtccgcatccaaagaagcatactacctcggcaagatcctggagatgcaaaacgagctgaagcagtcccgggctgtagtgactaacgtacaggcagaaaacgagcgcctgacagcagtcgtgcaggacctcaaggaaaataacgagatggtcgagctccagcgcattagaatgaaagatgaaatccgtgagtacaagttccgcgaagcgagactgctgcaggactatacagaattagaggaagagaatattacactgcagaaactggtgtcgaccttgaagcagaaccaggttgaatacgagggccttaagcatgagattaaaaggtttgaagaggagaccgtgctcctgaattctcagctggaggacgctatacgtctgaaagaaatcgctgagcatcagcttgaggaagccctggaaaccctgaagaatgagcgggagcagaaaaataacctcaggaaggaactgagtcaatacatctcgctgaatgataatcatatttctattagcgttgatggcctgaagtttgccgaggatgggtctgaacccaataacgatgacaagatgaatggacacatccacgggccactggtaaagctgaacggcgactaccggaccccaactctgaggaagggcgagagcctgaatccagtttccgacctcttcagcgagctgaacataagcgagatccagaagctgaaacagcaacttatgcaggtggagagggaaaaagcgatcctccttgcaaacttacaagaatcacaaacccagttagaacacactaagggggcactgactgagcagcacgagagggtgcacaggctgactgaacatgtcaacgccatgaggggactgcaaagtagtaaagaactcaaagcggagcttgatggagagaaaggacgggacagcggagaagaagcacacgattacgaagtcgatattaatgggcttgagatcttggagtgcaagtaccgcgtagccgtcactgaggttatcgacttaaaggccgaaattaaggcactgaaagaaaaatacaataaatctgtcgagaactatacagacgaaaaggccaaatatgaaagtaagatacagatgtatgacgagcaagtgacttctctggagaagaccactaaggaatctggggaaaagatggcccacatggagaaagaactacaaaagatgacctcaatcgccaatgagaaccactctactctaaacactgcgcaggatgaattggtgaccttctctgaggagctagctcaactgtaccatcacgtatgtctgtgtaataatgagactcctaaccgcgtcatgctcgactactaccgccagtctcgcgtcaccagatcgggaagcttaaaggggccagatgatcctcggggactcttatctccgaggctggctcggagaggtgtaagctctccggttgaaactcgcacgtcgtctgaacctgtggccaaggagagtacggaggccagcaaagaaccctcaccgactaaaacacccaccatttcccctgtgatcacagcccctcctagttcacccgttctggacacatccgacattcgaaaagagccaatgaacatctacaatctcaacgcaataatccgtgatcagatcaagcacctccaaaaggctgtcgatcgctccctccaattatctcggcagagggccgcagctcgagaattagcaccaatgatcgataaagacaaagaagcccttatggaagaaatcctgaaactgaagtccctgctgtcaaccaagcgcgagcagatcgccacattacgtgccgtactcaaggccaataagcagacggccgaggtggccctggccaacctgaagaacaagtacgagaatgaaaaggccatggtgactgagaccatgactaagctcaggaacgaattaaaggccctgaaagaggatgcggcaaccttcagttccctgcgagccatgttcgcaacaaggtgcgatgaatatgtgacccagttggacgagatgcagcggcagctcgccgcagcagaagatgaaaaaaagaccttgaacactctgctgcggatggctatacagcagaaattagctctgactcaaaggctcgaagacttggaattcgaccacgaacaatcgcggagatctaagggcaaacttggaaagtcaaagattggttccccgaaaatcgttagctctttgctccctccctacaggcattccgcacacaattag

SEQ ID NO: 215991 - DNA, 2568 bp, synthetic construct
  misc_feature 1..2568: note = Description of Artificial Sequence: Synthetic coding sequence
  source 1..2568: mol_type = other DNA
atgtctgccccaagtgaagaggaggaatatgccaggcttgtgatggaagcacagccagagtggctgcgcgcagaagtcaaacggctgagccacgaactggccgagacaacaagggagaaaatacaagccgctgaatatggactcgccgtcttagaagaaaagcaccaactgaagttgcagttcgaggaactggaggtcgattacgaagccatccgtagcgagatggaacagctgaaagaggctttcggccaggcccatacaaaccacaagaaggtagccgctgacggagagtctcgagaagaatccttgattcaggagagtgcttctaaagaacagtactacgtaaggaaagtgctggagctccaaacagagctcaagcaattaagaaacgttctcacaaacacccagagcgaaaacgaacggctcgctagcgtggcccaagagctcaaagaaatcaaccagaatgtggaaatccagcgcggaaggttaagggacgacataaaagaatacaaatttcgggaggcaagacttctgcaagattattccgaattggaagaagaaaatatctcacttcaaaagcaggtgagcgtcctacgacagaaccaggtagagttcgaggggctcaaacacgaaatcaagcggctcgaagaagagaccgaataccttaatagccagctggaagacgcaattaggttaaaagagatcagtgaacgtcagttagaagaagccctggaaacactcaagacggagagggaacagaagaattccttgaggaaggagcttagtcactacatgtctattaacgactcattttatacatcccacctacatgtgagcttggacggcctgaaattctctgatgatgcagccgaaccaaataacgacgcagaggcgcttgtaaacgggttcgagcatggcggtctggcaaagttgccacttgacaacaagacgtctactcccaaaaaagaaggcttagcaccgccttccccttcgcttgtttctgacttgctgagtgagctcaatatcagcgagattcagaaacttaagcagcagcttatgcagatggagagagaaaaggcaggcttgttggcaaccctacaggatacgcaaaagcagttggagcatactcgcggtagtctgtctgagcagcaggagaaggtgacaagactcactgaaaacttaagcgcccttagaaggctacaggcttccaaagagagacagacagcactggacaacgagaaagaccgggatagccacgaggatggggactattacgaagtggatattaacggccctgagatcctggcctgtaagtaccacgtcgccgtggcggaagcaggagagttgagagaacagttgaaggcgctgaggagtacacacgaggcacgcgaagcacagcacgcggaggagaagggtagatacgaagctgagggtcaggcgctgacagaaaaagtctcactcttagaaaaggccagccgccaagatcgcgagttgctcgcgagactcgaaaaggagcttaagaaggtgtctgacgtggccggagagactcaggggagtttatcggtggcccaggacgaactagttacgttttccgaggaattggccaacctgtaccatcacgtgtgtatgtgcaataacgaaactcccaaccgagttatgcttgattactatcgggagggacaaggaggtgcagggcgtacctctcctgggggaaggacaagcccagaagcacgtgggaggcggtcccctatcctactgcctaaagggctgttggctcctgaagctggcagggccgatgggggaacgggggacagctccccctcaccgggatcctccctccccagccctctgagcgatccacggcgagagcctatgaacatttataatctcatcgccattatacgtgatcagataaaacacctgcaggcggctgttgatagaacaaccgagctctcaaggcaacgcattgccagccaggaacttggacctgctgtggataaagacaaggaggccctgatggaagaaatactgaagctgaaatccttactcagcaccaaaagagagcaaataactacgctcaggactgtactgaaagcaaacaaacaaactgctgaggtagcactcgccaacctgaagtcaaagtatgagaacgagaaagctatggtgacagaaactatgatgaaactgcgaaatgagctgaaagccctcaaagaggacgctgccaccttctcttccctcagagcgatgttcgcaactcgctgtgatgagtatattacacagctggacgagatgcaacggcagttagctgccgcagaggacgaaaaaaagaccctgaactctctcctccgcatggctatccagcagaagttagctttgacccagcggttggagttattggagctggatcacgagcagactcgccgaggtcgggcaaaagccgcacccaagactaagcctgctactccctcggtttcccacacctgcgcgtgtgcctccgatcgcgctgaaggcaccgggctggccaaccaagtcttctgttccgagaagcactcaatctactgtgactag

SEQ ID NO: 215992 - DNA, 2475 bp, synthetic construct
  misc_feature 1..2475: note = Description of Artificial Sequence: Synthetic coding sequence
  source 1..2475: mol_type = other DNA
atgtccgctccaagtgaggaggaggagtatgccagactggtgatggaggcgcagccggagtggctgcgggcagaggtgaaacgtctttcccacgagcttgctgaaactacccgagagaagatccaggccgcagagtacggattagcagtcttagaggaaaagcatcagcttaagctccagtttgaggagctggaggttgattatgaggctatccggagcgaaatggagcaacttaaggaggccttcggccaggcacacactaaccacaaaaaggtggccgcagacggcgagtcccgtgaagagtctctgatccaagaaagcgcgtctaaggagcaatactatgtgcggaaagttctagagttacaaactgaactcaagcagctgcggaatgtgctaaccaacacccagagtgagaacgagagactggccagtgttgcacaggaactcaaggagattaaccagaatgtggagatacagaggggacgtcttagggacgacattaaagagtacaaatttcgggaggcgagactgttgcaggactacagtgaactcgaggaagagaacatctcactgcagaagcaggtgagcgtgctccggcagaatcaagtggaattcgaagggctgaaacacgaaatcaaacggctggaggaggagaccgagtacctgaactcgcagcttgaagatgctattcgacttaaggaaatttcagagcgacagctagaggaggcactggagaccctcaaaacggagcgtgagcagaagaattcactgaggaaggaactgagccattacatgtcaatcaatgactccttctataccagccatctccacgtgtcgcttgacggcctcaaattttctgatgatgcagccgagccaaataacgacgctgaggcactcgtcaacggcttcgagcacgggggtctggccaaactgccgctggataataaaacatcaacacctaagaaggaggggctggcacccccatcaccctccctggtgtctgaccttctctcagaactcaatatttcagagattcagaagctgaagcaacaactcatgcagatggaaagagaaaaggccggattactagccacactgcaggatacacagaagcaactcgagcacacccgaggctccctgtcagaacagcaggaaaaggtgacgcgactgacagagaatctgagcgcgctaaggcgactgcaggccagtaaggaaaggcagactgccctggacaatgagaaggatcgagatagtcacgaggacggcgactattacgaagtggacatcaacgggccagaaatccttgcatgtaagtatcacgtggccgtggcagaagccggtgagctaagggagcagctcaaggctcttagatcaactcatgaagcccgtgaggcccagcacgccgaggagaaaggcagatatgaagccgagggtcaggcccttactgagaaagtgagtctgctagaaaaagccagtaggcaggaccgcgagttgctcgctcggctggagaaagagttgaaaaaggtcagtgacgttgccggtgaaactcaggggtccctatccgttgcccaagatgagcttgtcacgttcagcgaggagttggcgaatctctatcaccacgtgtgcatgtgcaataacgagacgcctaaccgcgtaatgctagattactaccgggagggccaggggggagcgggtcggacgagccccggtgggcgtacttcccccgaagcccgagggaggcgtagccccatcctgttgcctaaggggcttttagcccctgaagctgggcgagccgacggcggtacaggggactcttcgccctcccctggtagttcccttcccagtccactgtctgacccacggagggagccaatgaacatttacaatttaatcgcaattatacgagatcagatcaaacatctgcaggccgctgttgaccgcaccactgagttgagccgccagcgcatcgcatctcaggaactgggcccagctgtggataaggataaggaagccctcatggaggagattcttaagctcaaatctctgctatccacaaagagagagcagataacaacactccgtacagtgctgaaggccaacaaacagacagccgaagtggctctggccaatctgaaaagtaagtacgagaatgaaaaggcaatggtaactgaaaccatgatgaagctgcgcaacgagttgaaagcattgaaggaggatgctgcaacattttcaagcctccgggcaatgttcgccacacgctgcgacgaatacataacacagctggacgagatgcagcgccagcttgccgctgccgaagatgaaaagaaaaccctgaactccttgttgagaatggccattcagcagaagctagcactcacccaacggctagagttgctcgaactcgatcacgaacaaactaggcggggtagagctaaggccgcaccaaaaactaaacctgccacacccagcctgtag

SEQ ID NO: 215993 - DNA, 1107 bp, synthetic construct
  misc_feature 1..1107: note = Description of Artificial Sequence: Synthetic coding sequence
  source 1..1107: mol_type = other DNA
atgtggccgctctggcggttagtgagtctgctggccctgtcccaggcgctgccatttgagcagcggggattctgggatttcactttggatgacggccctttcatgatgaacgacgaggaagcctccggggctgacacatccggtgtcttggacccagactccgtaacccccacctactccgcgatgtgccccttcgggtgccattgccatctgcgagttgtccagtgcagtgatctgggcctcaaatctgtcccaaaggaaataagccccgatacaaccctgctggatctgcagaacaacgatatctcagaactgagaaaggatgatttcaaaggcttgcagcacctgtacgcccttgtcctcgtcaataacaagatttcaaagatccatgagaaggcgttctcgcctctgcgaaagcttcagaagctgtatatcagtaaaaaccacttagtggaaatccctcctaacctgccctccagcctcgtcgaactaaggatccacgacaatcgaatccgcaaggtcccaaaaggcgtcttctcgggattaagaaacatgaattgcatagaaatgggcggaaaccctctggagaactcaggatttgagccaggagcttttgatggactcaagctcaactacctgaggatctccgaagccaaactgaccggcattccaaaagacctgccagaaaccctgaatgagctccatctcgatcacaataaaatccaagccatcgaacttgaggatctgttgcggtattcgaagctctaccggctgggtcttgggcacaatcagatacgaatgatcgagaacggctcgctgtctttcctgccaaccctgagggaattgcatctggataataacaaactggcacgcgttccgtccggactgcctgacctgaaactcttacaggtcgtgtacctgcacagtaacaacatcacgaaggttggagtcaacgacttttgtccgatgggatttggcgttaaaagagcatactataacgggattagcttgtttaacaatcccgtgccttattgggaggtgcagccggctactttcaggtgcgtgaccgatagactcgcgattcagttcggtaattataagaagtag

SEQ ID NO: 215994 - DNA, 924 bp, synthetic construct
  misc_feature 1..924: note = Description of Artificial Sequence: Synthetic coding sequence
  source 1..924: mol_type = other DNA
atgtgtccttttggatgccattgccacctaagggtggtgcagtgtagcgacctgggcctgaagtctgtgcccaaggagattagcccagacacaactctgttggacctccagaataacgatatcagcgagcttaggaaggacgattttaagggactgcagcatctctacgcactggtgctcgtcaataataaaattagcaagatccacgagaaagccttcagtcctctccgtaaactgcagaagctgtatatcagtaagaaccacttggtcgagattcccccaaatctgccatcttcgctcgtggagctgagaatacatgacaacaggatacggaaggtaccaaagggtgtgttttcgggtctaaggaacatgaattgtattgagatgggcggtaaccccttggaaaactccggtttcgaaccaggggcttttgacggacttaaacttaactacctacgtattagcgaggcgaaactgaccgggataccaaaggaccttccagagacactgaacgaactgcacctggaccataacaaaatccaagctattgagctggaggacctgttaaggtactcgaagctctacaggcttgggttgggtcacaaccagatacggatgatcgagaatggttccctgagtttcctgcctactttgagagagctgcacctggataacaataaactggctagggttcctagcgggctgccggacctgaaactgctgcaagtggtctacctgcactccaataatataacaaaagttggagtgaatgatttctgccctatggggtttggcgttaagagagcctattacaatggtatttccctgtttaacaatcccgtcccatattgggaagtgcaaccagcaaccttcaggtgtgtaaccgaccgattagcaattcagttcggcaattataagaagtag

SEQ ID NO: 215995 - DNA, 924 bp, synthetic construct
  misc_feature 1..924: note = Description of Artificial Sequence: Synthetic coding sequence
  source 1..924: mol_type = other DNA
atgtgccctttcgggtgccattgtcacctgcgggtcgtgcagtgcagtgatctcggcttaaaatctgtgcctaaagagatcagccctgatacaacccttctggatttgcaaaataatgacatttcagagcttaggaaggacgactttaaaggcctgcagcacctgtacgcgctcgttctggtgaacaacaagataagcaagattcatgagaaggccttctcaccattgaggaaattacagaagctgtacatctctaagaatcatttggtggaaatacccccaaacctgccctcctccctggtagagttacgcattcatgataaccggatcaggaaagtccctaaaggagtattctccggtctccggaatatgaactgcatagagatgggaggaaatccactggaaaactccggtttcgaacccggagcgtttgatggcctgaaacttaattatttacgaatctctgaagctaagttgactggcattccaaaagatctcccagaaaccctgaacgagctgcacctggatcataacaagatccaggcaatcgagctggaagatctgctccgatactctaaactgtacaggctgggcctggggcataaccaaattcggatgatcgaaaacggttcccttagtttcctcccgactttgcgagaactgcacttagacaataacaaattggcccgagtgccatccggccttccagatctcaagctactacaggtggtttacctgcactctaacaatatcacaaaagttggcgtgaatgacttctgtcctatgggctttggggttaaacgagcctactataatggcatctctttgtttaacaatccagtgccttactgggaggtccaaccagcaaccttccggtgcgtcaccgaccgactagctatccagttcggcaactataaaaagtag

SEQ ID NO: 215996 - DNA, 717 bp, synthetic construct
  misc_feature 1..717: note = Description of Artificial Sequence: Synthetic coding sequence
  source 1..717: mol_type = other DNA
atgtggccactgtggcgcctcgtcagcctgctggcactgtctcaagccttaccattcgaacaaaggggtttctgggattttactctggacgacggccctttcatgatgaatgacgaggaagcttctggggctgatacttccggggtcctggatcccgacagtgtgactcctacatatagcgcgatgtgccccttcggttgtcactgtcacctgcgcgtggtccagtgttccgatcttgggctgaagagtgtgcccaaggaaattagtcctgatacaacacttcttgacctccagaacaacgacatttccgaactgaggaaggatgacttcaaggggctgcaacacctgtacgttcgtagctgggaagagcccgctggcttgcagcagagagcaggcgttagggcactcgtcctcgttaacaacaaaatttcaaagattcacgaaaaagccttctcacctttgcgtaagctgcagaaactctacatttccaagaaccatcttgtggagatcccaccaaatctccccagctctctggtcgagcttagaatccacgataacaggatacggaaagtcccaaagggcgtgtttagcggcttgagaaatatgaactgcattgagatgggtggtaaccccctggagaactcaggatttgagccaggagcttttgatggcctgaaattaaattacctgaggatctccgaagccaaactgacatag

SEQ ID NO: 215997 - DNA, 1257 bp, synthetic construct
  misc_feature 1..1257: note = Description of Artificial Sequence: Synthetic coding sequence
  source 1..1257: mol_type = other DNA
atgatacagctcacagctaccccggtcagcgctttagttgacgagccagtgcacataagagctacaggcctcataccttttcagatggttagcttccaagcttcactcgaagatgaaaatggtgatatgttttacagtcaggcacattatagggccaacgaattcggcgaggtggacctgaaccatgctagcagtctcggcggtgattacatgggagtgcaccctatgggcctgttctggagtctgaagcccgagaaactgctgactcgccttctgaagcgagacgtaatgaacaggcctttccaagtgcaggtgaagctatatgatttagaattaattgtgaacaataaggtggcgtcggccccaaaagcctctctcacactggagaggtggtatgtcgcaccgggtgtgacccgcatcaaggtgcgtgagggccgacttaggggagctctgttcctgccacccggagagggcctgttccctggagtgattgatctgtttgggggactcggaggcctgctcgaattcagggcgtcactgcttgcctcgcgagggttcgcatccctggcgctagcctaccacaattacgaagacctgccaaggaagcccgaggttaccgacctggagtacttcgaagaggccgcaaacttcctcctgcgccatcctaaagtattcggatcaggagtgggggtggtgtcagtgtgccagggcgtccagatcgggctatcaatggccatctatctgaaacaggtaacggcaacggtcctgataaatggcaccaattttcctttcgggattccccaggtgtatcacggccaaattcatcagccattacctcattctgctcagctgatatcgaccaacgccctcggcctgctcgaactgtatagaacctttgagacaacacaggttggagcgagtcaatatctgttccctatcgaagaggcacagggacaattcctgtttatcgtgggggaaggggataaaaccatcaacagtaaagcacacgctgaacaagccattggccaactcaagcgacacggcaaaaacaactggaccctgctgagttatccaggcgctggtcatctcatagagcccccttattctccattgtgttgcgctagcacaactcacgatctgcggttgcattggggcggtgaggtgataccacatgccgcagcccaagaacatgcttggaaagagattcagcggttcctgcgtaagcacctcatccccgacgtcacctcccaattatag

SEQ ID NO: 215998 - DNA, 1257 bp, synthetic construct
  misc_feature 1..1257: note = Description of Artificial Sequence: Synthetic coding sequence
  source 1..1257: mol_type = other DNA
atgattcagctcacagctacaccagttagcgctttggtcgatgagcccgtacacatccgcgcaactggcttgattccgtttcagatggtgtctttccaggcatcactggaggatgagaatggcgatatgttctactcccaggctcactacagagccaacgagtttggcgaagtggacctcaaccatgcctcatcccttgggggagattacatgggcgtccaccctatggggctgttttggtccttaaagccggagaagctgctgacgcgactgttgaagcgtgacgtgatgaacaggccctttcaggtgcaggttaaattatacgacctggagctgattgtcaacaataaagtggccagcgctccaaaagcaagtcttacgctcgagcgctggtacgtagctcccggtgtgacaagaatcaaggtgagggaaggaaggctacgcggtgctctgtttttgccaccaggtgagggattgtttcctggggtcatagacttattcggcggactgggaggacttctagaattcagggcatcccttctggcgagtcgaggcttcgcctccctcgcactggcctatcacaattacgaggacctaccccgaaagcctgaggtaactgacctggaatacttcgaggaagccgcaaacttcctgttgaggcacccgaaggtttttggctcgggagttggtgtagtctccgtgtgtcagggggtgcagattggcctgtcgatggctatttacctgaagcaagtgactgccaccgtcctgatcaacggtacaaactttccattcggcatcccacaggtttatcatggacaaattcatcagcccttgccacattccgcacagctcatctctaccaacgccctggggttactcgaactgtaccggaccttcgagaccacacaagtcggagctagtcagtatctatttcctatagaggaggcgcagggccagtttctttttatagtaggggagggggacaagaccatcaactctaaagcacatgctgaacaggcgatagggcaactgaaaaggcacggcaaaaacaactggaccctcctgtcctatcctggcgcagggcacctcatagaacctccttatagccctctctgctgcgctagtacaacccatgatcttcgactgcactggggaggtgaggtgattccgcacgccgcagcacaagagcatgcctggaaagaaatccaaaggtttctacgcaagcatctaataccggacgtgacttcccagctgtag

SEQ ID NO: 215999 - DNA, 891 bp, synthetic construct
  misc_feature 1..891: note = Description of Artificial Sequence: Synthetic coding sequence
  source 1..891: mol_type = other DNA
atgaatgccgaacctgagcgcaagtttggcgtcgtggtcgtgggagtgggccgtgcgggttccgtgcggatgcgggatctgcgcaaccctcatccctcctccgccttcctgaacttgatcggttttgtctcccgcagagaattgggcagtatcgatggggtccagcaaattagcttagaagacgcactatcttctcaagaagttgaagtggcatacatctgctcagagagtagttctcacgaggactatattcgtcagtttcttaacgctggcaagcacgtgctggtggagtatcctatgactctgtccttggcagcagctcaagaattgtgggagctcgcggagcaaaagggaaaggtgctacatgaagagcacgttgagctcctcatggaagaattcgcatttttaaagaaagaggttgtgggcaaggacctcttgaaggggtcgctcttgtttaccgcgggacctctggaagaggaaaggttcggtttccccgctttctccggcattagccggctcacatggttagtgagcctgtttggggaactgtccctggtatcagccacactggaggaacggaaagaggaccaatacatgaagatgactgtgtgtctggagaccgagaagaagtcccccctgagttggattgaagaaaaaggacccggactgaaaaggaaccgttatctctctttccattttaagagcggcagcttggagaatgtcccaaatgtcggagtcaacaaaaatattttcctgaaagatcaaaatattttcgtgcagaaactcctgggccagttcagcgagaaggagcttgccgctgagaagaaacgcattctgcattgtttgggcctagctgaagagatacagaaatattgctgttctagaaaatag

SEQ ID NO: 216000 - DNA, 891 bp, synthetic construct
  misc_feature 1..891: note = Description of Artificial Sequence: Synthetic coding sequence
  source 1..891: mol_type = other DNA
atgaatgctgagcccgagagaaagttcggggtcgttgtcgtgggcgtgggcagagccggatcagtcagaatgagggaccttcggaaccctcacccttctagcgcctttctcaaccttatcggatttgtgtctcgtagagagctgggttccatagatggagttcagcagatcagtctggaggacgcgctatccagtcaagaggtcgaggttgcttatatctgcagtgaatcttccagtcacgaggattatattcggcagttcctcaacgctggaaaacatgtcctggtggaatacccaatgacactatctctcgcggcagcacaggagctgtgggagctggcagaacagaagggaaaggtgctgcacgaggagcacgtggaattattgatggaagaattcgcgttcctgaagaaggaggtcgtaggaaaggaccttctgaagggatcccttctcttcacagccggtcctctagaagaggagcgcttcggattccccgcatttagcggtatctctaggctcacgtggctagtgtcgttgttcggcgaactttctctggtcagcgctaccttagaggagagaaaggaagaccagtatatgaaaatgaccgtttgtctggagaccgaaaagaagtctcctctgagttggattgaggagaaagggcctggattaaaacgaaacaggtatcttagctttcattttaaaagcggctcactggagaacgtgccaaacgtaggagtgaataagaatatcttcctgaaggaccaaaacatctttgtccagaagctgctcggccaattctctgagaaggagctggctgctgaaaagaagaggatcttacactgccttgggctcgctgaagaaatccaaaagtattgctgttctcgcaaatag

SEQ ID NO: 216001 - DNA, 309 bp, synthetic construct
  misc_feature 1..309: note = Description of Artificial Sequence: Synthetic coding sequence
  source 1..309: mol_type = other DNA
atgaatgcagagcctgagcgcaagttcggggtcgtggtcgtgggcgtggggcgagcaggttcagtgaggatgcgggatctgaggaaccctcatccctcttctgcctttctcaatcttatcggcttcgttagtcgcagggaactggggagtattgatggcgtccagcagatcagtctcgaggatgccctgtcttcccaagaggtcgaagtggcatacatctgcagtgagtcctcatcacacgaagactacattcgacagttcttgaacgcaggcaagcacgtgcttgttgagtacccgatgactctctag

SEQ ID NO: 216002 - DNA, 621 bp, synthetic construct
  misc_feature 1..621: note = Description of Artificial Sequence: Synthetic coding sequence
  source 1..621: mol_type = other DNA
atggcagtaaagaagatcgcgatatttggggctaccggccagaccggactaaccacactggctcaggcagtgcaagcaggttatgaggtaaccgtgctagtgagagattcatctaggcttccgtctgagggtccgagacccgcacatgttgttgtgggtgacgtcctgcaggctgctgatgtagataagacagttgctgggcaagacgcggtgatcgtcttgctgggtacaaggaacgacctgtcccccaccaccgtgatgtcagaaggagcacgcaacatcgttgctgccatgaaggcccacggcgtcgataaggtggtggcttgcacatctgccttccttttatgggatcccacaaaggtgccaccacggttgcaggctgtgactgatgatcatatacggatgcacaaggtcttgagggagagcggactgaagtacgtagccgttatgcccccacacatcggcgatcaacctttaaccggcgcatacactgtgaccctggatggtcgcggtccatccagagtcatctcgaagcacgatctgggacactttatgctccgctgccttaccacggacgagtatgacggacactctacctatccgtcccaccaataccagtag

SEQ ID NO: 216003 - DNA, 399 bp, synthetic construct
  misc_feature 1..399: note = Description of Artificial Sequence: Synthetic coding sequence
  source 1..399: mol_type = other DNA
atgggctcccttatgctcctgttcgtcgaaacaactcgtaattcctcggcatgcatattccccgttatcctcaatgaactctctagcaccgtcgagacgataacacactttcctgaggtcacagatggagagtgtgtctttcctttccattacaagaacggcacctactacgactgtataaaaagtaaggcaagacacaagtggtgcagcctgaataagacctacgagggctactggaagttttgctcagcagaagacttcgctaactgcgtgttcccattttggtaccgcaggctgatctactgggagtgtactgatgatggtgaggcttttggaaagaagtggtgtagtctcaccaaaaatttcaataaagataggatctggaaatattgcgagtag

SEQ ID NO: 216004 - DNA, 429 bp, synthetic construct
  misc_feature 1..429: note = Description of Artificial Sequence: Synthetic coding sequence
  source 1..429: mol_type = other DNA
atggctgctgccgcagagggagtgcttgcaacgagatctgatgagcccgcacgcgacgacgctgctgttgaaactgctgaggaggctaaagagcccgcagaggcggacattacggagctgtgccgagatatgttttccaaaatggcgacctatttgacaggtgagcttactgcaacaagcgaggattacaagttactagagaacatgaataaattaacttcgttaaagtatctggagatgaaggatatcgctataaacatttcaaggaacttgaaagacctcaaccagaagtacgccggacttcaaccctacctggaccagatcaacgtcatagaggagcaggtggcagccctggaacaggctgcctacaagctagacgcgtatagtaagaaactagaagccaagtataagaagttagaaaaaagatag

SEQ ID NO: 216005 - DNA, 225 bp, synthetic construct
  misc_feature 1..225: note = Description of Artificial Sequence: Synthetic coding sequence
  source 1..225: mol_type = other DNA
atgaacaaattgacttccctgaagtacttagagatgaaagacatcgctatcaatatctcaaggaatctcaaagacttaaaccagaagtatgccggactccagccgtatttggaccagatcaacgtaatcgaggagcaggttgctgctctagaacaggcagcctacaaactcgacgcatactcaaagaagctggaagccaagtataaaaaattagagaagagatag

SEQ ID NO: 216006 - DNA, 225 bp, synthetic construct
  misc_feature 1..225: note = Description of Artificial Sequence: Synthetic coding sequence
  source 1..225: mol_type = other DNA
atgaataagctgacttctctcaagtacctggagatgaaagatatcgctatcaacatcagtagaaacctaaaggacctgaatcagaagtacgccggtctgcagccctacttggaccagattaacgttatcgaagagcaggttgccgcactagaacaggccgcttacaagctcgatgcctactccaaaaaactggaagccaagtacaagaagcttgaaaaacgctag

SEQ ID NO: 216007 - DNA, 300 bp, synthetic construct
  misc_feature 1..300: note = Description of Artificial Sequence: Synthetic coding sequence
  source 1..300: mol_type = other DNA
atgttctcaaaaatggcaacatatttgaccggcgaactcacggcgacttcggaagactacaagttactggagaatatgaacaagctgactagcttgaagtacctggagatgaaggacattgccattaacatttctcgcaatctcaaggatctaaatcagaaatacgcaggattgcagccatatctggaccagattaatgttatcgaggagcaggtggcggctctcgagcaggctgcttataaactagatgcttactccaaaaagctggaagccaagtataagaaattagagaaacgttag

SEQ ID NO: 216008 - DNA, 609 bp, synthetic construct
  misc_feature 1..609: note = Description of Artificial Sequence: Synthetic coding sequence
  source 1..609: mol_type = other DNA
atggcaagtcagggccgacggaggcggcctcttaggcgcccagaaactgtcgtgcctggcgaggccaccgaaaccgactctgagaggtcagcctcatcgtcagaggaagaggagctgtatctgggccctagcgggcctactcgcggtcgacctacggggctcagggtggccggtgaggccgctgagactgacagcgagccagagccggaacctgagccaacagcagctccacgggatctgcctcccctggtcgttcagagggaatccgcggaagaagcttgggggactgaagaggccccagcgcctgctcctgcaaggagcctgcttcaacttcggctggcagagtcccaagccaggctcgatcacgacgtggcagcggctgtttccggagtctaccgacgcgcaggcagagatgtcgccgctctggcgagccgccttgccgcagctcaagccgctgggcttgcggctgctcacagtgtgcgcctcgcgagaggtgatctctgtgccctcgctgagagactcgacatcgtagccggttgccgcttgctccctgatatccgcggagtaccagggacagagcccgagaaggatcctggacctcgagcctag

SEQ ID NO: 216009 - DNA, 1632 bp, synthetic construct
  misc_feature 1..1632: note = Description of Artificial Sequence: Synthetic coding sequence
  source 1..1632: mol_type = other DNA
atggctcatgcgcacatccaggggggacgcagagctaaaagtagatttgtggtttgcattatgtccggagcacgttctaaactagcattgttcctgtgcggttgttatgtggtggcactcggagctcatactggagaggagtccgtggcggatcaccatgaggctgagtactacgtcgccgcagtatatgagcatccgagcattctgagcctcaaccccttagctttgatttcccgacaggaggcattggagctcatgaaccagaatttagacatctatgaacagcaggtcatgaccgctgcacaaaaagacgtacaaattattgtgtttccagaagacggtatccacggttttaattttacaagaacctccatctatcccttcttggacttcatgccctcaccacaggtcgtaagatggaacccctgccttgagccccaccgcttcaacgacaccgaagtgctgcaaaggttgagttgcatggccattcgaggtgatatgttcctggtggccaatctcggtaccaaggagccctgtcatagctctgacccccgttgccctaaggacggccgttatcagttcaacacgaatgtggttttttctaacaatggcaccctggtggaccgctatagaaagcataacctgtactttgaggctgcctttgatgtcccgcttaaagttgacctgatcaccttcgacacaccctttgccggacggtttgggatttttacatgcttcgatatcctgttctttgaccccgctatccgcgtcctgcgcgattacaaagtgaaacatgttgtgtatcctaccgcatggatgaatcagcttccactcctggccgctattgagattcagaaggcattcgctgtagcattcggaatcaatgtcctggcggctaatgtgcaccaccccgtgctgggcatgaccggaagtggaatacatacaccactcgagtcattttggtaccacgacatggagaatccaaaatcccacctcatcatcgcgcaagtggctaagaaccctgtgggcctgatcggagccgagaatgctactggcgagacagacccttctcactccaaattcctaaagatcttgtcgggggatccttactgcgagaaagatgcccaggaggtgcattgcgacgaggctacaaagtggaatgtgaacgcacctccaactttccatagtgaaatgatgtacgataattttactctcgtcccagtctggggtaaggaaggttacttgcacgtttgttcaaacggcctgtgctgttatctcctgtatgaacggccaactctgagtaaggagctgtacgctctaggggtgttcgacggtctccacacggtgcacggaacctactacattcaggtttgtgcccttgttaggtgcggcggtttggggtttgacacttgtggacaggagatcacggaagccacagggattttcgaattccatctgtgggggaatttcagcacttcttatattttccctctgttccttacctcaggtatgactctcgaggtgcccgaccagcttggttgggagaacgaccattatttcctaaggaagagcagacttagctctggcctcgtcacagcggcactgtacggaaggctgtatgagagggattag

SEQ ID NO: 216010 - DNA, 1572 bp, synthetic construct
  misc_feature 1..1572: note = Description of Artificial Sequence: Synthetic coding sequence
  source 1..1572: mol_type = other DNA
atgtctggggcacggtccaagctggctctgttcctctgcggttgctacgtagtcgcactgggggcacacactggcgaggagagcgtggcagaccatcatgaagcagaatactacgtcgcagctgtatacgaacacccctccattctttcattgaatcccctggcactgattagcagacaggaagcactcgaactgatgaatcagaacttggacatctacgagcagcaagttatgacggccgctcagaaagatgtacaaatcatcgtgttccccgaagatggtattcatgggttcaattttacacgaacctcgatctaccccttccttgacttcatgcccagcccacaggtggtccggtggaacccatgcctggagcctcatcggtttaacgataccgaggtgctgcagcgccttagctgtatggccattagaggtgacatgttcttagtagccaatctcgggaccaaagaaccttgccactccagcgatcctaggtgccctaaagacggccgttatcagtttaacacaaacgtggtgttctcaaataacggaacactagtcgaccgctaccggaagcataacttatacttcgaggcagcttttgacgtgcccctgaaggtcgatttgatcacttttgacaccccctttgctggaagattcggcatcttcacatgctttgatatcctgtttttcgatcctgccataagagtgctccgtgactataaagtgaaacatgtggtctaccctaccgcatggatgaaccagctccctctcctagccgctatcgaaatacagaaggcctttgccgttgcctttggtattaatgtgctggcagccaatgtccaccatcccgtgctcggaatgactgggtccggtattcacacccctttggagtcattctggtaccatgatatggaaaatcccaaatctcacctcatcatcgcccaggttgccaagaatcctgttggactcatcggcgcagaaaacgccactggagagacggatccgtcccactccaaattcctgaagatcctgtccggggatccttactgtgaaaaagacgcccaggaggtgcattgcgacgaggcaaccaagtggaatgtcaatgcacccccaacctttcactcagagatgatgtacgataatttcacactcgtccctgtctggggcaaagaaggctacttgcacgtgtgtagtaatggtctttgttgttacctcctttacgagcggccaacactgtccaaggagctttacgccctgggagtcttcgacggtctgcataccgtccatggaacatattatattcaggtctgtgctctggtgcgatgcggtgggcttggattcgacacatgcgggcaggagatcaccgaggcaacgggcattttcgagttccatctgtggggtaatttcagcactagctacatctttccactgtttctgacctccgggatgacattggaggtaccggatcagctgggttgggagaatgatcattactttcttcgcaaatcgaggcttagttccggcctggtaacggcagcgctgtatggtagactttacgaacgagattag

SEQ ID NO: 216011 - DNA, 1638 bp, synthetic construct
  misc_feature 1..1638: note = Description of Artificial Sequence: Synthetic coding sequence
  source 1..1638: mol_type = other DNA
atggcaagaaaggagacgcaactcatcatcaaaatgaaccacttagcaagatttgttgtgtgcataatgagtggagctcgatcaaaactagccctctttctgtgcggatgttacgtggtggctctaggcgctcataccggggaggaatccgtcgcggaccatcacgaggctgaatactacgttgccgctgtgtacgaacatccttcaatcttgtcattaaatccgctggcccttatcagccgccaagaggccctggaactgatgaatcagaacctggatatatacgaacagcaggtgatgacagcagcccaaaaggatgtgcagatcatcgtcttccccgaggacggaatccacggcttcaactttacgagaacctctatttacccgtttctggatttcatgccatctcctcaagtggtcagatggaatccatgcctggagcctcaccgctttaatgacaccgaggtgcttcagcgtctgtcctgcatggccattcggggagacatgttcctcgttgctaacctggggaccaaggagccgtgtcactccagtgatcccagatgccccaaggatggcagataccagttcaacacgaacgtagtgttctccaacaatggaactctggtcgacaggtatcgcaaacataacctatatttcgaggctgccttcgacgtacccttgaaagtagatctcatcactttcgacacgccatttgccggacggttcggcatttttacttgctttgatatactctttttcgatcctgcgataagggtgctgcgggattacaaagtcaagcatgtagtctaccctaccgcctggatgaatcagctcccgctgctggcagctatagagatccagaaggctttcgccgtggccttcggcattaatgtccttgccgcaaacgtgcaccacccggtgctgggaatgacaggttccggaattcacaccccactggagagcttctggtatcatgacatggagaatcctaagtcgcatcttatcattgctcaagtggcgaaaaaccccgtgggcctgattggtgcagaaaatgccactggtgagactgacccctctcatagcaaatttctcaagatcttgtcaggagacccttactgtgagaaagatgcgcaggaggtgcattgtgacgaagccaccaaatggaatgtgaatgcacccccaacattccattctgagatgatgtacgacaattttaccctggtgccagtgtggggcaaagaaggctacctgcacgtgtgctctaatgggctttgctgctacctgctatatgaaagacccacattgtctaaagaattgtacgctcttggcgttttcgacggcctgcacacggtacatggtacttattacatccaagtgtgcgccctcgtgcgatgcggcggtctcggatttgatacttgcggccaggaaatcacggaagcgacaggtattttcgagtttcatctgtggggtaacttcagcacgagctatatttttcccctcttcttaacctccgggatgacgctagaggttccggaccaactgggatgggaaaatgaccactactttctgcgaaagagcaggttgtctagcggtctggttactgctgctttatatggacggttgtatgaaagagattag

SEQ ID NO: 216012 - DNA, 1638 bp, synthetic construct
  misc_feature 1..1638: note = Description of Artificial Sequence: Synthetic coding sequence
  source 1..1638: mol_type = other DNA
atgccagaaggcggtgggacttcgcggaggcttctgccaatgcaatcgagattcgtcgtatgcatcatgagcggggcacgtagtaagctggctctcttcctgtgtggatgttacgtggtggcccttggtgcccacactggggaggagtccgtagcggaccaccatgaggccgaatattacgtggctgcagtctatgaacaccctagcattctctcgcttaaccctctggcactgattagcaggcaggaagcgctggagctcatgaaccagaacctggatatttatgagcagcaggtgatgaccgcagcccagaaggacgtgcagatcattgtgtttccagaagacgggatccacgggttcaattttacacgaacatccatctatccattcttggacttcatgcccagccctcaggttgttaggtggaacccttgcctggaacctcatcggtttaacgatactgaagtactccaacggctcagctgtatggcgattagaggtgacatgtttctggtggcgaatctgggaaccaaagaaccatgccactcgtccgatccacgttgccctaaggacgggagatatcagttcaacacgaacgttgtgttctcaaataatggcaccttagtggatagatataggaagcacaacctctatttcgaagctgcttttgacgtaccgctgaaggtggacctgatcaccttcgacactcctttcgcaggacgttttgggatcttcacatgcttcgacatcctttttttcgacccagcaatccgtgtactgagggattataaggtgaaacatgtcgtctacccaaccgcctggatgaaccagttacctctgctcgccgcaatcgagatccagaaagcctttgccgtggctttcggaattaacgttttggccgctaatgttcatcaccctgtgctagggatgacaggaagcgggatccacacacccctggaatctttttggtaccacgacatggagaatcctaagtcccatttgatcatcgcccaggtggctaagaaccccgtgggcttgattggcgcagagaacgcgaccggcgaaacggaccccagtcattctaagtttttgaagatcttgagcggcgatccatattgcgagaaggacgcccaagaagtgcactgcgacgaagctacaaagtggaatgtaaatgcccctcctacattccattctgaaatgatgtacgataatttcacgttggtcccagtgtgggggaaggaagggtatctccacgtgtgtagcaatggactttgctgttatttgctgtatgagcgtcccaccctaagcaaggagctatatgcgctcggcgtgttcgatgggttgcacacagtccacggaacctattacattcaggtttgtgcccttgtcagatgcgggggactgggtttcgatacatgcggccaggagattacggaggctacagggattttcgaatttcatctgtggggcaacttcagcacctcttacattttccccctctttctcacgtccggcatgaccctggaagtgccagaccagttgggatgggagaatgaccactattttcttcggaaaagccgcttatcctccggcctggtaaccgcggcactatatgggagactctacgagagggactag

SEQ ID NO: 216013 - DNA, 585 bp, synthetic construct
  misc_feature 1..585: note = Description of Artificial Sequence: Synthetic coding sequence
  source 1..585: mol_type = other DNA
atgccccgaaatctgttgtactctctcttaagctcccatttgagtccccactttagtaccagtgttacttcagctaaggtggccgtgaacggcgtgcagttgcactaccagcaaacaggagaaggcgaccacgccgttctgctgcttccagggatgctggggtccggagagaccgattttgggccacagctgaaaaatctcaataagaagctttttaccgttgtagcatgggatcctcggggttatggtcacagtagaccccctgaccgtgacttcccagcggactttttcgaacgggatgcaaaagatgcagtcgatctcatgaaagccctgaagttcaagaaagtgagcctcctggggtggtctgatggagggatcactgctctaattgccgctgccaaatacccctcttatatccacaagatggtgatctggggcgctaacgcctatgtgacggatgaggactccatgatttatgaagggatcagggacgtcagcaagtggagtgaacgtacccgaaaacccctggaggcactgtatgggtggagccttaccctctcacctggttggaatgctatggcttag

SEQ ID NO: 216014 - DNA, 825 bp, synthetic construct
  misc_feature 1..825: note = Description of Artificial Sequence: Synthetic coding sequence
  source 1..825: mol_type = other DNA
atgccccgtaacctgctgtattccctgctttcttctcatctgtccccacactttagtacctctgtaacctccgccaaagtggcagtaaatggggtgcagctccactatcagcagacaggtgagggcgaccacgccgtgttgttgctgcccggaatgctaggtagtggcgaaactgacttcggcccacaattaaagaacttgaataaaaagctctttactgtggtggcctgggacccacgtggctatggacattcacgcccacccgatcgcgacttcccggctgacttcttcgagcgcgacgctaaagacgctgtggacctcatgaaggctctgaagtttaaaaaggtttccctgctaggctggtctgacggcggaatcactgccctgattgcagccgcaaagtacccgagctatatccataagatggtgatttggggcgcaaacgcctatgtgaccgacgaagactcaatgatatacgagggcatccgtgacgtgtccaagtggtccgagcggactcgcaaaccccttgaagccctgtatggctatgactattttgccaggacttgtgaaaagtgggtggatggaataagacaatttaagcacctcccagacggtaacatctgccggcacctgctgcctagggttcagtgtccagccctcatcgtccacggcgagaaggatcctctcgtgccaaggtttcacgccgacttcatccataaacatgtgaaagggagtcgactgcatctcatgcccgagggcaagcacaatctgcacctgcgattcgccgacgaattcaacaagcttgctgaggatttcctgcaatag

SEQ ID NO: 216015 - DNA, 876 bp, synthetic construct
  misc_feature 1..876: note = Description of Artificial Sequence: Synthetic coding sequence
  source 1..876: mol_type = other DNA
atggtggcagtgttgggcggacgcggagtacttcggctcaggctgttattaagtgctcttaagccagggatccatgttccccgagcagggcctgcggcagctttcggcacttcggttaccagcgcgaaagttgccgtgaacggcgtgcaactgcactatcagcagacaggcgagggagaccacgcagtccttcttttgcccggtatgctgggtagcggcgaaacggactttggcccacagctgaaaaacctaaacaagaagctgttcacagtggtggcctgggacccacgtggctacggacatagcaggccccctgatcgagattttccagctgatttttttgagagagacgcgaaggacgccgttgatctgatgaaagccctgaaatttaagaaagtgtccctccttgggtggtccgacggcggaatcaccgcgttaattgcagcagccaaatacccctcttacatccataagatggtaatatggggtgccaacgcatacgtgactgacgaggatagtatgatttatgagggcattcgcgatgtgagcaaatggtctgaacgaacccgtaagcctctagaagcgctctacgggtatgactacttcgccagaacttgcgaaaaatgggttgatggcatcaggcagttcaagcatctgcccgatggcaacatatgcagacacttgttgccccgtgtgcagtgtccagcgctgatcgtccatggcgagaaggaccccctagttccgaggtttcacgccgatttcatccataagcatgtgaaaggcagtagactccaccttatgccggaggggaagcacaacctccatctgcggttcgccgacgagttcaataagttagcagaagatttccttcagtag

SEQ ID NO: 216016 - DNA, 264 bp, synthetic construct
  misc_feature 1..264: note = Description of Artificial Sequence: Synthetic coding sequence
  source 1..264: mol_type = other DNA
atgtactgtctacagtggctcctgcccgttcttctcatccccaagcctctcaaccccgctctctggttcagccacagcatgtttatggggttttacctcctctcatttctcctcgagcgtaagccatgcaccatctgtgcgcttgtgttcctggcagctctgttcttaatttgctacagctgctggggcaactgctttctgtatcattgttcagacagtcctctgcccgagagcgcccacgaccccggtgtggtagggacgtag

SEQ ID NO: 216017 - DNA, 264 bp, synthetic construct
  misc_feature 1..264: note = Description of Artificial Sequence: Synthetic coding sequence
  source 1..264: mol_type = other DNA
atgtactgcctgcagtggctgctccctgtgcttctaattccgaaacctctgaacccagccctgtggttttcccactcaatgttcatgggtttctacctgctgtccttcctgcttgaacggaagccttgcactatttgcgccctcgttttcctcgccgcattgttcctaatatgctatagctgctggggcaactgcttcctctaccactgtagcgattcacctctcccagagtccgcacatgatcccggagtggttggtacttag

SEQ ID NO: 216018 - DNA, 264 bp, synthetic construct
  misc_feature 1..264: note = Description of Artificial Sequence: Synthetic coding sequence
  source 1..264: mol_type = other DNA
atgtactgtctgcagtggttgctcccagtactccttatccccaagccactaaaccccgcactttggtttagccactccatgtttatgggattttacctgctttcgttcctgttggagcgcaagccctgcaccatctgtgccttggtgttcctcgcagccctgtttctcatttgctattcctgctgggggaattgctttctgtatcactgttccgatagcccgctaccggaatccgcacacgatccaggtgttgtgggtacctag

SEQ ID NO: 216019 - DNA, 264 bp, synthetic construct
  misc_feature 1..264: note = Description of Artificial Sequence: Synthetic coding sequence
  source 1..264: mol_type = other DNA
atgtattgcctccagtggttactccccgtcctgctgataccgaagcctctcaaccctgctctctggttctcccactcaatgttcatgggcttctatctgctaagtttcttgctcgaaagaaaaccgtgcacaatatgcgctctagtattcctggccgctctgtttctcatatgctattcatgttgggggaattgttttctttatcattgtagtgacagccccctaccggaatcggctcatgatcccggtgtagtaggcacctag

SEQ ID NO: 216020 - DNA, 264 bp, synthetic construct
  misc_feature 1..264: note = Description of Artificial Sequence: Synthetic coding sequence
  source 1..264: mol_type = other DNA
atgtactgcttacaatggttattacccgtgctattaatccctaaaccgctcaaccccgcactctggtttagccacagcatgttcatggggttctacctgttgtcctttcttctggagagaaagccatgcacgatctgcgccctggttttcctggccgcacttttcctgatttgctattcttgttggggcaattgttttctctaccactgtagtgattccccactacccgaatcagcccacgaccccggagttgtgggtacatag

SEQ ID NO: 216021 - DNA, 189 bp, synthetic construct
  misc_feature 1..189: note = Description of Artificial Sequence: Synthetic coding sequence
  source 1..189: mol_type = other DNA
atgtactgtctgcaatggctattgcccgtgctgctcatcccgaagcccctgaatcccgctctctggttcagccacagcatgttcatggggttctatctgctgagcttccttttggagcgtaagccttgtacaatttgtgcattggtcttcctggccgctctgtttctgatttgctacagctgttggtag

SEQ ID NO: 216022 - DNA, 264 bp, synthetic construct
  misc_feature 1..264: note = Description of Artificial Sequence: Synthetic coding sequence
  source 1..264: mol_type = other DNA
atgtattgtttacaatggcttctcccagtgttacttattcctaagccgctgaaccccgctctgtggttctcgcacagcatgttcatgggattttatctcttgtccttcctcttggagaggaagccctgcactatctgtgccttggttttcttggctgctctgttcctcatctgctactcttgttggggtaactgttttctgtatcactgcagcgacagccccttaccagagtctgcgcacgatcctggagtggtgggaacgtag

SEQ ID NO: 216023 - DNA, 264 bp, synthetic construct
  misc_feature 1..264: note = Description of Artificial Sequence: Synthetic coding sequence
  source 1..264: mol_type = other DNA
atgtactgtttgcagtggcttttaccagtgcttttaatcccaaaacctctgaaccccgcactgtggttttcccacagtatgtttatgggattctacctcctgtcgttccttctggagagaaaaccctgtaccatctgcgcactggtgtttttagcggctctgttccttatctgttactcgtgctggggcaactgcttcctgtaccattgctcagattcccctctccccgagagtgcacacgacccgggtgttgtgggtacctag

SEQ ID NO: 216024 - DNA, 237 bp, synthetic construct
  misc_feature 1..237: note = Description of Artificial Sequence: Synthetic coding sequence
  source 1..237: mol_type = other DNA
atgtactgtctgcagtggctgctgccagttttgctgatacctaagccactcaatcccgctttgtggtttagtcactctatgttcatgggattttacctactatcctttctgctggagcgaaagccctgcaccatttgcgctctcgtgtttctcgccgctctctttttgatctgctactcttgctgggggaattgctttttgtatcattgctctgactctcctcttcccgaaagctag

SEQ ID NO: 216025 - DNA, 24 bp, synthetic construct
  misc_feature 1..24: note = Description of Artificial Sequence: Synthetic coding sequence
  source 1..24: mol_type = other DNA
atgtattgcctgcagtggctttag

SEQ ID NO: 216026 - DNA, 1368 bp, synthetic construct
  misc_feature 1..1368: note = Description of Artificial Sequence: Synthetic coding sequence
  source 1..1368: mol_type = other DNA
atgagttctagcggcctcaatagcgaaaaagtggcggctttaatccagaagctcaactctgacccccagttcgtgctggcccagaacgtgggcaccactcatgatctgttagacatctgccttaagagagccaccgtccagcgggcacagcacgtgttccagcatgccgtgccacaagagggaaagcccataacaaaccaaaaaagcagtggtcggtgttggatattctcttgtttgaacgttatgagacttccgtttatgaaaaagttgaatattgaagaattcgagttcagtcagtcatacctcttcttctgggataaagtggaacgatgttatttttttttaagcgcgttcgttgataccgctcagagaaaagaacctgaagatgggaggcttgtgcagttcctgctgatgaacccggctaatgacggcggtcaatgggacatgttggtgaacatcgtggaaaaatacggggttattccgaaaaagtgttttccggagtcttatacgaccgaggccacgcgacgaatgaatgatatcctgaaccataagatgagagagttctgcatccggctgcggaatctcgtgcatagtggggctaccaagggggagatctctgccacacaggacgtaatgatggaagagatctttagggttgtctgcatctgcctgggcaacccacccgagacctttacgtgggagtatcgggacaaggacaagaattaccagaaaatagggccaattacgcctttggaattctacagagaacacgttaagcctctgtttaatatggaagataagatctgtctcgttaatgatccccgaccacagcataaatataataaactctacactgttgaatacctgtccaatatggtgggtggcagaaaaacactgtataataaccagccgatcgactttcttaaaaaaatggtggcagcttccatcaaggatggcgaggccgtgtggttcggatgtgacgtgggcaagcacttcaactctaagttgggcctttccgacatgaatttgtacgaccacgagctggtgtttggagtttcactgaagaacatgaataaggcagaaagacttacttttggagaatctctgatgacccacgcaatgacctttaccgctgtaagcgagaaagatgatcaggatggggctttcacaaagtggagagtagaaaattcctggggtgaggatcatggccacaaaggttatctctgcatgactgacgagtggttctctgagtacgtgtacgaagtcgtcgttgatcgcaagcacgtgcccgaggaggtgcttgctgtacttgagcaggagcctatcattttgcccgcttgggatcccatgggcgctctggcagagtag

SEQ ID NO: 216027 - DNA, 1107 bp, synthetic construct
  misc_feature 1..1107: note = Description of Artificial Sequence: Synthetic coding sequence
  source 1..1107: mol_type = other DNA
atgtgtagctcaactccctgcccacgccgtgcttcccaaagtcccacccggagggcgcaggtagagcgctgttacttttttttatctgcgttcgttgacacagcacagaggaaggaaccggaagatgggagactggtacagttcctcctgatgaatcccgcaaatgacggtggacaatgggatatgctggtcaatatcgttgaaaaatacggggttattcctaagaagtgtttcccagagagttacacaactgaggcaactcgcaggatgaacgatattctgaaccacaaaatgagagagttttgtataaggttacgaaatctcgtacattcaggcgctaccaagggagagattagtgctactcaggatgtgatgatggaagagatcttccgagtcgtgtgcatctgcctcggcaacccccctgaaacttttacatgggagtatcgggacaaagacaaaaactaccagaaaataggacctatcacccccctggagttctaccgcgaacacgtgaagcctttgtttaacatggaggacaaaatttgtctggtgaacgaccccagaccgcagcataaatacaacaagttatataccgtggagtacctctcaaatatggtaggagggcgaaagacactgtacaataaccagcctattgactttttgaagaagatggttgccgcttctattaaggatggagaggccgtgtggtttggctgtgacgttgggaaacattttaacagcaaactgggtctgagtgatatgaacctatacgatcacgagcttgtgttcggcgtgtccttgaagaatatgaacaaagccgagcgcttaactttcggggaatccctcatgacccatgcaatgacttttacggctgtttcagagaaggacgaccaggatggggcttttaccaagtggcgagttgagaatagctggggagaagaccacgggcacaaaggctatctgtgcatgactgacgaatggttttccgagtacgtgtacgaagtagtcgtggaccggaagcacgtgcctgaggaggtacttgccgtgcttgagcaggagccgattatcctgcctgcatgggaccccatgggggcactcgcagaatag

SEQ ID NO: 216028 - DNA, 2241 bp, synthetic construct
  misc_feature 1..2241: note = Description of Artificial Sequence: Synthetic coding sequence
  source 1..2241: mol_type = other DNA
atggccggaagccggggagccggtcggacagcggctccttctgtgcgcccagagaagaggagatccgagcctgagctggaacctgaacccgaacccgaaccaccgctgctatgcacttcacccttgagccacagtaccggaagcgacagtggggtgtctgattccgaagagtcagtgttctcagggcttgaggactcaggaagcgacagcagcgaggacgacgatgaaggagacgaagaaggtgaggacggagccctggatgacgaggggcactccgggattaagaagacaaccgaggagcaggtgcaagcatccactccttgccctcggacagagatggcaagcgctagaattggggatgaatacgcagaggatagctcagacgaggaggatatccgaaatacggtcggaaatgtcccactagaatggtatgatgatttccctcacgttggctatgatttggacgggaggcggatatataagcctctccgcacgcgtgatgagctggaccagtttctggacaaaatggatgatcctgactattggaggaccgttcaggaccctatgactgggcgagacttgcggctgactgatgagcaggtagctctggtcagacgcctccaatccggacagttcggagacgtgggcttcaatccatacgaacctgccgtggatttctttagcggtgatgtcatgattcacccagtcaccaacaggccagcagacaagaggagcttcatcccgagcctcgtagagaaggagaaggtttcacggatggtgcatgctatcaagatgggatggatccagccccgtcggcctagggatcccactccctccttctatgatctttgggcccaggaggaccccaacgcagtgctagggcgacataaaatgcacgtccctgctccgaaactggccttgcccggacacgctgagtcctacaacccaccaccggaatacctattgtcagaggaggagaggcttgcctgggagcagcaagagccgggagaacggaaactctcgttcttgcccagaaagtttcccagccttcgagccgttccagcttatggaagatttattcaggaacgcttcgagaggtgtttggacctgtacctgtgtcctcgtcagcgcaaaatgcgggttaatgtggatcccgaagatctaatccccaaactaccacgccctagagacctccaaccatttcctacctgccaggccttagtctatagagggcacagtgatctcgtacgttgtctctcggtctccccaggaggacagtggctggtttcgggcagcgatgacggctctctgcgcttatgggaggtcgccactgccagatgcgtgcgtaccgtccccgttggtggtgtggtcaagtcagtcgcctggaatccatcaccggctgtctgtctggtcgccgctgcagtggaggacagcgtgcttctcctgaaccctgcactgggcgacagactcgtggcaggctccaccgatcaacttctctccgcctttgtcccccctgaggaaccccctcttcaacctgctaggtggttagaggcttccgaggaagagcggcaggtcgggctgagactgcggatttgtcatggtaagcctgtaacccaagtgacttggcacgggagaggggattacttggctgtcgtgctggcaacccagggacatacgcaagtgctcattcatcagctcagcagacgaagatctcagagcccctttagacggtcacacgggcaggtgcagcgtgtcgcgtttcacccagcacgtccattccttctggttgccagtcagcggtctgttcgcttgtaccatctgcttagacaggaactgaccaagaaactgatgcccaactgtaagtgggttagtagcctagctgtgcatcccgcaggagacaatgttatctgcggaagctacgattccaaattagtatggtttgacctcgatctctccacaaagccctatcgaatgttgcggcaccacaaaaaggcactcagagctgtagccttccatcctaggtaccccttgtttgcaagcggctccgacgacggaagtgtcattgtttgccacgggatggtgtacaacgacctgctccagaacccgctgcttgtcccggtcaaggtgctaaaaggccatgtgttaacccgcgatctaggagtgctggatgtgattttccatcctacacaaccctgggtgttctctagcggggctgacggcacagtgaggctatttacttag

SEQ ID NO: 216029 - DNA, 1083 bp, synthetic construct
  misc_feature 1..1083: note = Description of Artificial Sequence: Synthetic coding sequence
  source 1..1083: mol_type = other DNA
atgaattacacagaaagctcacctcttagggagtcaactgcaatcggttttacaccggagctggagtctatcattccagtgcccagcaataaaactacctgcgagaattggcgggagattcatcaccttgtgtttcacgtcgccaacatctgcttcgcagtcggattggtgattccaactaccctgcatctgcacatgatatttctgagaggaatgttaacactgggatgcaccctgtatatcgtgtgggcaacactgtatcgctgcgccctcgatataatgatctggaacagcgtattccttggtgtaaatatactccacttgagctatctgctgtacaaaaaacgacctgttaaaattgaaaaggagctgagcggcatgtaccggagactgttcgagcccttgcgggtccctccagatctcttccgccgattgactggccagttttgcatgatccagacattgaaaaaaggtcagacctacgccgctgaagacaaaacgagtgttgacgacagattgtccatattactcaagggcaagatgaaagtcagttaccgtggtcactttctgcataacatttatccgtgtgcctttatcgatagtccagagttcaggtctactcagatgcataagggcgagaagtttcaggttacaattatcgcagacgacaattgccggttcctttgttggtcacgcgaacgcttgacctatttcctcgagagcgagccgtttctatacgagatttttcgttacctgataggtaaggacattaccaacaaactctactctctgaacgatcccactctgaatgacaagaaagcgaaaaagctggaacatcaactgtccctgtgcactcagatcagtatgctggaaatgaggaattcaatcgcctcttcttctgatagcgacgatggcttgcaccagtttctgagaggaacctcctcaatgtccagtcttcacgtttcaagcccccaccagcgagcatccgccaagatgaaacctattgaggagggagccgaggacgacgacgacgtgttcgagcctgcaagtccgaataccctcaaggtgcatcagctgccatag

SEQ ID NO: 216030 - DNA, 1083 bp, synthetic construct
  misc_feature 1..1083: note = Description of Artificial Sequence: Synthetic coding sequence
  source 1..1083: mol_type = other DNA
atgaattacaccgaatcatctccccttcgggaatcaaccgctatcggcttcactccagagcttgagtcgatcatccccgtgccctcaaataaaaccacgtgtgaaaattggagggagattcatcacctggtgttccacgtcgctaacatctgttttgcagttggactcgtgattcctacaaccctccacctgcacatgatctttttgcggggaatgctaaccttgggatgcacactgtacatcgtttgggctactctctaccgctgtgctttagacataatgatatggaacagtgttttcttaggcgtgaacatcctgcatctgagctacctgctttacaagaaacgcccagtgaaaatcgagaaggagctgtcagggatgtatcggcgattattcgaaccgttgagggtgcctccagacttattccggagactgaccggtcaattttgtatgattcagactttgaagaagggacaaacttatgccgcagaggacaaaacaagtgtggacgaccgattgtccatcctactgaaaggcaagatgaaagtatcttacagagggcattttctgcacaatatctacccgtgtgcatttatcgacagtcccgagtttagatcgactcaaatgcacaagggggagaaattccaggttactattatcgccgatgacaactgtcggttcctctgctggtcaagagagagacttacgtactttctggaaagcgaacctttcctgtatgaaattttccgctatctgattggtaaggatattacaaataagctatattccttgaacgaccccacactgaatgacaagaaggctaagaagctcgaacaccagctgagcctgtgtactcaaatctctatgctggaaatgagaaattcaatagcgagtagcagtgacagtgatgacggcttgcaccagtttctgagggggacttcttcaatgagctccctccatgtctctagcccacaccagcgagcaagtgcaaaaatgaagcccattgaggagggcgctgaagatgatgatgatgtgtttgaacccgcatcacccaacactctgaaagtccaccagctaccctag

SEQ ID NO: 216031 - DNA, 1083 bp, synthetic construct
  misc_feature 1..1083: note = Description of Artificial Sequence: Synthetic coding sequence
  source 1..1083: mol_type = other DNA
atgaactataccgagagttcaccgttgagagagtccaccgccatcgggttcactccagagttggagtctataattccggttcctagcaacaaaactacttgcgaaaactggagagagatccatcacctggtgttccacgtggcgaatatctgtttcgctgtcggactggtcatccccaccacactccatctgcatatgatatttctcagagggatgctcactctgggctgtacactgtatattgtgtgggccaccctgtatcgatgtgctctggatatcatgatctggaacagcgtgttcttaggggtaaacattctgcacctcagctatttgctatacaagaaaagaccagtgaagattgaaaaagaactgagtggcatgtacagacgacttttcgagcctctccgggtgccccctgatctcttccgcagactgacaggccaattctgcatgatccagaccctcaagaagggccagacatacgccgcagaggataagacctctgtggatgatcgcctgtcaatcttgcttaaagggaagatgaaggtgtcctacaggggccatttcctacacaacatctatccatgcgcgtttatagatagccctgagttccgctccactcagatgcacaagggagagaaatttcaagtcaccatcatagccgacgataactgcagattcttgtgctggtcccgtgagcgcctcacatactttctcgaaagtgagccctttctatatgagatatttcggtacctgatcggcaaggacattaccaataagctgtattctcttaacgatccgactctgaacgacaaaaaggctaaaaagctcgagcaccagctatccctttgcacacagatcagcatgctggagatgagaaattcgatcgccagctcctcggacagcgatgatggcctgcatcaatttcttagaggcacctctagcatgtcatccctccacgtgagttcgccccaccagcgggctagtgccaagatgaagcccatcgaggagggggctgaggatgatgatgacgtctttgaaccagccagtccgaacacactcaaggtgcaccaactcccatag

SEQ ID NO: 216032 - DNA, 783 bp, synthetic construct
  misc_feature 1..783: note = Description of Artificial Sequence: Synthetic coding sequence
  source 1..783: mol_type = other DNA
atggaccgccacagctcctacatcttcatctggctgcagttagaattgtgcgccatggcggtgttgctcaccaaaggcgaaatccgctgttactgcgacgccgctcactgcgtggccaccgggtacatgtgtaagtcggagctcagtgcctgcttcagcagacttctagaccctcaaaattcaaattcccctctaactcacggctgtctggacagcctcgctagcaccaccgatatatgccaggccaaacaggccaggaatcacagcgggaccacgattccaacactcgaatgctgccacgaggacatgtgtaactatcgcggtttgcacgatgtcctcagcccgccacggggagaggcaagtgggcagggaaaccgctatcagcatgatgggagccgcaatctgattaccaaggtgcaagagctcaccagcagcaaggaactctggtttcgggcagctgtgattgcagtccctatcgcaggaggcctgatccttgtcctcctgattatgctggctttacgtatgctacggagcgagaataaaaggctccaagaccaaagacaacagatgttgtcacgactgcattattcattccacgggcaccactcaaagaaaggacaggtcgcaaaactcgatttagagtgcatggtccccgtgtccggtcatgaaaattgctgtctgacctgcgacaagatgcggcaggcggacctctctaatgacaaaatcctcagcctcgtgcactggggaatgtatagtggccacggcaagctagaattcgtctag

SEQ ID NO: 216033 - DNA, 744 bp, synthetic construct
  misc_feature 1..744: note = Description of Artificial Sequence: Synthetic coding sequence
  source 1..744: mol_type = other DNA
atggacagacactcttcttatattttcatctggctgcagttggaactgtgtgcgatggctgtcctgctaacgaagggagagattaggtgctactgtgacgccgcacactgtgtggccacaggctacatgtgtaagtccgagttgtccgcttgcttttcccgcctactcgatccccagaattcaaacagtcctcatatttgccaagccaagcaggcacgaaaccactccggaactactattcctacacttgagtgctgtcatgaggacatgtgtaattatagaggcctccatgatgtgctgtcccctccccgaggtgaagccagcggacaaggcaaccgttatcagcacgacggctcccgcaatcttatcacaaaggtccaggagctaacaagtagcaaggagctgtggtttcgggcagctgtgatcgcagtgcctattgccggtggtttgatcctggtactacttattatgcttgctctgcgaatgttacggagcgaaaataagagattacaggatcaacgacagcagatgctgagtagattacactatagttttcacggccatcattccaaaaaggggcaggtagcaaagctcgacctggaatgcatggtacccgtgagcgggcatgaaaattgttgcctgacttgcgacaaaatgagacaggcggatctctcgaacgacaaaatcttatcactagtgcattggggcatgtattctggccacgggaagcttgaatttgtgtag

SEQ ID NO: 216034 - DNA, 2058 bp, synthetic construct
  misc_feature 1..2058: note = Description of Artificial Sequence: Synthetic coding sequence
  source 1..2058: mol_type = other DNA
atgctgtggttctcgggcgttggcgctctggctgaaaggtactgcaggcgttcaccgggaattacatgctgcgtgctgctgctgctgaattgcagtggggttcccatgagtctggcttcctcattcctgactggtagcgtcgctaaatgtgaaaatgagggcgaggtgctccaaatcccgtttatcaccgataacccatgtattatgtgtgtgtgcctaaacaaagaagtgacttgcaagcgggaaaaatgtcctgtgctgtcccgcgactgtgccctggcgatcaaacagcgcggagcctgctgtgaacagtgcaagggctgcacctatgaaggaaacacctacaactccagcttcaagtggcagtcaccagccgaaccttgcgttctgcgccaatgtcaggagggagtggtgaccgagtccggcgtgaggtgtgtggtccactgcaaaaaccccctcgaacaccttggcatgtgttgtcccacctgccctggctgtgtgttcgagggtgtccagtaccaggaaggcgaagaatttcaacctgaggggtcaaagtgcactaaatgcagctgtacaggaggcagaacacagtgcgtgcgggaggtctgccctatcctgagttgtccccagcatttatctcacataccaccaggccagtgctgcccaaagtgccttggtcaacgaaaggtgttcgacctgccatttgggtcgtgtctgtttagatctgatgtgtatgataatgggagctcctttctgtacgacaactgtaccgcctgcacatgtagagatagcaccgtggtgtgcaaacgaaagtgttcccatcccggtggctgcgaccagggacaggaggggtgttgtgaagagtgcctgcttcgagttccccctgaggatataaaagtttgcaaattcgggaacaagatctttcaggacggtgagatgtggagcagcatcaactgcactatctgtgcatgtgtgaaaggacggacagagtgtcggaacaaacagtgcattcctatcagctcatgtccgcaggggaagatcctcaacaggaagggatgttgtcctatctgcaccgagaaacccggtgtgtgcaccgtctttggcgacccccactacaataccttcgacggccgaacctttaactttcagggcacttgccagtacgtgctgaccaaggactgttcatctcctgcttctccattccaagttctggtgaagaacgacgcccgacgcacgcgtagcttctcatggactaaatcagtggagctcgttttgggggaatccagagtttcactgcagcagcacctcaccgttcgttggaacggatcccgaattgctttaccctgcagagcccctcatttccacatcgatctcgacggatacttgctgaaagtgaccactaaagctggtctggagatcagttgggatggcgacagctttgtggaggtcatggccgcaccccatttaaaaggcaagctctgtgggctgtgtggtaattataatgggcataaaagggacgatctcatcgggggagacggcaactttaaattcgacgtcgacgattttgccgagtcctggagagtcgaaagtaatgaattttgcaacagaccgcaacggaagcccgtgcctgagctgtgtcagggaacggtgaaggtgaaattgcgcgcacatcgtgagtgccaaaagctaaagagctgggagttccagacctgccacagcacggtggattatgccaccttctaccgatcatgtgtcactgacatgtgcgagtgcccagtgcacaaaaattgctactgtgagagtttcctcgcgtatacccgcgcttgtcagagggagggtataaaggtgcattgggagccgcagcagaactgcgccgctacccagtgcaagcacggcgctgtctatgacacctgcggacccggatgcattaagacctgcgacaattggaacgagattggaccatgtaacaagccctgtgtcgcgggatgtcactgccccgcaaacctggttctgcataagggcaggtgtatcaaacctgtgctctgccctcagaggtag

SEQ ID NO: 216035 - DNA, 2058 bp, synthetic construct
  misc_feature 1..2058: note = Description of Artificial Sequence: Synthetic coding sequence
  source 1..2058: mol_type = other DNA
atgctgtggttctctggagtgggggctctagccgaaagatactgcaggcgatcacccggaatcacctgctgtgtcctgttactgctgaactgctctggcgtgccgatgagcctggctagctcatttctcacggggagcgtcgctaagtgtgagaacgaaggggaggttctgcagatcccctttattaccgataacccctgcattatgtgcgtctgcctaaacaaagaagtcacctgcaaaagagagaaatgccccgtgctgagccgagattgcgcactggctatcaagcagagaggcgcatgttgcgaacagtgtaaaggatgtacttacgaagggaatacctataactctagttttaagtggcagtcgcccgctgaaccctgtgtgctgcggcagtgtcaggagggtgttgttactgagagtggagtgagatgcgtggtgcattgtaaaaacccgctcgaacatctgggtatgtgctgccctacctgtcccggatgtgtgtttgaaggtgtgcagtatcaggaaggggaggagtttcagccagagggctctaaatgcactaaatgcagttgtacaggaggcagaacacagtgtgtccgggaggtctgtcccatcctgagctgcccccagcatctcagccacatcccccctgggcagtgctgccctaaatgcctcggccagcgtaaagtcttcgacttaccttttggttcttgtctcttcaggagtgatgtgtatgacaacggatccagctttctgtatgacaactgcaccgcttgtacttgccgagactccacagtggtatgtaagaggaaatgttcccacccaggcggatgcgaccagggccaggaaggatgttgtgaggagtgtttgctacgcgttccacctgaagacattaaggtgtgcaagtttggaaataaaatctttcaggatggggagatgtggagctccattaattgcaccatatgcgcgtgtgttaaaggaaggaccgagtgccggaataagcagtgtattcctatttcatcatgcccccagggcaagatcctgaacagaaaagggtgctgtccaatatgcaccgagaagcctggggtgtgcacagtgtttggcgacccccattataatacttttgatggacgcactttcaactttcaaggtacttgtcagtacgtcctgactaaagattgttctagtcccgcttcgcccttccaggtactggtcaaaaacgatgcccgtcggaccagaagcttttcgtggaccaaaagtgttgagctcgtgctgggcgagagcagggtgtcccttcagcagcatctgactgtgaggtggaatggctccagaatagccctgccatgccgggcacctcactttcacatcgacttggacggatacctgttaaaggtgacaacaaaggcgggtcttgaaattagttgggatggtgactccttcgtcgaagtcatggctgcaccacacctaaagggcaaactctgtggtttgtgcgggaactataatggtcataaacgagacgatcttattgggggagatggtaattttaagttcgacgtcgacgacttcgctgagtcctggcgtgtggagtccaatgaattctgcaacaggcctcagcgcaagccagtccccgagctttgccagggaacagtgaaggttaaactgagagctcatagggaatgtcagaagttgaaatcatgggagttccaaacttgccactctaccgtggattacgcgacattttatcggtcatgcgtcacagacatgtgtgagtgtcccgtgcataagaactgttactgcgagtcattcttggcatacacccgggcttgccagcgcgaaggcatcaaggtgcactgggagccccagcagaactgtgccgctacgcagtgcaaacacggggctgtttatgacacatgcggtccaggatgtattaaaacctgtgacaattggaacgaaatcgggccatgtaataagccgtgcgtcgctggatgtcattgccctgccaatttggttctccataaggggaggtgtatcaagcccgtgctgtgcccacagagatag

SEQ ID NO: 216036 - DNA, 2028 bp, synthetic construct
  misc_feature 1..2028: note = Description of Artificial Sequence: Synthetic coding sequence
  source 1..2028: mol_type = other DNA
atggatacaaaaagcattctggaagagctgctgcttaagaggtcacagcagaaaaagaaaatgtcccctaataattacaaggaaaggctgtttgtgctgaccaagaccaatctttcttattatgaatacgataaaatgaagaggggatcccgaaaaggttccattgagataaaaaaaattcgctgcgtggagaaagttaatctggaagaacagacgccagtggaacggcagtatcccttccagattgtttacaaggatggtctgctgtacgtgtacgctagtaatgaagagtccaggagccagtggctgaaagccctgcaaaaagaaatccgaggtaaccctcaccttttagttaagtatcacagcggatttttcgtggacggcaagttcctctgttgtcaacagagttgtaaggctgcacctggttgtactctttgggaggcttatgccaatcttcacacagccgtgaatgaggaaaaacatagagtacctacctttccagatcgcgtgcttaagatcccaagggccgtgccagtgttgaaaatggacgccccttccagctccaccactctggcccagtacgacaacgagtctaagaaaaattacggttctcagccaccctcatcatcgacatctttggcccagtatgattctaatagtaaaaaaatttatgggagccagccaaacttcaatatgcagtatatccctagagaagactttcccgactggtggcaggtccggaagttgaagtcatccagttcgagcgaagacgtggcatcctcgaatcagaaggagcggaacgtcaatcacacgaccagcaagatttcttgggaatttcctgaatcctcatctagtgaggaggaggaaaatctggatgactacgattggtttgcaggtaatatcagtcggtcccaatccgagcagctgcttcgacagaaggggaaagaaggtgctttcatggtacggaatagttcccaggtgggaatgtacactgtgtcgctcttcagtaaagctgtgaatgacaaaaagggcacggtcaagcactaccacgtccacaccaatgccgagaacaagctttaccttgctgagaattactgctttgattctattcctaagttgatccattaccatcagcacaactctgcgggaatgatcacccgactgagacatcctgtcagtacaaaggctaataaagtgcctgattctgtttcactaggcaacggaatctgggagctaaaacgagaagaaatcaccctcctaaaagagctcggcagtgggcagtttggcgtcgtacagctggggaaatggaagggacagtacgacgtggctgtcaaaatgataaaggagggctccatgagcgaggatgagtttttccaggaggctcagaccatgatgaagctgagccaccctaaactcgtcaagttttatggcgtgtgctctaaggaatatccgatttacatcgtgaccgagtacatttcaaacgggtgtctgcttaattacttgaggagccacgggaaaggtctggagccttcccagctcctggaaatgtgttacgacgtgtgtgagggcatggcgttcctcgagagccaccagtttattcacagggaccttgctgctcggaactgcctcgtcgatagggatctctgcgtgaaagtgagcgatttcggcatgactcgatacgtgctcgacgaccagtacgtttcgtcagtagggactaagttccctgtcaagtggtccgctccagaggtcttccactactttaaatactccagcaagtccgatgtatgggctttcgggattttgatgtgggaggtcttcagcttgggcaagcagccctatgacctgtacgacaattcccaggtggtgctcaaagtgtcacaaggccacagactttaccgcccacacctcgcttccgacacgatctaccagatcatgtactcatgctggcatgagctgccggaaaagcggcctactttccagcagctcctctcctctatcgagcccctgcgcgagaaagacaagcactag

SEQ ID NO: 216037 - DNA, 2028 bp, synthetic construct
  misc_feature 1..2028: note = Description of Artificial Sequence: Synthetic coding sequence
  source 1..2028: mol_type = other DNA
atggacacgaagtcaatcttggaggaacttctactgaagaggtctcagcagaagaagaagatgtctcccaataactacaaagaacgcctgtttgtcctcactaaaaccaacctgtcctactacgagtacgacaaaatgaaacggggaagccggaaaggcagcatcgagatcaaaaaaatccggtgtgtggagaaagttaatctcgaggagcagactcctgtggagagacagtacccctttcagattgtgtacaaggacggactgctctacgtgtatgcaagtaatgaggagtccagatctcaatggctgaaagctctgcagaaggagataagaggaaatccacacttactggtaaaataccattccgggtttttcgtggacggaaaatttctgtgttgtcagcagtcttgcaaagccgcacccggatgcacactgtgggaggcgtatgccaatttgcatacagcggtgaacgaagaaaaacacagagtgcctaccttcccagacagagtattaaaaatccccagagccgttccagtccttaaaatggatgccccttcttcatccactactctggctcagtatgataatgaaagtaagaagaattacgggagccagccgccttcaagctccacttctctggcgcagtacgactctaactcgaagaagatctacggcagccagcccaattttaacatgcaatacataccaagagaggacttccccgattggtggcaggttaggaagctgaagtccagcagcagttccgaagacgtggcatcttccaaccagaaggagaggaacgtgaatcatacaaccagtaaaatttcgtgggagttccctgagtcctccagctccgaggaggaagaaaacctggacgattatgactggtttgcgggaaatataagccgctcacagtctgaacaattgctgcgtcagaaaggaaaagaaggagcctttatggtcagaaactcttcccaagtgggaatgtatacagtatccctgttttccaaagcagtgaacgacaaaaaaggtactgtgaagcactatcatgtgcataccaacgcggagaacaaattatatctcgctgagaattattgctttgacagtatacccaagctcattcattaccaccagcacaattccgccggtatgatcactcgactgagacacccagtttctacaaaggctaacaaggtccccgattctgtgagtctcggaaatggcatttgggagcttaagcgcgaagaaattacactgctgaaagagctggggtctggacagttcggtgtggtgcagctgggcaagtggaaaggacagtacgacgtcgctgttaaaatgattaaggagggttccatgtcagaggacgaattcttccaagaagcgcaaaccatgatgaaactaagtcaccctaaattggtcaaattttatggagtctgtagtaaagagtaccccatttacattgtgaccgagtatataagtaatggatgcctcctgaactatctgagaagtcacggcaaggggctcgaaccatctcagctgttggaaatgtgctacgacgtttgcgaagggatggcgttccttgaaagtcatcagtttattcatcgcgacctggccgctcggaactgtctcgttgaccgcgatctctgtgttaaagtatctgattttgggatgaccaggtacgttctggatgaccagtacgtatcctctgtgggaacaaagtttcccgtcaaatggtctgcccctgaagtgtttcattattttaaatactcatcaaaaagcgatgtgtgggctttcgggatacttatgtgggaagtattttcccttggcaagcagccgtatgatctgtatgacaattcacaggtggtcttgaaagtctctcaggggcataggctgtatagaccccatctcgcgtctgataccatctaccaaattatgtacagctgctggcatgagctgcccgaaaagagaccgactttccagcaactccttagcagcatagagcccctgagagaaaaagataaacactag

SEQ ID NO: 216038 - DNA, 2028 bp, synthetic construct
  misc_feature 1..2028: note = Description of Artificial Sequence: Synthetic coding sequence
  source 1..2028: mol_type = other DNA
atggacaccaaatctatcctggaagaattgcttcttaaaagatcccagcagaaaaagaagatgagtccaaataactacaaagagagattgttcgtgctcaccaagaccaatttaagttattatgaatacgacaagatgaagcgcggatccaggaaagggtctatcgagatcaaaaagatcaggtgcgtggaaaaagtcaatctggaagaacaaacgcctgtcgagaggcaatatcctttccagatcgtctacaaggacggccttctttacgtctacgctagcaatgaagagtcccggtctcagtggctgaaggctttgcagaaagagatcagagggaacccacatctcctcgtaaagtatcattccggatttttcgtggacggcaagtttctttgttgtcagcagagttgcaaggccgctccgggttgcaccctatgggaggcctacgccaacctccacacagctgtcaatgaggaaaagcatagagtcccgacctttccagaccgcgtgcttaagattcccagagcggtacctgttctgaaaatggatgcaccatcatccagcaccactcttgcccagtacgacaacgagtcgaagaaaaattatggatctcagcctccatcctcctccaccagcctggcacagtacgattcaaacagcaaaaagatctacggaagtcaacccaactttaacatgcagtacatcccaagggaggacttccctgattggtggcaagtgcgcaagctgaagtcatctagttcttcggaggatgtcgcctcaagcaaccaaaaggaaagaaatgtcaatcatacaacctctaaaatcagctgggaattcccagagagcagcagcagtgaggaggaggaaaatctcgatgattacgactggttcgccggaaatattagccgctcacagtctgaacagctgctgaggcaaaaaggaaaggagggcgcatttatggtgcggaatagctcccaggtggggatgtacacagtgtccttgtttagtaaggctgtcaatgacaagaagggcactgttaaacactatcacgtccatacaaatgccgagaacaaattgtatctggcagaaaattactgttttgattccatccctaagctcatacattaccaccagcataacagcgctggcatgattactaggctgcgccatccggtgtcaaccaaggctaataaagtgcctgactctgtttctttgggaaacggaatatgggaacttaagcgcgaggagatcacattgctaaaagagctggggtctggacagtttggcgtcgttcagttgggcaagtggaagggccaatatgatgtggctgttaaaatgataaaagagggtagtatgagcgaagatgagttctttcaggaagcccagactatgatgaaactgtctcatcccaagcttgtgaaattctacggagtgtgctcgaaagagtatccaatatacattgttacagaatatatcagcaacgggtgcctgctgaactacctaagatctcatggaaaagggttagagccttcccagcttctcgaaatgtgttatgacgtgtgcgagggtatggcttttctggaatcccaccagtttattcacagagacctggcagccagaaactgcttggtagacagggacctatgcgtcaaagtgagtgattttgggatgaccagatatgtgttggacgaccaatacgtgagtagcgtaggtactaagtttcccgtgaaatggtccgcccctgaggtattccactatttcaagtattcttctaaaagtgatgtttgggctttcggcattttaatgtgggaggtgttcagcctgggaaaacagccttatgacctctatgataattcccaagtggtgctcaaggtgtctcagggccacaggctgtaccggcctcatcttgcctccgacaccatataccagattatgtattcttgttggcacgagctaccagagaaacgtcctacgttccagcagctgctgtccagtattgaaccccttcgagaaaaagataagcactag

SEQ ID NO: 216039 - DNA, 525 bp, synthetic construct
  misc_feature 1..525: note = Description of Artificial Sequence: Synthetic coding sequence
  source 1..525: mol_type = other DNA
atgaccgaacttgagtaccctaagggcagttcaattatgcctgccgctggcaccatgtatttgactacatcaactgggtacccatatacatatcataatggggtggcgtacttccacacgcctgaagttacatccgttccaccgccatggccaagccgctccgtgtgtagttcaccagtaatggtcgcacagcctatttatcagcagcccgcttatcactatcaggccactactcagtacttgcccggacagtggcagtggtccgtgccacaaccaagcgcatcatctgctccgtttctctatctccagcccagcgaagtaatctaccagccagttgagattgcacaggatggcggatgcgtcccccctcctctctcattaatggaaacttcagtgcccgaaccctatagtgatcacggagtccaagcaacttatcaccaggtttacgcgccatcagccatcaccatgcctgcccctgtgatgcagcctgaaccaatcaagactgtgtggtccatacattactag

SEQ ID NO: 216040 - DNA, 888 bp, synthetic construct
  misc_feature 1..888: note = Description of Artificial Sequence: Synthetic coding sequence
  source 1..888: mol_type = other DNA
atggaaacagagagcggtccccaaacttcaaaccagatgcagacagatagcctgtctccctcgcccaatcctgtaagccccgtcccactgaacaatcctacatctgccccacggtacggaaccgtgatcccaaatagaatatttgtgggaggtatagacttcaagaccaacgaaagcgacctcagaaaattcttcagccaatacgggtcggtcaaggaagtcaaaatagttaacgaccgggctggcgtctctaagggctatggatttgtgaccttcgaaacccaggaggacgcgcagaaaatcctccaagaggccgagaaattgaactataaagacaagaagttaaacattggaccggcaattcgaaagcagcaagtagggatccctcgaagtagcatcatgcccgctgccggtactatgtacctgactactagcaccggatacccatatacgtaccataacggagtcgcctattttcacacaccggaagtaacatccgttcctccgccatggccctcccgaagcgtgtgctcctcacctgtaatggttgcccagccaatctatcagcagcctgcctaccactatcaggctacaacacagtacctcccgggacagtggcagtggtccgttccccagccatctgcatcatcagctccattcctgtacctgcagccctctgaagttatctaccagcccgtggagatcgcacaggatggagggtgcgtccccccacctttatctttaatggagacatctgtgccagagccttatagtgatcacggggtgcaggcaacttaccatcaggtgtatgctccctccgcaattacaatgccagcacctgttatgcagccggagccaattaagaccgtgtggagcatccactattag

SEQ ID NO: 216041 - DNA, 852 bp, synthetic construct
  misc_feature 1..852: note = Description of Artificial Sequence: Synthetic coding sequence
  source 1..852: mol_type = other DNA
atgcagaccgattccctgtctcccagcccaaatcctgtttctcccgtgccactgaacaatccaacctctgccccacgatacggcacagttatcccgaatcgcatatttgtggggggtatcgactttaaaacaaacgagtcggacttgagaaaattcttttcccagtacggtagcgttaaggaggttaaaattgtcaacgatagagctggagtgagtaagggttatgggtttgtgactttcgagacgcaggaggacgcccagaaaatcctgcaggaggcagaaaaactaaattataaggacaaaaagctgaacatcggaccagcaattagaaaacagcaggtgggcattccccgaagctcgataatgcccgcagcagggacaatgtacctcactacgagcacaggttacccctacacttatcataatggcgtggcgtacttccatactcctgaggtgacctcagttccaccaccctggccatcacgatcagtatgcagctccccagtaatggttgcgcagcccatttaccaacagcccgcttatcattatcaggcaaccacgcagtacctgcctggccagtggcagtggtcagttccccaaccatccgcgtcaagcgctccattcctttatctccagccctctgaggtgatatatcagcctgtggaaatcgctcaggacggcggttgcgtgcctcctccgctgtctcttatggagacttcagtgccagagccctattcagatcatggcgtccaagccacgtatcaccaggtgtacgcaccttcagcaatcacaatgcccgcacccgtgatgcagcctgagcccattaaaaccgtgtggagcatacattactag

SEQ ID NO: 216042 - DNA, 852 bp, synthetic construct
  misc_feature 1..852: note = Description of Artificial Sequence: Synthetic coding sequence
  source 1..852: mol_type = other DNA
atgcagaccgactccttgtctccttctccgaaccccgtgagccctgtgcctctgaataaccccacatctgccccaaggtacggcactgtgattcctaacaggatttttgtggggggtatagattttaagaccaacgagagcgatctgcgaaagtttttttctcagtacggcagcgtgaaggaggtcaagatagttaatgatcgcgctggagtgagtaaaggctacgggttcgtgacctttgagacgcaggaggatgcacaaaaaattcttcaggaagctgagaaacttaattacaaagacaagaaattgaatatagggccagctatacgcaagcagcaagtggggatccccaggagtagtatcatgcccgcagcaggtactatgtacctgaccacgtcaacaggttacccgtatacctaccacaacggcgtagcttattttcatacacctgaggtgaccagtgtccccccaccgtggcccagcagaagtgtgtgctcctctccggtgatggtggcccagccaatctaccagcagcctgcctaccactaccaagccacaacccagtacctgcccggtcagtggcaatggtcagtgccccaaccttccgcatcaagtgcaccctttctatacctgcagccttctgaggttatctaccaaccagtcgagatcgcacaggacggaggttgcgtccccccaccgctgtcgctgatggagacctcagtgccagaaccgtactcagaccatggagtgcaggccacgtaccatcaggtctatgctcccagtgcgattactatgcccgctccagtcatgcaaccagaaccgatcaaaacagtgtggagcatccattattag

SEQ ID NO: 216043 - DNA, 414 bp, synthetic construct
  misc_feature 1..414: note = Description of Artificial Sequence: Synthetic coding sequence
  source 1..414: mol_type = other DNA
atgttaagcggtcgactagtattgggactggtgagtatggccggacgagtgtgcctctgccagggtagcgccggtagcggtgccatcgggccagttgaagccgcaattcgaactaagttagaagaggccctgagtcctgaagtgctggaactgcggaatgaatcgggcggtcacgctgtcccccctgggtctgaaacgcactttcgcgtagctgtggtaagctctagatttgaggggctgtctcctctccagcgccataggctggtgcatgccgctctcgctgaggaactgggaggccctgtccatgccctggctatccaggccagaacccccgctcagtggagagaaaatagccaactggacactagcccgccttgtctgggcggtaacaagaaaacccttggaacaccgtag

SEQ ID NO: 216044 - DNA, 414 bp, synthetic construct
  misc_feature 1..414: note = Description of Artificial Sequence: Synthetic coding sequence
  source 1..414: mol_type = other DNA
atgctctcaggaagactagtgctgggcctggtgtctatggcaggtcgggtttgcttgtgtcagggcagtgcagggagcggagctattggccctgtcgaggccgctatcagaaccaaactcgaggaggccctctcccctgaagtcctcgaactcagaaacgagagtggaggtcacgctgttcccccaggaagcgaaacccactttagagttgccgtggtaagttcacgatttgagggcctgagtcccctgcagcgccatcggctggtgcatgcggcactcgccgaagagctgggcggaccagtacacgcgctcgccatccaggccaggaccccagcccagtggagagagaattcccagttggacacatctcccccttgcctgggaggaaacaagaagaccttgggcacaccttag

SEQ ID NO: 216045 - DNA, 414 bp, synthetic construct
  misc_feature 1..414: note = Description of Artificial Sequence: Synthetic coding sequence
  source 1..414: mol_type = other DNA
atgctgagcggcaggttggttctcggtctcgtgtccatggctgggcgtgtgtgcctctgtcaggggtccgccggatcaggagctattggccctgtggaggccgctatacggaccaagctagaggaggctttgtctcctgaagtgttagagctgcgaaacgaaagcggtggccatgccgttcctccgggttcggagacacatttccgggtcgctgttgtgtcgtcgagatttgaaggcctttccccactccagagacatcggctcgtgcatgcagcgctcgccgaagaactgggagggcctgtccacgcacttgcgattcaggctcgcacacctgctcagtggcgggagaattctcaacttgatacctcgcccccttgtctggggggaaataaaaagacgctgggcactccctag

SEQ ID NO: 216046 - DNA, 459 bp, synthetic construct
  misc_feature 1..459: note = Description of Artificial Sequence: Synthetic coding sequence
  source 1..459: mol_type = other DNA
atggcttccgccaagtcgctcgataggtggaaggcaaggctgctcgaaggtggttccactgccctgacctacgccctggtgcgggcagaagtctccttccctgccgaggtcgctcctgtcagacagcaggggtccgtggctggggctagggctggtgtggtctcactgctcgggtgtaggagctcatggactgccgcaatggaactctctgcagagtaccttcgagaaaaactgcagcgggacttggaagccgaacatgttgaggtggaggacacaaccctgaaccgttgctcttgttccttccgcgtgctggtcgttagtgcaaaattcgagggcaagccacttctgcagaggcatcgcctggtcaatgcctgtctggccgaggagttgccgcacattcacgcttttgagcagaagacactcacacccgaccaatgggctcgcgagcgtcagaaatag

SEQ ID NO: 216047 - DNA, 306 bp, synthetic construct
  misc_feature 1..306: note = Description of Artificial Sequence: Synthetic coding sequence
  source 1..306: mol_type = other DNA
atggcagcctggtcccccgctgccgctgcaccactgctaagaggtatcaggggactcccacttcatcatcgcatgtttgcaacacagactgaaggcgagttgcgggtgacacagatccttaaggagaaattcccacgtgctactgcgattaaggtaaccgacatctcgggcaccaagcgcaggaaccagcgcgacgcgtggattgccgatatatacctgtgccctcagaccctgacaactccatggctccataggtgctgttgtttaagaccttggatgaacttcaccgacattatcttaccctag

SEQ ID NO: 216048 - DNA, 324 bp, synthetic construct
  misc_feature 1..324: note = Description of Artificial Sequence: Synthetic coding sequence
  source 1..324: mol_type = other DNA
atggcggcatggagtcctgcagccgctgcaccactcctgagagggatccggggtctgccgttgcatcaccgcatgttcgcgacccaaacagagggcgaacttagagtgacccagattttgaaagaaaaattcccacgggctacggctataaaggttactgatattagcggtggatgtggcgctatgtacgagatcaaaatcgagtccgaggagttcaaagagaaaagaacggtccaacaacaccagatggtgaatcaagcactcaaggaggagatcaaggagatgcatggccttcgcatatttacttctgtcccaaagagatag

SEQ ID NO: 216049 - DNA, 1200 bp, synthetic construct
  misc_feature 1..1200: note = Description of Artificial Sequence: Synthetic coding sequence
  source 1..1200: mol_type = other DNA
atggctcagagacagcctcatagcccaaaccaaaccctgatcagcataaccaacgacaccgaatccagctcttcagttgtcagtaatgacaatactaacaaggggtggagcggagacaatagtcctggtattgaagccttatgcgctatctacatcacatatgctgtgatcatctctgtgggaatcctgggaaacgccatcctgatcaaagtcttcttcaagactaagtctatgcagactgtgcccaatatttttatcaccagcctggccttcggggacctactgctgttgctgacttgtgtgcctgtggacgctactcactatttggccgaggggtggctgttcggtaggattggatgcaaggtactgtcctttattagattgaccagtgtgggcgtctccgtgttcaccctgaccatcttgtcggccgacagatataaggctgtggtgaaaccactcgaacggcagccatctaacgctatccttaaaacttgtgttaaggcgggatgtgtttggatagtttcaatgatatttgcccttccagaggccatattcagcaacgtgtacacatttagggaccccaacaaaaacatgaccttcgagagctgcacatcataccccgtgagtaagaagcttctccaggagatccacagcctgctgtgcttcctggtgttctatatcatcccgctgtcaatcattagcgtgtactacagtctgatagcaagaacactgtacaagtcaacactaaacatacccacagaggaacaaagccacgcccgaaagcagattgagtcaaggaaaagaatcgctcggactgtattagttctagtggccctgttcgccttatgctggcttccaaatcacctgctttatctgtaccacagctttacaagtcaaacatatgtagatcccagtgcaatgcacttcattttcacaatattctctagggtcttagcattttctaattcctgcgtaaatccttttgctctgtactggctgtccaagtcctttcagaagcactttaaggctcagctgttctgctgcaaagcagagcggcctgaaccacccgttgccgatacttctctcacaaccttagctgtgatgggaacagttcctggaaccggctccattcaaatgagcgagatttccgtcacctcttttactggctgtagtgtcaaacaggccgaggaccgtttctag

SEQ ID NO: 216050 - DNA, 303 bp, synthetic construct
  misc_feature 1..303: note = Description of Artificial Sequence: Synthetic coding sequence
  source 1..303: mol_type = other DNA
atgcgggctctcactcttcttgccctgctagctctggctgccctctgcatcgccggtcaggcaggcgcaaaacccagtggagccgagtcttcaaaaggagccgcttttgttagcaaacaggagggcagtgaggttgtcaaacgccctcgacgttatctataccagtggttgggcgctcccgtgccttatcccgaccccttagaaccccgtcgtgaggtttgtgagctgaatcctgattgtgacgagttagcagaccatattggtttccaagaagcttatagaaggttttacggcccagtatag

SEQ ID NO: 216051 - DNA, 957 bp, synthetic construct
  misc_feature 1..957: note = Description of Artificial Sequence: Synthetic coding sequence
  source 1..957: mol_type = other DNA
atggcagcccaagggtgtgctgcaagtagactacttcagctgctgctccagttgctgctgctgctgttgttactggcggctggtggcgcacgggctcggtggcggggtgagggtacgtccgctcacctacgagatatcttcttgggtagatgtgccgaatatcgcgctttactaagtcccgaacaaaggaacaaaaactgtactgcaatctgggaggctttcaaggtagcactggacaaagacccatgcagcgtactcccttctgactatgacttatttattaacctgtcacggcactccatacccagagacaagagcctgttttgggaaaatagccatctgctggtaaatagctttgccgataacacccggaggttcatgcccttgtccgacgttctgtacgggagagtcgctgacttcttatcttggtgtcgccagaagaacgactctggcctggactaccagtcatgtcctaccagcgaagattgcgaaaataacccggtggatagcttttggaaaagagcttccatacagtactctaaggacagtagtggcgtgatccacgttatgctgaatggatcagaacccaccggcgcttatcccattaagggatttttcgccgattatgaaattcccaatttgcaaaaagagaagatcactcggatcgagatctgggtgatgcacgagatcggcggaccaaatgtggaaagctgcggggaaggatctatgaaggttctggaaaaaagacttaaggatatgggctttcaatacagttgtatcaacgattatcggccagtgaaactgctgcagtgtgtagaccatagtacccatcccgattgcgctctaaagtccgcggcagccgctacccaaagaaaggcaccttctttatatacggagcagcgcgcaggcctcattatccctctgttcttggtgctggcttcaagaactcagctgtag

SEQ ID NO: 216052 - DNA, 543 bp, synthetic construct
  misc_feature 1..543: note = Description of Artificial Sequence: Synthetic coding sequence
  source 1..543: mol_type = other DNA
atggcctcgacgtcctatgattactgtcgggtgcccatggaagatggagacaagaggtgcaagttgttgctggggatcgggattctcgtgctactaatcattgttatcctgggcgtgcccctgatcatatttacgataaaagctaactctgaggcatgtcgagacgggctgagagccgttatggaatgcaggaatgttacacacctgctgcagcaggaactgacagaggctcagaagggattccaggatgtcgaggcccaggctgctacctgcaaccacactgtgatggctttgatggcctcactggatgccgaaaaagcacaggggcaaaagaaagtggaggagctcgaaggcgaaattactactctgaatcacaaactccaggacgctagtgcagaggtggaaaggctgagacgcgagaaccaggtattgtctgtgagaatagctgacaagaagtattatccttcttctcaagattcatcttcggcagctgcaccccaacttctgattgtgctgcttggattatcggcactacttcagtag

SEQ ID NO: 216053 - DNA, 651 bp, synthetic construct
  misc_feature 1..651: note = Description of Artificial Sequence: Synthetic coding sequence
  source 1..651: mol_type = other DNA
atggcttcaacgtcatacgattactgccgagtcccaatggaggatggcgacaagagatgcaagctgctgctgggaataggtattctggttcttttaattatcgtgatcctgggggttcccctaatcatattcacgattaaggctaatagcgaggcgtgccgggacggcctgagagcagttatggagtgtaggaatgtaacccatctcttgcaacaagagctgactgaagcccagaagggatttcaagatgtagaagctcaggcagccacctgtaaccacacagtgatggcgttgatggcctccctggatgctgagaaagcccagggccaaaaaaaagtcgaagagctggagggcgagatcactactttaaaccacaagttgcaggatgcttcggctgaagtggagaggctgcgacgagagaatcaggttctgtcagtgcgcatcgccgataaaaaatattacccttcctcacacttcccttcaacaccccagtcaagactgcaaactcagctcacgaccctgaaaatagaaatggacgaagccaaggctcagggcactcagatgggggctgagaacggagcacttactggagcgctcgggtgtaagggagtaggtagagatagaagcggtagaagtttgggggagtcatag

SEQ ID NO: 216054 - DNA, 1179 bp, synthetic construct
  misc_feature 1..1179: note = Description of Artificial Sequence: Synthetic coding sequence
  source 1..1179: mol_type = other DNA
atggtgctcctttctattttgcggatcctctttctttgcgagctggtgctgtttatggagcaccgcgcacagatggctgagggtgggcagtcctcgattgcactgttagcggaagcccctaccctgccactgattgaggaactgttagaagaatcaccaggcgaacagcccagaaaacctcggctattgggccacagtttgcgatatatgctggagctttaccggcgaagtgctgactcacatgggcaccctcgcgagaatcgtacaatcggggcaacaatggtgagattggtaaagcctctaaccaacgtagcacgccctcaccgcggaacttggcatatccagattctaggattcccactcagacccaaccgcggactttaccagctagttcgggcaaccgtggtgtatcggcaccacctgcagttaacgcgatttaatttatcttgccatgttgagccttgggtacaaaagaatccaaccaatcactttccttcctctgagggggattcatccaaacctagcttgatgagtaatgcttggaaggagatggatattacccagctagtgcagcagcgcttctggaacaataaaggtcatagaatcctgcggctgagattcatgtgccaacagcaaaaagactctgggggtttagagttatggcacgggaccagcagcttggatatcgctttccttctgttatattttaatgacacccacaaaagtattcggaaagctaaattcctacccagaggtatggaagagtttatggaaagagaatccctgctcagaagaactcgccaggcagatgggattagcgccgaagtaacagctagtagctctaaacatagcggacccgagaacaatcaatgctccctgcacccttttcagatttccttcaggcaactgggttgggatcactggatcattgccccacccttttacacccccaactactgcaaggggacgtgcctgcgggtgctacgcgatgggctgaattccccaaaccacgctattatacagaacttaattaaccaactggtggaccagtctgtacctcgcccttcctgcgtgccctataagtatgttccaatatctgtgctgatgatagaagccaacggctccatattgtataaggagtatgaaggcatgattgccgaatcatgtacgtgccggtag

SEQ ID NO: 216055 - DNA, 1419 bp, synthetic construct
  misc_feature 1..1419: note = Description of Artificial Sequence: Synthetic coding sequence
  source 1..1419: mol_type = other DNA
atggccggtgcgagccggttgctttttctgtggttgggctgtttctgcgtctcccttgctcagggggaacgccctaagccgccattcccagaactaaggaaggccgtgcccggtgaccgtacagctggcggagggcctgacagtgagctgcagccccaggacaaagtttccgagcatatgctgaggctctatgatagatattctactgtacaggctgcccgtacgccagggagtcttgaaggtgggtcccagccttggagaccaaggctcctccgagagggtaacactgtaagatccttccgggcagccgcagccgagaccctagaaagaaaaggcctctatatctttaacctgaccagtctgacaaagtcggagaacattctttcggcaacactgtacttttgtatcggcgagctgggcaatatctctctgagttgccccgtcagcgggggatgtagccaccacgcgcagcgtaaacacatccaaatagatctgagcgcatggacacttaaattctctcgcaaccagagccagcttcttggtcacctttccgtggacatggccaaatcgcacagagatatcatgtcctggctgagcaaagatataacgcagctgttaagaaaggccaaagagaatgaggagtttctgatcggttttaacatcacctccaagggtaggcagcttcctaagcgccgtcttcctttcccagagccatacattttggtctatgcaaacgatgccgcaatctcagagcctgaaagcgtcgttagcagtctccagggacatcgcaacttcccaaccggtacagtgcctaagtgggattcacatatcagggcagcccttagtatcgaacggaggaaaaagagaagcacaggagtactgttgcccctgcagaacaacgagttgcctggtgccgagtatcagtataagaaggatgaagtgtgggaagaacgcaaaccttataagaccctgcaggcacaagccccagagaaaagcaaaaataaaaaaaaacagcgcaaagggcctcacaggaaatctcagacattacagttcgatgagcagactctgaaaaaggccaggcgaaaacaatggatcgagcctaggaactgtgcgagaaggtacttaaaggtagattttgcagatataggctggtctgagtggattatttccccgaaatctttcgacgcctattattgtagcggcgcttgtcagtttcccatgcctaagtctcttaaaccgtccaaccatgcgaccatccagagcatcgtgcgcgctgttggagtggtcccagggattcccgaaccatgttgtgtaccggaaaagatgagttcgctctcgatactgtttttcgacgaaaataaaaacgtggtcctcaaagtgtatcccaacatgactgtggagagctgcgcatgtagatag

SEQ ID NO: 216056 - DNA, 213 bp, synthetic construct
  misc_feature 1..213: note = Description of Artificial Sequence: Synthetic coding sequence
  source 1..213: mol_type = other DNA
tgcttcttctattatctgaaatctttgaaaccctctaaccatgccacaattcagtcaattgttcgcgctgtgggagtggttcctggcatccctgaaccatgttgcgtacccgaaaaaatgtcttctctctctatactcttttttgacgagaataaaaatgtcgtcctcaaggtatacccgaatatgacagtagaatcttgtgcatgtcgatag

SEQ ID NO: 216057 - DNA, 1227 bp, synthetic construct
  misc_feature 1..1227: note = Description of Artificial Sequence: Synthetic coding sequence
  source 1..1227: mol_type = other DNA
atgatacccggtaaccggatgctgatggtggtgctgctgtgtcaggtgttgctcggcggagcgtcacatgcctcgctgatcccagagacgggcaagaagaaggtggcagagatccaggggcacgcaggcggaaggcgctcaggtcaaagccatgagttgctgcgcgatttcgaagcaacattgctgcagatgtttgggttacgacgtcgcccacagcccagcaaatccgcagtgatccctgattacatgagagacctctacaggctccaaagcggcgaagaggaggaggagcagatccatagcactgggttggaatatccggagcgccctgcgtcacgggcaaacactgtgcgtagtttccatcatgaggagcatctagagaatatccccggtacctcagaaaactctgctttcaggtttctttttaatctgtcgtcaattcccgagaatgaggtaatatcctccgccgaactcaggcttttccgtgagcaagtggatcaggggcctgactgggagaggggattccatcggatcaacatatatgaagtcatgaagccacccgctgaggtcgttcccggacaccttatcactaggttactggacacgcgtctggtgcatcacaacgtgacccggtgggaaacattcgatgtttcacccgctgtcctgcgctggacccgggaaaaacagcccaattacggtctcgcaattgaggtgacacacctgcatcagacacgtacacatcagggccagcatgtaagaatttctcggtccttaccacaggggtccggcaactgggcccagttgaggcccctcctcgtgaccttcgggcacgacggacggggtcatgcgctcactaggcgcagaagggcaaagaggagccccaagcaccactctcagcgcgctcggaagaaaaataagaattgtcgcaggcactcactgtatgtggacttcagcgacgtgggctggaacgattggatcgtagcccctccgggttaccaggccttttactgccatggcgactgtcccttccctctggccgaccaccttaattccactaatcatgcaattgttcaaacattagtgaatagtgtcaacagttctatccctaaagcgtgctgcgtcccaacagaactgtcagccatctctatgctgtatcttgacgagtatgataaagtggtgctcaagaattaccaggaaatggtggtcgagggatgtggctgccggtag

SEQ ID NO: 216058 - DNA, 1227 bp, synthetic construct
  misc_feature 1..1227: note = Description of Artificial Sequence: Synthetic coding sequence
  source 1..1227: mol_type = other DNA
atgatccccggtaatcggatgctgatggttgttctgttatgtcaagtgctactagggggagcctcacatgcttccttaatacccgaaaccgggaaaaagaaggtggctgaaatccagggccatgccggtgggaggcggtccggacaaagtcatgagctgttaagagactttgaagcaaccctccttcaaatgtttggattaaggagaagaccacagcctagcaaaagtgcagtgattccagattacatgcgcgacttgtataggcttcaaagtggggaggaagaggaggagcaaattcactcaactggactggagtatccagaacggccagcgtcaagagctaataccgtcagatcattccatcacgaagagcacttggagaatatccctggcaccagcgaaaattctgcctttcgattcttattcaatttgtcctccattccggagaatgaggtgatttcttctgccgagctgcgactgttccgagaacaggtcgatcaggggccagattgggaaagaggcttccaccggatcaatatttatgaggtcatgaagcccccagccgaagtggtaccagggcacttgataacgcggctgctcgacactaggctggtgcaccataacgtcacccgttgggaaacgttcgatgtgtcgcccgcagtccttcggtggaccagggaaaagcaaccgaactacggtcttgcaatagaagtgacacacttacaccagaccagaactcatcagggtcaacacgtgagaatcagtcggagcctgcctcaggggagcggaaactgggcccaactgcgccctctgctcgtgacctttggtcacgacggtagagggcacgcgttaacaaggcgaagacgagccaaacggtcccccaaacaccacagccaacgggcaaggaaaaagaataaaaattgtagaaggcattcactttatgtggacttttctgacgtgggctggaacgactggattgtggctccccctggttatcaggccttttattgccacggtgattgtccattccccctcgccgaccatctgaattctacgaaccacgccatcgtgcagaccctggtgaattctgtgaattcatcgattcctaaagcatgttgtgttcctactgagttgtcggccatcagtatgctgtacctcgacgaatacgataaagtcgtcctaaaaaattaccaggagatggtggtggaaggttgcggctgccgatag

SEQ ID NO: 216059 - DNA, 1227 bp, synthetic construct
  misc_feature 1..1227: note = Description of Artificial Sequence: Synthetic coding sequence
  source 1..1227: mol_type = other DNA
atgatccccggtaaccgcatgctaatggtcgtcctcctctgtcaagtgctgttgggcggagcctcccatgcaagcttaattcccgagactggcaaaaagaaggtcgcagagattcaggggcatgccggagggaggcgatcggggcaaagccatgagctcctcagagactttgaagcgacattgctgcagatgtttggcctgcgtagacgcccacagccatcaaagtcggcagtcattccggattatatgcgcgacctataccggctccagtccggggaagaggaggaagagcagattcacagcacgggactggagtatcctgagagaccagcctcccgcgctaacaccgttcgatcctttcaccacgaggagcatctcgaaaatatcccaggcacgtccgaaaactcggcgtttcgttttctgtttaatctttcttccatacctgagaacgaagtgatctcatcagccgaactcagactgtttcgagagcaggtcgaccagggaccagattgggaaagaggtttccatcgtatcaatatctacgaggtgatgaagcctcctgctgaagtggttcctggccacctcataacacggttactcgacactcgccttgtccatcacaacgtgactcgatgggaaacattcgatgtttctccagcagttctccgctggacaagggagaaacaacccaattacggactggcgattgaagtgacccacctgcaccaaactcgcacccaccaagggcagcatgttaggatttcaaggtcattgccacagggttctggcaactgggctcagctgcgccctcttctggtgacatttggtcacgatggtcgcggtcacgcgctcactaggagacggagagccaagcgatcaccaaagcatcatagtcagcgtgcccgaaaaaaaaataagaattgtcgccgacactccctgtacgtcgatttcagcgatgtaggctggaacgactggatcgtagcaccgcctggataccaggcattctactgccatggcgactgtccattccctctagccgatcacctcaatagcacaaatcacgctattgtgcaaactctagtcaactccgtaaactcctctataccgaaagcttgctgcgtgcctactgagctatcagccatcagtatgctatatctggacgagtatgacaaagtcgtccttaagaactaccaggagatggttgttgaggggtgcggttgcagatag

SEQ ID NO: 216060 - DNA, 1227 bp, synthetic construct
  misc_feature 1..1227: note = Description of Artificial Sequence: Synthetic coding sequence
  source 1..1227: mol_type = other DNA
atgattccagggaatagaatgctgatggtcgtgctgctctgccaggtgctcctgggcggtgcttctcatgcctcactgatccccgagacaggcaaaaaaaaagtggctgagatacagggtcacgctggcggacgccgatcgggccaatctcacgagcttctgagggacttcgaggctactttactgcagatgtttggactgcgcagaagacctcagccttcaaagtctgctgtcatccccgattacatgagagacctgtacagacttcagagtggggaggaagaagaagaacagatacactcaactggtctggagtacccggagagacccgcaagccgcgctaatacagttaggtcctttcatcacgaggaacatcttgagaacatccccggaacatccgagaactccgcctttcgcttcctgttcaacctgtcctctatccctgagaacgaggtaatcagttccgcagaacttcggttgtttagggagcaagtagatcaggggcctgactgggagcgcggtttccatcggatcaatatttatgaagtgatgaaaccaccagcagaggtcgtgccgggacacctgataacgaggctgctagatacccggctggtgcatcacaatgtcacccgctgggaaacttttgatgtgtctccagccgttttgcggtggacccgagagaaacagcctaattatggcttggccattgaggtgacacatcttcaccagactcgcacacatcaaggacaacatgtccgcattagccgctccctaccccagggcagcgggaactgggcacagctgcggccactgctcgttactttcggacacgatgggcgtggccatgccttgacccggagaagacgagctaagcggagtcctaaacatcactcccagcgcgctcggaaaaagaacaaaaactgtagacggcactcactgtatgtagacttttctgatgttggttggaatgactggatcgtcgcgcctcctggataccaagcgttctattgccatggggattgtccctttcctttggcggatcatctgaacagcaccaatcacgcgatagtccagaccttagtgaattccgtcaattcaagtattcctaaggcctgctgcgttcccacagagctctcagccataagcatgctgtatctggatgaatatgacaaggtagtcctcaaaaactaccaggagatggtggtcgaaggttgtggctgccggtag

SEQ ID NO: 216061 - DNA, 333 bp, synthetic construct
  misc_feature 1..333: note = Description of Artificial Sequence: Synthetic coding sequence
  source 1..333: mol_type = other DNA
atgatccctgggaatcgtatgctgatggtggtgttactttgtcaggtgctcctgggtggagcgtcccacgcatcactcatcccagagactggcaagaaaaaagtcgcagaaatccagggtcatgccggaggcagacgtagcgggcaatcccacgagctactcagggacttcgaggcaacactgctccagatgttcggtttacgcaggaggccacaaccctccaagagcgccgttatccccgattacatgagagacctgtacagacttcagtccggcgaggaagaagaagagcaaatccacagcacaggcctggagtatcccgaacgcccttag

SEQ ID NO: 216062 - DNA, 1365 bp, synthetic construct
  misc_feature 1..1365: note = Description of Artificial Sequence: Synthetic coding sequence
  source 1..1365: mol_type = other DNA
atgcacctgacggtctttctgcttaaaggaattgtgggatttctttggagttgttgggtcctagtcggttatgccaaaggcggtctgggagataaccatgtgcattcctccttcatctatcggcgactgcgaaaccatgagaggagggagatccagcgcgaaattcttagcatactggggttaccgcacaggcctcgtcctttttcacctggcaagcaggcctccagcgccccactgttcatgctggatctgtataacgctatgacaaatgaagagaacccagaggaatccgaatactctgttcgggcttctctggctgaagaaactaggggagccagaaaaggatacccagccagtcctaacggctacccaaggaggattcagctgtcaagaaccactcccctaactacccagtcccctcccctagcctccttacatgacaccaatttcctgaacgacgcagacatggtcatgagctttgttaatcttgttgaaagagataaggactttagccaccagcggagacattacaaagagttcaggttcgacctgactcagatcccgcatggggaggctgtcaccgccgctgagtttagaatctacaaagaccgctccaataacaggttcgagaatgaaaccatcaagatcagtatttaccagatcataaaggaatatactaatagagatgccgacctgttcctgctagatacacgtaaagctcaggccttggatgtgggctggctggtgttcgatataacagtcacgagcaaccattgggtaataaatccacagaataatcttggactgcaactgtgcgcagagacgggagatggcaggtctataaatgtcaagagtgcgggactggtagggcgacaagggccacagagcaagcaaccttttatggtagcattctttaaggccagcgaagttttgcttcgctccgtacgtgcggctaataaacgcaaaaaccaaaataggaataagagctcttctcatcaggattcatctcggatgagcagtgtgggagactacaacaccagtgagcagaaacaggcgtgcaagaaacacgagctttacgtgagttttagagaccttggctggcaggactggatcatcgctccagaaggctacgctgctttctattgcgatggcgaatgttcattcccattaaacgcccacatgaacgctacaaaccacgctatagtacagaccttagtccatttaatgtttcccgaccacgtgcctaagccctgttgtgccccaacgaagctgaatgctatttctgtcctgtacttcgatgatagttccaacgtgattctgaagaagtatcgtaatatggtggtacggtcctgcggctgtcactag

SEQ ID NO: 216063 - DNA, 1254 bp, synthetic construct
  misc_feature 1..1254: note = Description of Artificial Sequence: Synthetic coding sequence
  source 1..1254: mol_type = other DNA
atgcatttgacagtgttcctacttaaaggcattgttggattcctgtggtcctgctgggtgcttgttgggtacgccaagggcggacttggcgacaatcatgtgcacagttctttcatatacagacgcttgagaaatcacgaaaggcgggaaattcagcgggagattttgagtatcctgggactacctcatcgcccacgcccatttagtcccggaaagcaagcatcttctgctcccctgttcatgctggacctgtataacgcgatgaccaacgaggagaacccggaggagagcgaatacagcgtgcgagcatcactcgccgaggagactcggggagcccgaaagggctatcccgctagtcctaatgggtaccctaggcggatacagctctccagaaccacccctcttacaacccaatcgccccctctagcttcactacatgacactaattttctgaatgatgctgatatggtgatgagcttcgttaacctggtcgaacgggataaagatttcagccatcagcggcgacattataaggagttccggtttgacctcacacagattccacacggggaggccgtcaccgccgctgagtttaggatttacaaggaccgatcgaataatagattcgagaatgaaaccataaagatctccatctaccagatcattaaagagtatactaatagagacgccgaccttttcctgctggacactcgcaaggcacaagccctggacgtgggctggctggtctttgatattaccgtgacttccaatcattgggtgatcaatccccaaaacaatcttgggctgcagttgtgtgcagagacaggagatggccgaagcatcaatgtgaagagtgccggactcgtgggtcgccaagggccacaaagcaaacagccttttatggttgcattctttaaggcctctgaggttctgctccggtctgttcgggcagctaataaacgtaagaaccagaaccgtaacaagagttcatcccatcaggactcctctcggatgagctctgtgggagattacaacacgtccgagcagaagcaggcgtgcaagaagcacgaattatatgtctcctttcgggatttgggatggcaggttcatctgatgttccctgaccacgtgccaaagccatgctgcgcccctaccaaactgaacgccatctccgtgctttactttgatgattcgagtaacgtgatactgaagaagtaccgcaacatggttgttagaagctgtgggtgtcactag

SEQ ID NO: 216064 - DNA, 1542 bp, synthetic construct
  misc_feature 1..1542: note = Description of Artificial Sequence: Synthetic coding sequence
  source 1..1542: mol_type = other DNA
atgccaggactgggtcggagagcccagtggttgtgctggtggtggggactgctgtgtagttgctgcgggccacctcccttacgccctccgctccccgcagccgcagccgcagcagccggtgggcagctgctgggcgacggcggtagccccggacgtacagagcagccccctccctctccgcagtcctcaagcgggttcctttatcgcaggctcaaaactcaagagaaaagagagatgcagaaggaaatcctctctgtgctgggtttacctcatagacctcgacctttgcacgggctgcagcaaccacaaccccctgcactgcgtcaacaggaagaacagcagcagcagcagcagctgcctcgtggggagccacccccagggagactgaaatcggcaccgctttttatgctagacctatacaacgcccttagcgccgacaatgacgaggacggagcttccgaaggcgagcgtcagcagtcgtggccacacgaggcggctagctctagccagagacgacaaccaccgcctggtgctgcgcatcccctgaaccgaaaatctttgctggcacctggaagtgggagtggaggggcttctccattaacgtctgctcaggattctgcttttctgaacgacgcggatatggttatgagctttgtgaacctggtcgagtacgacaaggaattttccccgagacagaggcaccataaggagtttaaattcaatctttcccagatcccggagggcgaagttgtgacagccgctgaattcaggatctataaggactgcgtgatgggcagcttcaaaaatcagacattccttatttcaatctatcaggttttgcaggagcaccagcatcgtgattccgatcttttccttctggacacaagagttgtttgggcatctgaagagggctggctcgagtttgatattactgcaacatccaatctctgggtggtgactccccagcataatatgggtcttcagttatctgtagtgacaagagatggcgtacatgtgcatcccagagccgctggcttggtgggtcgagatggcccttatgataaacagccctttatggttgccttctttaaggtgtcagaggtgcacgtaaggaccactcggagcgcctcctctcgcagacgtcagcagtcccgtaaccgtagcacccagtctcaggacgtggctcgggtctccagtgcttccgactacaactcttcagagctgaaaacagcttgtcgtaagcatgagctgtatgtttcattccaggatttgggttggcaagactggattatcgctcctaagggctatgccgctaactattgtgatggtgaatgtagtttccctttaaatgcccacatgaatgccaccaaccatgcgatcgtgcagacactggtgcacttaatgaatccagagtatgtgcccaaaccatgttgcgcccctaccaaattgaacgcaatctcagtgctgtactttgatgataactctaacgtgatcctcaagaaatatcggaacatggtagtccgggcttgcggctgtcattag

SEQ ID NO: 216065 - DNA, 1308 bp, synthetic construct
  misc_feature 1..1308: note = Description of Artificial Sequence: Synthetic coding sequence
  source 1..1308: mol_type = other DNA
atgcagaaggagatcctgtcggtactgggtttacctcataggcctcgtcccttgcatggcctccaacagccccaaccacccgctttgcgccagcaggaggagcagcagcaacagcagcagctcccgaggggagagccccctcctggtcgtctgaaatccgcgcctctgttcatgctggatctctataatgcactcagcgctgataacgatgaggatggggcttctgaaggggagcgccagcagtcctggccccacgaggctgcatcctcatcacaaaggagacagccgcctcctggcgcagcccatcccctcaatagaaaatccctcctggcccctggaagtggctcagggggagcaagcccccttacaagcgcccaggattccgccttcctgaacgacgctgacatggtcatgtcattcgtgaacctcgtggagtatgataaggagttctcccccagacaaagacaccacaaggagttcaaattcaatctgagtcagatcccagagggggaggtggtgacagccgctgagtttagaatatataaagactgcgtgatgggcagcttcaagaatcagacatttctcattagcatataccaggtgctgcaggaacaccaacacagggatagtgatcttttcttgctcgatactagagttgtgtgggcctcagaggaaggctggcttgagttcgatataaccgccacctcaaacctgtgggtggtgactccccagcacaacatgggcctgcagctctccgtggtgacacgcgatggtgtccacgttcatcccagagccgctggcctggtcggacgtgatggcccttacgataaacagcctttcatggtggctttttttaaggtgagcgaggttcatgtgagaacaacccggtctgcttctagcagacgtaggcagcagagtagaaatcgtagcacccagagccaggatgtcgccagagtaagctctgcctccgactacaactcctctgaattgaaaaccgcatgtaggaaacacgagctgtacgtgagttttcaggatcttggttggcaggactggatcatcgcacccaaaggttatgcggctaactactgtgatggcgagtgcagtttcccactcaatgctcatatgaatgctactaatcatgccatcgtccagactcttgttcacctcatgaatccagagtacgtgccgaagccttgttgtgctcccaccaagcttaatgcaattagcgtcctctatttcgatgacaatagtaacgttatcctcaagaaataccgaaacatggtggtgagagcttgcggctgccactag

SEQ ID NO: 216066 - DNA, 1431 bp, synthetic construct
  misc_feature 1..1431: note = Description of Artificial Sequence: Synthetic coding sequence
  source 1..1431: mol_type = other DNA
gccgcaggaggccaactgctgggagacggaggcagcccgggtcgcactgagcagcctcctccgtcacctcagagcagctctggattcctctatcgtcgccttaaaacacaggaaaaacgggaaatgcagaaagaaatcctaagcgtgctgggtctcccgcatcgcccacgccctctccacggactacagcagccacagccacctgcactgcgccagcaagaggaacagcagcagcaacagcagctccccaggggcgagccccctcccggacgtttgaaatccgccccattatttatgctggacctatataatgctctgtcggcagacaacgacgaagacggcgctagcgaaggcgagcgccagcagtcctggccccatgaagccgcatcgagctctcagagacgtcaacctcccccaggcgctgcgcacccactcaacagaaaatctctgttggctcccggatcagggagtggaggcgcttcgccgcttactagtgcccaggattccgcatttctgaacgacgctgacatggtcatgagtttcgtcaatctggtagaatatgataaagaatttagtcctaggcaaagacaccacaaagaatttaagtttaacctttcccagataccggaaggagaggtagtcacagctgccgaattccggatttacaaagattgtgtgatggggtcatttaagaatcagacttttctgataagcatatatcaggtccttcaagagcatcagcacagggactcggaccttttcctcttggacacacgggtggtgtgggcttctgaagaaggatggctggaatttgatattactgcaacgagtaatctgtgggttgtgaccccgcagcataacatgggtctacagctgtcggtggtgacccgggatggagtgcacgtgcacccaagggctgctggcttggtcggccgtgatggtccctacgacaagcagcctttcatggtcgcttttttcaaagtgtccgaagtgcacgtaaggacaaccagatctgcaagtagccgaagacggcagcagagccgaaacagatcaacacagtcccaagatgtggccagagtatcctccgcctctgattataacagcagcgaactgaagactgcttgtaggaaacacgagttatacgttagcttccaggatctcggatggcaggattggatcatcgcccctaagggctacgcagctaactactgtgatggcgagtgcagcttccctctgaacgcccatatgaacgcgaccaaccatgccattgtacagacactggtgcatctaatgaatcccgaatatgttcccaaaccatgttgtgcgcctactaagctgaatgcaatctctgtgttatactttgatgacaattcgaatgtcattctcaagaagtatcggaacatggttgtgagggcctgtgggtgccattag

SEQ ID NO: 216067 - DNA, 2505 bp, synthetic construct
  misc_feature 1..2505: note = Description of Artificial Sequence: Synthetic coding sequence
  source 1..2505: mol_type = other DNA
atggaggaaaagacccagatcaagacctttctgggaagtaagctgccaaagtatggtacaaaatcagtcagatctactctacagccaatgcccaacggaaccccagtgaacctgttgggaacttctaagaactccaacgtgaagtcctatatcaagaataacgggtcagattgcccaagctcccattctttcaactggcggaaagccaacaaataccagctttgtgcacaaggtgtcgaggagcctaataacacacagaattcacatgacaagataatagatcccgaaaagcgcgttcccactcagggaatgttcgacaagaatggaattaagggtggtctgaagtccgtgagtctatttacctctaaacttgccaagccgagtaccatgttcgtgagcagcaccgaggaactgaaccagaaaagtttctcaggtccatctaacttaggaaagttcaccaaaggtaccctccttggacgcacttcatattcatcaatcaataccccgaaaagtcaactgaatgggttctatggaaatcggtccgccggatccatgcaacgtcctcgggcaaacagctgtgctactcggtcttcttccggtgaaagtttagcacagagtcccgattccagcaagtccatcaactgtgaaaaaatggtgcgctcacagtctttcagtcattccattcaaaatagctttcttccgccatccagcattactcggtcacacagtttcaaccgggctgtggatctgaccaaaccttaccagaaccagcagctatctatccgcgtccctcttcggtcgagcatgttgacacgcaatagtcgacagcccgaagtgctgaacgggaatgagcaccttggatacggcttcaaccgcccttatgctgccggtgggaagaagttggcactgcctaacgggcctggcgtcacctcaaccctgggctacagaatggtccacccatccttgcttaaatcttctcggagtcccttctctggaaccatgacagttgacgggaacaaaaattctcctgccgacacctgcgtggaggaggacgcgaccgtgttggccaaggatagagcggcaaataaggaccaggaactgattgagaacgagagttaccgcacgaagaacaatcagacaatgaaacacgacgctaaaatgaggtatctctctgacgatgttgacgacatcagcttgagtagcttaagctcctccgataagaatgaccttagcgaggatttttctgatgactttatagatatcgaggactcgaacaggactcggatcactccagaggagatgtccctgaaagaagagaagcacgagaatggtccccctcaagacatgtttgattccccaaaggagaatgagaaggctttctcgaagacagacgagtggatcgacataagtgtgagcgataggagcgagtgcaccaaacacaccagtggcaataatcttgtcagtcctgacaccgattatcgcgcagggtcttcctttgaactatctccatctgactcatctgacggcacctacatgtgggacgaggaaggactcgagccgataggaaacgttcatcccgtcgggagttacgagtccagcgagatgaactcaatcgatatcctgaacaacctggagagttgcgacctggaagatgacgatctgatgctggatgtcgacctccctgaagacgcacccttggaaaacgtggagtgcgataatatgaaccggtttgacaggcctgacagaaatgttcgccagccccaggagggattttggaagagacccccacaacgatggtctggtcaggaacactatcatctttcacacccagaccattaccaccatcacgggaagagtgatctgagcaggggatcaccttacagggagtcacccctggggcactttgaatcatacggcggtatgcccttcttccaggctcagaagatgttcgtggatgttcctgaaaataccgtaattctggatgagatgacgctgcgccacatggtccaagactgcactgcagtgaagacccagctgctcaagctgaagcgcttgctccatcagcacgatggtagcggttctctccacgacatacagttgtccctgccttcgagccccgagcctgaagacggggataaagtgtacaaaaatgaggatctcctcaatgagattaagcagcttaaggacgaaatcaagaagaaagacgagaaaatacaactcttggagctccagctggccactcaacacatctgtcaccagaaatgcaaagaggagaagtgcacatatgccgacaagtacacacagaccccttggcgccgaatcccaggaggatatagcgccccttccttctctccctggcagggctcatttcaaggtattccgaggactgttccaccccacagaaggcagacctcctctacaacagctttccagcagccttcccaaactcatcgatctcaccccggaaaaacaaacaaggctacaacatatcggggtcctcagtag

SEQ ID NO: 216068 - DNA, 1599 bp, synthetic construct
  misc_feature 1..1599: note = Description of Artificial Sequence: Synthetic coding sequence
  source 1..1599: mol_type = other DNA
atgcctcagctgtatatctatatccgcctcctgggtgcctacctgttcatcatcagcagagtccagggccagaacctggacagtatgctgcacggcacagggatgaaatctgattctgaccagaagaagtccgaaaatggcgtgactctggctccagaagataccctaccatttctcaagtgttactgcagtggacactgtcctgatgatgcgatcaacaatacttgtattactaatggtcactgtttcgccatcatagaggaagacgatcagggagaaacaactctagcaagtggctgtatgaagtacgaaggaagcgattttcagtgtaaggattccccaaaagcccaactccgccgaacaatcgagtgctgcagaactaacctttgtaaccaatatttgcagccgactctgccaccagtcgtcatcggtcccttttttgatgggtccatccgatggcttgtgctcctgatttctatggcagtctgcataatcgccatgattatattcagttcatgcttctgctataaacactactgcaagagtatctcctcgaggcgcagatacaatcgtgatttggaacaagatgaggcattcatacccgtgggtgaaagtttaaaggatctgattgatcaatcacaaagcagcggtagcgggtctggcctgccattacttgtgcagcgcacaatagcaaagcaaatccaaatggtgaggcaggtgggcaagggacggtatggcgaggtatggatggggaaatggcgcggtgaaaaggtggcagttaaagtgttctttactaccgaggaggcgtcatggtttcgggaaaccgaaatttatcaaacagttcttatgagacacgaaaatatcctcgggtttatcgcagctgatattaagggcacagggtcatggactcaactgtatttgattaccgattatcatgagaatggaagcctctatgactttttaaaatgcgcaaccctggacacgagagctctgttgaagctggcgtacagcgcagcatgcggtctctgtcacctgcataccgaaatttatggtactcagggaaagcctgctatcgcacatcgcgatctcaaatcgaagaacattttgattaagaaaaatgggtcctgctgtattgccgatctgggtctggctgtcaaattcaacagcgacaccaacgaggtggatgtaccgctgaacacgcgggtgggaacaaaaagatatatggcccctgaggtcctcgatgaatcgctgaacaagaaccattttcagccctatatcatggctgatatctactccttcggactgatcatttgggagatggcgagacggtgtattacaggcggtatcgtggaggagtaccaattgccgtattataacatggtgccctcagatccttcctacgaagacatgagagaggtagtgtgcgtgaagagactgaggcctattgtgtctaaccgctggaacagcgacgagtgcctgagagccgtgctgaagttgatgtccgagtgctgggcccacaacccagcaagcagacttacagcattacggataaaaaagaccctggccaagatggtggagtctcaagatgttaaaatctag

SEQ ID NO: 216069 - DNA, 3117 bp, synthetic construct
  misc_feature 1..3117: note = Description of Artificial Sequence: Synthetic coding sequence
  source 1..3117: mol_type = other DNA
atgacgagttcactccagcgcccttggcgtgtcccttggctgccctggaccattctgttggtctcaaccgccgctgcatctcagaaccaggaaagactctgcgcgtttaaagatccctaccaacaagatttggggataggcgagtcgcggatctcccacgaaaatgggactatcctgtgttctaagggatctacctgttacggcctttgggagaagtccaaaggagacatcaaccttgtgaagcaaggttgctggtcccacataggtgaccctcaagaatgccactatgaggagtgtgttgtcaccactacccccccttcaatccagaatggaacttacaggttctgttgctgctccactgacctttgtaatgttaattttactgaaaactttccccctcctgacacaactccgcttagtcctccccacagcttcaaccgagacgagacgatcattatcgctcttgcttccgtaagtgtcctcgccgtcttgattgtcgccctgtgcttcggctacaggatgctgactggggatcgcaagcagggtttacattcaatgaacatgatggaggctgctgcttccgaaccgtccctcgatctggataatctgaagctactggagttgatcggaagagggaggtacggcgctgtatacaagggcagcctggatgaaagacctgtcgcggtgaaggtgttctcctttgctaataggcaaaactttataaacgaaaaaaatatctaccgggtgcccctaatggagcacgacaacatcgcccgattcatcgtgggagatgaacgagtgacagctgacggccgaatggagtacttgctggtcatggagtactatccaaatgggtccctgtgtaagtatctgtctctgcataccagcgattgggtctcttcctgtcggctggcccactcagtaacaaggggtctggcgtacttgcacaccgagctgccacgaggtgatcattataagccagctatctcgcaccgcgatctcaacagcaggaatgtactcgtgaaaaatgacgggacttgcgttatctcggattttggcctgtccatgaggctgaccgggaatagactggtgagacctggggaagaggacaatgcagctatttctgaggttggtactatcagatatatggcacctgaggttctcgagggtgccgttaatttgcgcgactgtgaatctgcactgaagcaagtcgacatgtatgctcttgggctcatctactgggagatcttcatgcgatgcacagacttattccctggtgaatctgtgccggaataccagatggcctttcaaactgaggttggtaaccatccaacatttgaggacatgcaagttctggtgagtcgagagaaacaacggcctaagtttcctgaggcttggaaagagaactctctggccgtaagaagcctaaaggaaactatagaggattgctgggaccaggacgcagaagccagactcaccgctcaatgcgccgaggagagaatggcagagctgatgatgatctgggagcgcaataaaagcgtttcccctaccgtgaacccaatgagcactgctatgcagaatgagcggaacttaagtcacaatagacgcgtgcccaagattggtccataccctgactacagctcctcctcatacatcgaagactctatccaccatacggatagcatagtgaagaacatttcttcagagcattcaatgtcctctacccccctgaccatcggcgagaaaaatcggaactctataaactacgagcggcagcaagctcaggcaagaattccatctccagagactagtgtaactagcctgagcactaacacaaccactaccaatactactgggttgaccccctctacggggatgaccactatatctgaaatgccctatcctgacgagacaaatctgcatactacgaatgttgcccagtctattggccctacaccagtttgcctgcaacttactgaagaagacctggagaccaataagctagaccctaaagaggtggacaaaaatctgaaggagagttccgacgagaatctcatggaacactcgctcaagcagtttagcggaccggatcctctctcctctacctctagcagcttgttgtatcccttaattaagctggcagttgaagccacggggcagcaggattttacccaaactgcaaacgggcaggcctgcctaattccagacgttctgccaactcagatctatccgctgcccaagcagcagaatctcccaaagcggcctacctcccttcctttaaacacaaagaattccactaaagaaccccgactgaagttcggaagcaaacacaagagcaatctgaagcaagtggaaacgggagtggctaagatgaacaccattaacgctgcggagcctcatgtggtgaccgtgaccatgaatggcgttgccggacgaaatcactccgtgaactctcatgctgcaactacccagtatgctaatggcactgttctgagcggccagacgacaaatatagtgacgcacagagcgcaggaaatgctccaaaatcagtttatcggagaagatactaggctgaacatcaactcttctcccgacgagcatgagccgctacttcgccgtgaacaacaagctggacatgacgagggagtgttggatcgtctcgtggatcgacgcgaacggccattggagggcggacgtaccaattccaataacaataattctaacccttgctccgaacaggacgtgttggcccagggagtccccagcaccgctgctgatccagggcctagtaagcctagacgggctcaacgacccaactcgctcgatttgtcagctaccaacgtgctggacggttcgtcgattcagatcggggagtccactcaggatgggaagtcaggtagcggggaaaagattaaaaaacgggtcaagaccccttacagccttaagaggtggaggccgagcacttgggtgattagcactgaatcgctcgattgcgaagtgaacaataatggctccaacagggctgtacattctaaatcctcaaccgccgtctacctggctgaagggggtacagccacaaccatggtgtccaaggacatcggtatgaactgtctctag

SEQ ID NO: 216070 - DNA, 2337 bp, synthetic construct
  misc_feature 1..2337: note = Description of Artificial Sequence: Synthetic coding sequence
  source 1..2337: mol_type = other DNA
atgtcgtctggcgcaaaggaaggagggggtgggtcccctgcttaccatctcccacacccacatccccatccgccacagcacgcccagtatgtggggccttacagactggagaaaacactgggaaaaggccagactggcctggtgaagcttggggtacattgtattactgggcagaaggtggcgattaaaatagtgaaccgtgagaaactaagcgaaagtgttctaatgaaagtcgaacgggagatcgccattctgaagctgattgaacacccacacgtcttaaagttgcatgatgtgtacgaaaacaagaagtatttgtatcttgtgctggaacatgtgtctggaggcgaactttttgactaccttgtgaagaaaggacgcctgacccccaaggaagcccgaaagtttttccgacagatcgtaagtgctctcgacttctgccatagttacagcatctgtcacagagacctgaagccagaaaatcttctgctggacgaaaagaacaacattcgtatcgccgacttcggaatggccagtctccaagttggagactcacttcttgagacctcgtgcggtagtccccattatgcctgccccgaagtgatcaagggcgaaaaatacgacggtaggagagccgacatgtggagctgcggtgtgatcctgttcgccctcctggtaggtgcccttccgtttgatgatgataacctcaggcaactgctggagaaggtcaagagaggtgtctttcacatgccgcattttattcctcccgactgtcagagcctgctgcgtggaatgattgaggtggagccggagaagcggctgagccttgagcagattcaaaaacacccatggtatctgggtggtaagcacgagccagacccctgcctggaaccagcccctggtaggcgggtggcgatgcggtctcttccttcaaatggagaattagatcctgatgtcctggagtctatggcatcattaggctgctttcgggaccgcgagcgtctacatcgagaacttagatccgaagaagagaatcaggagaagatgatctattatcttctgttagaccgtaaagaaaggtacccctcctgcgaagatcaagacctgccaccgcgaaacgacgttgaccctccacgcaaacgggtcgattcgcctatgctcagcagacatggtaagcggaggcccgaaaggaaatccatggaagtcctttcgatcaccgatgcaggcggaggaggatctcctgtgcctaccagacgagccttggagatggcacagcattcacagcgatcccgcagcgtatcaggggcatccactggcctctctagctctccactgtcaagtcctcggtcacctgtcttctccttctctcctgaaccaggagcaggcgacgaggctcggggaggaggctcccctaccagcaaaacccaaacattgccttctagggggccacggggaggaggcgcaggggagcaaccgcctccaccaagcgcacgttcaactcccctgcccggacctccaggttcccccaggtcttccggcggaacgccattacattctcctcttcatacaccgagggcctcacccactggaaccccaggcactactccgccaccctcaccaggtggcggagtcggcggagccgcttggcgctcaaggctaaattccatcaggaacagcttcttaggctctcctcgcttccatagacggaaaatgcaggttccaactgcagaggagatgtcctcactgactcccgaatcgagtcccgagcttgctaaaaggtcctggttcggtaactttatatctctggataaagaagagcaaatctttctcgttcttaaggataagcctttgtcttcaatcaaagcagacatcgtccatgccttcttgagtattcccagtttatcacattctgttctgagtcaaacgagcttcagagcagaatataaggctagcggtgggccttctgtgtttcagaagccagtgagatttcaggtcgatatctcatccagcgaggggccagagcctagccctagaagggatggctcaggaggcggagggatctacagcgtcactttcaccttgatttctgggccaagtagacgatttaaacgagtagtggaaaccattcaggcccagctgttgtctacccacgaccaaccctctgttcaggcactggctgatgagaaaaacggtgctcagactagaccagccggagcaccacctcgatccctgcagccgcctccaggcagacctgaccctgaattatcaagctcaccacgtcgcggacccccaaaggacaaaaaacttctcgccaccaatggtactcccctgccctag

SEQ ID NO: 216071 - DNA, 1422 bp, synthetic construct
  misc_feature 1..1422: note = Description of Artificial Sequence: Synthetic coding sequence
  source 1..1422: mol_type = other DNA
atgcgctcattaccctccaatggtgaactggacccagacgtccttgagagtatggctagcttagggtgttttcgtgaccgcgaaaggctccacagagagctgagatccgaagaggagaatcaagaaaagatgatttactatctgctgctggaccggaaagagcggtacccctcgtgtgaagaccaggatctcccacctcgcaatgacgtcgatccaccacgaaaacgcgtggattctccaatgctgagccgtcatgggaagcgcaggccagagcggaagagcatggaagtgctgtccattaccgacgcgggtggtggagggagtccagtgccaacgagacgcgctctggaaatggctcaacactctcaaaggtccaggtccgtcagtggcgctagcactgggctcagctcaagcccactgagtagtccccgatctccagtgttttcctttagcccggagcccggagccggagacgaggcgagaggtggaggtagccctacaagtaagacccagacactgccttcccggggtcccagaggcggaggtgcaggcgagcagccccctcctcctagcgccaggagcacccccctccccggaccaccgggttctccacgcagctcaggtggtactcccttacattcgcccctgcatactcccagggcctcacccactggaacaccaggaacaacaccgccaccctcacctggcggaggcgtggggggagcagcttggagatctcggctgaatagtatccgcaatagctttctgggaagtccgagattccatagaaggaagatgcaagttccaaccgccgaagaaatgagcagcctcactcccgagagctcacctgagctagccaagcggtcctggttcggtaacttcatctcccttgataaggaagagcagatattccttgtgctcaaagacaaacccctatctagcattaaggcagacatcgtgcacgccttcttgtctatacctagcctcagccatagtgtgctgagccaaacaagttttcgggctgaatataaggcgagtggaggtccaagtgtctttcagaagccagtgcgcttccaggtagacatttcttctagcgagggaccagaaccaagcccacgcagggacggatctggcggtgggggtatttatagcgtcaccttcaccctcatttccggcccatctcggaggtttaaaagggtggtagagactattcaagcacagttactgagcacccacgaccagcccagtgtccaagccctggccgatgaaaagaacggcgctcagacccggccagctggagccccaccgagatctcttcagccgcctcccggtcggcctgaccctgaactctcttccagccccaggcgcggtcccccaaaagacaaaaagttgctggccactaatgggacccccttgccatag

SEQ ID NO: 216072 - DNA, 1422 bp, synthetic construct
  misc_feature 1..1422: note = Description of Artificial Sequence: Synthetic coding sequence
  source 1..1422: mol_type = other DNA
atgaggtccctgcccagtaatggcgagctggacccagatgtgcttgagtcaatggcctcactgggatgttttcgagacagggagcggctccatagggaactgcgatctgaggaagaaaatcaggaaaagatgatttattatctcttgttggatcgtaaagaacggtacccctcctgcgaggaccaggatttgccccctcgcaatgatgtggacccccctaggaaacgcgttgatagcccaatgctgtcccggcatgggaagaggagacccgaaagaaaaagcatggaggtcttgtcaatcacagacgccggaggcggagggagcccggtccctacgcgcagggcgcttgaaatggcccaacattctcagagatcccggtctgtgtctggcgcatcaaccggcctgtccagttcgccactgagcagccctagaagtccagtcttcagcttttcccccgagccaggagcgggtgatgaggcccgaggcggaggcagtcccacttccaagacacagactttaccctcacggggtcctagggggggaggcgcaggggaacagcctcccccaccctcagcccgttccacgcctctccctggccctccgggatctcctagatccagcgggggaacccccctgcactcaccactgcatacgccacgagcatcacccaccggaaccccaggtacgacacctccacccagcccaggcggtggtgttgggggagcagcctggagaagtagactcaactcaattagaaacagtttcctcgggtcgcctcgctttcaccgccgtaagatgcaggtcccgaccgccgaagaaatgtcatcactaacccccgagtcctctccggagctcgccaaaaggagctggttcggtaattttattagcctcgacaaagaggaacagatctttctggtactgaaagacaagcctttatccagcatcaaagcagacattgtacatgccttcctatccattccaagcctaagtcatagcgtcctctcccaaacgtctttcagagctgaatacaaagccagcggcggaccttccgttttccagaagcccgttcggttccaggtggacatatcgagtagtgagggccctgaaccgtcaccacggagagatggttctgggggtggaggcatctatagtgtcacattcaccctcatcagcggtccgagcagacgatttaagagggtggtggagactatacaggctcagctcctttctacccatgaccaaccaagcgtccaggcccttgccgatgaaaaaaatggggctcaaacaagacccgcaggtgcgcctcctaggtctttgcaaccacctccaggaaggccagaccctgagttgtcgagcagcccgagaaggggtccccctaaggataagaaattgctcgccactaatgggacaccattgccttag

SEQ ID NO: 216073 - DNA, 2976 bp, synthetic construct
  misc_feature 1..2976: note = Description of Artificial Sequence: Synthetic coding sequence
  source 1..2976: mol_type = other DNA
atgaggcatcgcgtgtgtagaggccgatctgggcagggacggaggcgcagctccgtgatcccttggcccgtccccaaacatgtgggttgggtggtgctcctgggatgtggaggaagtggaacctccatcctggtggtgtctatcgtgggctcaggactaattaaggcgatggccccagctgaaattctgaacgggaaggagattagcgcccaaatccgcgctaggctcaaaaatcaggtaacacagctgaaagagcaggtcccaggcttcacaccacgcttggccatcctccaagtaggaaacagagatgactctaatctttatattaatgtgaagctaaaagccgctgaggaaatcggcattaaggccactcacataaaattgccccgtacaaccacggagtcagaggtgatgaagtacatcacaagtttaaacgaggactctactgtacacgggttcctggtacagctgccccttgatagcgagaattccattaatacagaagaggtgattaatgctatcgccccagagaaggatgtagatggtctaacatccataaatgctggtaaactggcaaggggagacctcaacgattgcttcatcccatgcacacctaaaggatgcctggaacttattaaggaaacaggcgtacccatcgccggaagacatgcggttgtggtgggcagaagcaagattgtgggtgccccaatgcacgacctgttgctgtggaataacgctacagttaccacttgtcactctaaaaccgcacaccttgatgaggaagtgaacaaaggcgacattctggtcgtcgctactggtcagcctgaaatggtcaaaggtgagtggatcaagcctggcgctattgtgatcgactgcggaattaactacgttccggacgacaagaaaccaaacggccgaaaggtcgtgggggacgtggcttacgatgaggcaaaggaaagagcttcctttatcacccccgtaccaggaggggttggccctatgacagtggccatgctaatgcaatcaacggtagaaagtgccaagagatttctggagaagttcaagccaggcaaatggatgattcaatataataacctcaatctgaaaacacctgtgccaagcgacatagatatctcccggtcctgtaagcctaaaccaattggcaagctggcgagggaaatcggactgctgagtgaggaggtggagctgtatggtgagaccaaggccaaggtcctcctttctgcactggaacgcctaaagcataggccagacgggaaatacgtcgttgtaaccgggattacgcctacacctctcggagaaggaaaaagcacaactacgattggactggtccaggccctgggggctcacctgtatcagaatgtcttcgcctgcgtccgccagccaagccagggtcctacctttggaattaaagggggagctgcgggtggcggatatagccaggtgatacctatggaggaatttaaccttcatctgactggtgacatccatgctatcactgccgctaataatctagtggccgctgccatcgacgctagaatctttcacgagttgacacaaacagataaagcactcttcaaccggttagtcccatccgtgaacggtgtacgacgattctctgacatccagattcgacggcttaaaaggctcggcatcgagaaaaccgatccaaccactttgactgatgaggaaatcaaccggtttgctcgcctggacattgatcctgaaacaattacctggcaacgagttttagacactaacgataggtttcttagaaagataactatcggccaggcgcctaccgagaagggccacactaggaccgcacaattcgatatctccgtggccagcgagatcatggcagtacttgcactgaccacatccctcgaggacatgcgcgaacggctcggtaaaatggtggtcgcttcaagcaagaagggagagcctgtgagcgcagaagatttaggggtgtcaggagctctaacggtcctcatgaaggacgccatcaaaccgaatttgatgcagaccctcgaagggactccagtgtttgtccacgctggaccattcgcaaacatcgcacatgggaacagctccatcatcgcagatcgcattgctcttaagttggtcggtcctgaggggttcgtggtgaccgaagctgggttcggcgcagatatcgggatggaaaaattctttaatattaaatgccggtacagcggactctgcccacatgtggtagttctggtggccaccgtgcgagccctaaaaatgcatggcggtggacccaccgtcaccgccggtctgccattgcctaaggcctatatccaggaaaacttagagttggtggagaagggcttctcgaacctgaagaaacagattgagaacgcacggatgttcggcatccctgtagtagtggccgtgaacgccttcaaaacagatactgagtctgagctagacctgatttcgcgactttctcgcgaacacggagcttttgatgcagtgaagtgtacacactgggctgagggtggtaaaggagccctggcactggcccaggccgtgcagcgggctgcacaggctccttctagctttcagctgctgtatgatctcaagctgcccgttgaggataagatcagaataatcgcacagaagatctacggcgcagatgatatcgagttactgcctgaagcacaacataaggccgaggtgtatacgaaacagggttttggcaacttacccatttgtatggcaaaaacccatctctccctatctcataatcccgaacaaaagggagttccgacaggtttcattttaccaatcagagacattcgggcatctgtgggtgcaggcttcttataccctctcgtcggcacaatgtctactatgcctgggctcccaactcggccttgtttctatgacatagacctcgaccccgaaaccgagcaagtgaatggtttattctag

SEQ ID NO: 216074 - DNA, 1176 bp, synthetic construct
  misc_feature 1..1176: note = Description of Artificial Sequence: Synthetic coding sequence
  source 1..1176: mol_type = other DNA
atgttctctccctggaagataagcatgtttctatcagttcgggaagatagcgtgccgacgacagccagtttctcggctgacatgctcaacgtgactttgcagggccctaccctgaacggaacttttgcacagtccaagtgcccgcaggttgagtggctgggctggctcaatactatccaacctcccttcttgtgggtattgttcgtgctggcaacactggagaatatatttgtcttatccgtcttctgcctgcacaaatcctcctgtacggttgccgagatctatctgggcaatttagctgccgcagacttgatcctggcatgtggactgccattctgggccatcaccatttctaacaactttgactggctgtttggagaaacgctatgccgcgttgtcaatgcaattatttccatgaatctgtactcctctatatgctttctgatgctagtgagcatcgatagatacctcgccctcgtgaaaactatgagcatgggacgtatgagaggagttcggtgggccaaactgtactccctggtgatttggggctgtaccttactcttgagcagcccaatgctcgtgttccggaccatgaaggaatatagcgacgaaggccataacgtgaccgcatgtgtcatatcctatccatccttgatttgggaagtgtttactaacatgctgctgaacgtcgtgggctttcttctgcccctcagcgtgataactttttgtacgatgcagataatgcaggttctgaggaacaacgaaatgcagaagttcaaggagattcagaccgagaggcgcgcaacagtccttgtgctggtggtgcttctcctctttatcatctgttggttaccttttcagatcagcaccttcctggacacattacatcggctgggaatcctcagctcttgtcaggatgagaggataatagatgtcattacgcagattgccagtttcatggcttattcaaattcctgtcttaaccccctggtctacgtgattgtgggtaaaaggtttcgcaagaagtcttgggaggtataccaaggggtttgccagaagggcggatgccggtccgaaccaatccaaatggagaacagtatgggaacactacggaccagtatctccgtggagagacagatccacaaactgcaggactgggctggatcaagacagtag

SEQ ID NO: 216075 - DNA, 1095 bp, synthetic construct
  misc_feature 1..1095: note = Description of Artificial Sequence: Synthetic coding sequence
  source 1..1095: mol_type = other DNA
atgctcaacgtgaccctgcagggcccaactctaaatggaactttcgcccagagcaaatgccctcaggtggagtggctcggctggctcaacaccattcagcctccattcctctgggtcctgttcgtgttagcaactctggaaaacatcttcgttctctcagtgttctgtttacacaagagctcttgtactgtcgcagaaatttaccttggtaatctggcggcagcagatttaattctggcttgtggactgcccttctgggcaatcaccatcagcaacaacttcgattggctattcggagaaacactgtgccgcgtcgtgaatgctatcatctctatgaatctctactcgtctatctgctttctcatgctggtctccatagaccgctacttggctttggtcaaaacaatgtcgatgggacgcatgaggggcgtgcggtgggccaagctgtattccctggtcatctggggttgcacccttctgctgtcttcaccaatgctcgtgtttagaacaatgaaggagtactcagacgaggggcataatgttaccgcttgtgttatctcctatccatctctgatctgggaggtttttacaaacatgctcttgaatgtcgtaggattccttttgccactgtctgtgatcactttttgtacgatgcaaattatgcaggtgctgagaaacaatgagatgcagaagttcaaggaaattcaaaccgaaagacgcgctaccgttttagtgctcgtggtactgttgctgttcatcatctgctggctgccattccagatttcaacatttcttgacacactccaccgactgggtattctgtcatcctgccaggatgaacggatcattgatgtgattacacagatagcaagctttatggcttattccaactcctgcctcaatccactggtttacgtgattgtgggcaagcgattcagaaaaaaatcttgggaggtgtaccagggagtgtgtcagaaaggcggttgtaggtcagaacctattcagatggaaaactccatgggcaccctccggacatctattagcgtcgaacggcagattcataagctccaggactgggcagggtctagacagtag

SEQ ID NO: 216076 - DNA, 1095 bp, synthetic construct
  misc_feature 1..1095: note = Description of Artificial Sequence: Synthetic coding sequence
  source 1..1095: mol_type = other DNA
atgctgaatgttacactacaaggtccgacgctgaacggcactttcgctcaatcaaagtgtccccaggtcgaatggctaggttggctaaacacaattcagccaccttttctttgggtgctattcgttctcgccacgctggagaatattttcgttttatcagtattctgtctgcataaatcatcctgcactgtggctgaaatatatcttggcaatctcgccgctgccgatctgattctggcatgcggcctgcctttctgggcaataaccatcagcaataatttcgactggctatttggggagaccctgtgcagagtggtgaacgccatcatcagtatgaacctgtattcctctatatgcttcctgatgctggtttctattgacaggtatctggctctcgtcaaaacaatgagcatggggagaatgagaggcgtgcgttgggcgaagctgtactcactagtgatctggggatgcacgctgctactttcttcgcctatgctggtgtttaggaccatgaaggaatactctgatgaggggcacaacgttacagcttgtgtcatctcctacccatctctcatctgggaggtgttcaccaacatgctgctaaatgttgtagggtttctgttgccactcagcgttatcacattttgtacaatgcagatcatgcaggtcctccggaataatgagatgcaaaagttcaaggagattcaaacggagcgaagggccacagttcttgtcctggtagtgttactgttgttcatcatctgctggctgcctttccagatcagcacttttctggacacccttcatagacttgggatcctgtccagctgccaggatgaaaggataatcgatgtgatcacccagatcgcctcctttatggcctactctaactcttgtttaaacccgttggtgtacgtcatcgtgggcaagcgcttccggaaaaaaagctgggaagtataccagggggtgtgccaaaagggcggatgtcggagcgagcccattcagatggagaactcaatggggacactccggacgtcaatctccgttgagagacagattcataagctccaagactgggctggtagtaggcagtag

SEQ ID NO: 216077 - DNA, 1176 bp, synthetic construct
  misc_feature 1..1176: note = Description of Artificial Sequence: Synthetic coding sequence
  source 1..1176: mol_type = other DNA
atgttcagtccctggaagatttctatgttcctctcagtgagggaagatagcgtgcccactaccgcgagtttctcagccgacatgcttaatgtcaccctccagggccctaccctaaatggtacttttgcacagagtaaatgccctcaggtggaatggctcggctggctgaatacgattcagcctccattcctatgggtgcttttcgtcctggccactttggaaaacatcttcgtgttgtcagtattctgtctccataaatcctcttgcacagtggccgagatctatctggggaacttggccgctgcagacctcatcctggcttgtggcttgcctttctgggccattactatttccaataacttcgattggctttttggcgagactctctgtagagtcgtaaacgcgattatcagtatgaatctgtactcctcgatctgcttcttgatgcttgttagtattgacaggtaccttgctctggtgaaaaccatgagcatgggtcgcatgaggggcgtgcggtgggccaagttgtattccctcgtgatctggggttgtacacttctcttgagttctccaatgctggttttccgtaccatgaaagaatactccgacgaggggcacaatgtcaccgcgtgcgtcatttcatacccgagtctgatctgggaagtgttcaccaacatgttgctgaacgtagtcggttttctattgccccttagcgtcataacattttgcactatgcaaatcatgcaagtgctgcggaacaacgagatgcagaagtttaaggaaatccagacggaacgcagagccactgtgttggttctcgtggtcttgctgttgttcattatttgttggcttccctttcagatatcaacatttcttgacacgctccatagattgggcatactcagttcatgccaggatgaacgtattatcgacgtgattacacagatagcgtctttcatggcatacagcaatagttgcctcaatcctctggtgtacgtgattgtcggcaagcgcttcaggaagaagagctgggaagtgtaccagggtgtttgccagaaaggtggttgtcgtagcgaaccaattcagatggagaattctatgggcactctgcgtacctctatttcagtggaacggcagatccacaaactgcaggattgggccggaagccggcagtag

SEQ ID NO: 216078 - DNA, 684 bp, synthetic construct
  misc_feature 1..684: note = Description of Artificial Sequence: Synthetic coding sequence
  source 1..684: mol_type = other DNA
atgggaggtaaactctcaaagaagaagaaaggctataacgtgaacgatgagaaggctaaagagaaagacaaaaaggccgaaggcgctgccactgaggaggaaggtacacctaaagagagcgagcctcaggcggcagcagaacctgccgaagctaaagaggggaaagagaagccagatcaagacgccgaggggaaagctgaggaaaaagagggagagaaagatgctgccgctgcgaaagaagaggctcctaaggccgaaccggaaaagacagagggagccgcagaagccaaggctgaaccgccaaaagcacctgaacaggaacaggctgcccctggaccagccgctgggggtgaggctccgaaagcagcggaggccgcagctgctccagcagaatctgcagcgccagccgctggagaggaaccaagtaaggaggagggggaacccaagaaaacggaggctccagcggctcctgccgctcaagaaaccaagtccgatggagcccctgcctcagactctaaacccggaagctcggaggcagccccatcttctaaggagacaccagctgccacagaagccccaagcagcacacccaaggcccagggacccgcagcctccgcagaagagcccaagcctgtggaggcacctgcagcgaactccgatcagacagtgaccgtgaaagagtag

SEQ ID NO: 216079 - DNA, 522 bp, synthetic construct
  misc_feature 1..522: note = Description of Artificial Sequence: Synthetic coding sequence
  source 1..522: mol_type = other DNA
atggggggtaagttaagtaaaaagaagaaaggctacaacgtcaatgatgagaaagccaaagagaaagataagaaggctgagggtgctgcaacagaggaggagggcactcccaaggaatctgagccacaggccgcagccgaacccgcagaagcaaaggaaggaaaagagaagccagatcaggatgcagaaggaaaggctgaagaaaaggaaggcgagaaggatgccgctgctgccaaggaagaagccccaaaggccgaacctgataaagaggagggggaaccaaagaaaactgaggcccctgccgctcccgctgcccaggaaaccaaaagtgatggtgctcctgcttccgatagcaaacctgggagctctgaagcggctccttcgagcaaagagaccccagccgcaacagaggctcccagctctaccccgaaagcacaggggcctgcggctagcgcagaagaacccaagcctgtcgaggcgccagctgctaactcggaccagacagtcactgttaaggagtag

SEQ ID NO: 216080 - DNA, 543 bp, synthetic construct
  misc_feature 1..543: note = Description of Artificial Sequence: Synthetic coding sequence
  source 1..543: mol_type = other DNA
atggggtgtggaggtagcagagcggacgcgattgaaccgagatactacgagtcctggacccgggaaaccgaatcgacctggttaacctatactgattcagacgctccccctagtgctgctgcaccagacagtggacctgaggccggtggattacactcggtgttggaagctgagaaatccaagattaaagcgccaacagactctgtgagcgatgaaggcctcttctccgcatccaagatggcgccactcgctgtgttctcacacggaatgctggaggacgggctccctagcaacggagtcccaagaagcacagccccaggcggtatcccaaaccctgaaaaaaagaccaactgcgaaacccagtgtcctaacccccagtctctctcctctggcccactgacccaaaaacagaacgggctgcaaacaactgaagcaaaacgcgacgccaagaggatgccagcaaaggaagttacgattaacgttaccgatagcattcaacagatggaccggtcacggaggataaccaaaaattgcgttaactag

SEQ ID NO: 216081 - DNA, 438 bp, synthetic construct
  misc_feature 1..438: note = Description of Artificial Sequence: Synthetic coding sequence
  source 1..438: mol_type = other DNA
atggggtgcggaggtagtagagccgatgcaatagagccgcgatattatgagtcctggacgcgcgaaaccgagtctacatggctcacttataccgacagcgacgccccaccaagtgccgcagcgcctgacagcggtccagaggcgggagggttacatagtggcatgctggaagacggactgccttcaaacggcgtccccaggagtaccgcgccagggggaatccccaaccccgagaaaaaaaccaattgcgagactcagtgccctaacccacaaagcctgagttcaggtccgctcactcagaaacaaaacggactccagactaccgaggccaagcgggacgcgaagaggatgcctgccaaagaagtgactataaacgtaaccgattctatacaacaaatggatcgatccagacggatcactaagaattgtgtgaactag

SEQ ID NO: 216082 - DNA, 165 bp, synthetic construct
  misc_feature 1..165: note = Description of Artificial Sequence: Synthetic coding sequence
  source 1..165: mol_type = other DNA
atgggatgtggtggcagtagagctgacgcaatagagccgcgatactacgagtcatggaccagagagactgaaagcacatggctgacatacactgactcagatgctcctccctctgcagctgccccagactccggaccagaagctggcggtctccatagtggctag

SEQ ID NO: 216083 - DNA, 387 bp, synthetic construct
  misc_feature 1..387: note = Description of Artificial Sequence: Synthetic coding sequence
  source 1..387: mol_type = other DNA
atggagtctaaggaggaacgcgcactgaataatctcatcgtggagaatgtaaatcaagagaatgatgagaaagatgagaaagagcaagttgccaataagggagagcctcttgcccttcctcttaacgtctcagagtactgcgtgccaagaggcaacaggagaagatttcgggtgcggcagcccatcctccagtaccgttgggacataatgcatcgtttgggcgagcctcaggcccgtatgcgagaggagaacatggagagaatcggtgaggaagtacgtcaactgatggaaaagttgcgggaaaagcagctcagccactcactgagggccgtgtccactgatcccccacatcacgaccatcatgacgagttttgcttgatgccatag

SEQ ID NO: 216084 - DNA, 387 bp, synthetic construct
  misc_feature 1..387: note = Description of Artificial Sequence: Synthetic coding sequence
  source 1..387: mol_type = other DNA
atggaaagcaaggaggagagggcattgaacaatctcatcgtcgaaaatgtaaaccaggaaaacgatgaaaaagacgagaaggagcaagtcgcaaacaagggggaaccactcgccctcccgctgaatgtgtctgagtattgtgtgccaagaggcaatagacgccgttttcgagtccggcaaccgatcctgcaataccggtgggacattatgcaccgtctgggtgagcctcaggctcgtatgcgggaagaaaacatggagcgcatcggagaagaagtgaggcaactcatggagaaactgcgcgaaaagcagctgagtcatagcctgagggccgtgtccaccgacccccctcaccatgaccaccatgatgaattctgtctgatgccttag

SEQ ID NO: 216085 - DNA, 306 bp, synthetic construct
  misc_feature 1..306: note = Description of Artificial Sequence: Synthetic coding sequence
  source 1..306: mol_type = other DNA
atggaatccaaagaggagagagccctgaataatcttatcgtcgagaacgtgaaccaggagaacgatgagaaggatgagaaggaacaggtcgccaataagggggaaccactcgccctccctctaaatgtaagcgagtactgtgtgcccagggggaatcgccgaagattcagggtaagacagcccattttgcagtaccgttgggatataatgcaccgactcggcgaaccccaggcacggatgagggaggagaacatggagcggatcggggaagaagttagacaactcatggaaaagctgcgtgaatag

SEQ ID NO: 216086 - DNA, 483 bp, synthetic construct
  misc_feature 1..483: note = Description of Artificial Sequence: Synthetic coding sequence
  source 1..483: mol_type = other DNA
atgcagaaaatggttgtgtgcggagcaaagtgctgcggagacgctcctcatgttgaaaatcgggaggaggaaaccgctagaattggacctggggtgatggaatccaaggaagagagagccttgaacaacttaatagtcgagaacgttaaccaggagaacgacgaaaaggatgagaaagagcaggtcgccaacaagggcgaacccctggcactcccactgaacgtcagcgaatattgtgtgcctcgcggtaaccgaaggagatttagggtcaggcagccaatattgcagtaccgctgggacatcatgcacagattaggagaaccccaagccaggatgagggaggagaatatggagcgcatcggtgaggaagtgaggcagcttatggagaagctgcgtgaaaagcagctttctcacagcctccgggcagtttcaactgacccaccacatcatgaccaccatgacgaattttgtttaatgccttag

SEQ ID NO: 216087 - DNA, 378 bp, synthetic construct
  misc_feature 1..378: note = Description of Artificial Sequence: Synthetic coding sequence
  source 1..378: mol_type = other DNA
atggaaagcaaagaaaagcgcgctgtaaacagtctctcgatggagaacgccaaccaggaaaacgaggaaaaggaacaggtggcaaacaagggagaacccctagcactgcctctcgatgcgggtgagtactgcgtgcccaggggaaacaggagaagatttcgcgttcgacagcccatactgcaataccgctgggacatgatgcaccggttaggcgaaccccaggcaagaatgcgtgaagagaatatggagcgcattggtgaagaggtgcgacaattaatggaaaaactgcgcgagaaacagctgtctcattccctgagggcagtcagtacagatccacctcaccacgatcaccatgacgaattttgcctcatgccctag

SEQ ID NO: 216088 - DNA, 363 bp, synthetic construct
  misc_feature 1..363: note = Description of Artificial Sequence: Synthetic coding sequence
  source 1..363: mol_type = other DNA
atggaatctaaggaggagttagcagccaataatctcaacggcgaaaatgcccagcaggaaaacgaaggcggtgagcaagcccctacccaaaatgaggaagagagtaggcacctcggcggtggtgaagggcagaagccaggcggaaatattagaagagggcgagtacgaagactcgtgccaaacttccgttgggcgattcccaataggcacatcgagcataacgaggctcgggatgacgtggagcgttttgttgggcagatgatggagataaagaggaaaacaagagagcagcagatgcgtcattacatgcggttccagacccccgaacccgacaatcactatgacttctgtttgatcccttag

SEQ ID NO: 216089 - DNA, 363 bp, synthetic construct
  misc_feature 1..363: note = Description of Artificial Sequence: Synthetic coding sequence
  source 1..363: mol_type = other DNA
atggagtcaaaggaggagctcgccgctaataacctgaatggtgagaatgcccagcaggaaaacgaggggggagagcaggcccctacacagaatgaggaagaatcaagacacttaggcggaggggaaggacaaaaacccggtggaaacattcgaagagggagagttagacggctcgtgcccaatttccgctgggctattccaaacagacatattgagcacaacgaagccagagatgatgttgaaaggttcgtcggacaaatgatggagattaagcggaagacccgggaacagcagatgcgccattacatgagattccaaacacccgaacctgacaaccattatgatttttgtctgattccatag

SEQ ID NO: 216090 - DNA, 336 bp, synthetic construct
  misc_feature 1..336: note = Description of Artificial Sequence: Synthetic coding sequence
  source 1..336: mol_type = other DNA
atggagaatgttcccaaggagaacaaggtcgtggagaaggcccctgtccagaacgaagcacctgcactggggggaggggagtatcaggagccagggggtaatgtgaagggggtgtgggcacctcccgctcctgggttcggggaggacgtcccaaacagactggtggataacatcgacatgatcgacggcgatggggatgacatggagagattcatggaggagatgcgagaacttcgaaggaagataagagaacttcagctcagatactcactgagaattctgatcggagatcctccacaccatgatcaccacgacgaattttgcctgatgccttag

SEQ ID NO: 216091 - DNA, 336 bp, synthetic construct
  misc_feature 1..336: note = Description of Artificial Sequence: Synthetic coding sequence
  source 1..336: mol_type = other DNA
atggagaacgtgcccaaagaaaacaaagtggtggagaaggctcctgtacaaaatgaagctcctgccctggggggaggagaataccaggagccgggagggaatgtgaaaggtgtctgggctcctcccgcacctggattcggagaagatgtcccaaatcggctggtggataacatcgacatgatcgatggcgacggggatgatatggagaggtttatggaggaaatgcgagaacttcgcaggaagattagggagcttcaactgcggtacagcctgaggatcttaatcggagatccgcctcaccacgaccaccatgacgagttctgccttatgccttag

SEQ ID NO: 216092 - DNA, 378 bp, synthetic construct
  misc_feature 1..378: note = Description of Artificial Sequence: Synthetic coding sequence
  source 1..378: mol_type = other DNA
atggaccataagccattattacaggagcgcccacccgcttataacttagaggcaggccaaggcgactatgcctgcgggccacacggatatggtgctattccagccgcacctccacctcccccatacccctatctggtgactgggattccaacacaccacccccgagtctacaatatccactcccgcacagtgaccaggtatcccgcaaatagtatcgtcgtggtgggaggatgccctgtgtgccgggttggtgtgctggaggattgttttaccttcttgggcatttttctagccattattctgttccccttcgggtttatctgctgttttgccctgagaaaacgcagatgtccaaattgcggagcaactttcgcgtag

SEQ ID NO: 216093 - DNA, 297 bp, synthetic construct
  misc_feature 1..297: note = Description of Artificial Sequence: Synthetic coding sequence
  source 1..297: mol_type = other DNA
atggaccacaaaccactcctgcaggaaagacctcccgcttataatttggaggctggtcagggtgattacgcatgtggccctcacggttatggtgccattcccgcagcaccccctccacctccatacccttatctggtgaccggaattccgacccaccatcccagggtctacaatatccactccaggaccgtgacacggtaccctgctaattccatagtcgtggtgggcggttgccccgtatgtcggcatcagcggagcagttggctatacacctacccactcagggtctgtacgtag

SEQ ID NO: 216094 - DNA, 1536 bp, synthetic construct
  misc_feature 1..1536: note = Description of Artificial Sequence: Synthetic coding sequence
  source 1..1536: mol_type = other DNA
atgtcacgcggtccagaggaggtaaataggctcacagaatctacataccgcaacgtcatggagcagttcaatcctggattgaggaatctcattaatctcggcaagaactacgagaaggctgtcaatgccatgatcctcgcaggtaaggcttactacgacggtgtggccaaaattggtgaaattgccacgggtagccccgttagcacggagcttggtcacgtgctgatcgagatcagcagtactcacaagaaattgaacgaatcattagacgaaaatttcaaaaagttccataaagaaattattcacgaactggagaagaagatcgaattggatgtcaagtacatgaacgcaacccttaagcgctaccagaccgagcacaaaaataagcttgaaagcttggagaaaagccaggctgaactcaaaaagattcggaggaaaagccagggatcgcgtaatgcactgaaatatgagcataaagagatcgagtacgtggaaactgtgactagcaggcagagcgagatacaaaaattcatcgccgacggatgtaaagaagcactgcttgaggagaagagaagattctgcttcctggtggataagcattgtggatttgccaaccatatacattactatcacctccagtccgcagaattgctgaactctaaacttccacgctggcaagagacttgcgttgatgccatcaaagtgcccgagaagatcatgaacatgatagaggagattaaaacccccgcatctacaccagtgtctgggaccccacaggcgtctccaatgattgagaggtcaaatgtggtgcggaaggactatgatacacttagtaaatgttctccaaagatgccccctgctccctccggacgcgcttacacctctccacttattgatatgttcaataatcctgccactgcagctcctaacagccagagggtgaataattcaactgggacctccgaagaccctagccttcagcggtccgtaagtgtcgccactggcctgaatatgatgaagaaacagaaagtaaagaccatttttccccacaccgctggctcaaataagacactgctttcctttgcccagggggacgtcatcacacttctgatccccgaagagaaggatgggtggttgtatggtgagcacgacgtgagcaaggctcggggatggtttccttcatcatacacaaaacttctggaagagaacgagaccgaagcagttacggttcctaccccgtcccctaccccggtgcggtccatctctaccgtcaatctgtcggagaactcctccgtggttatcccgcctcctgattatctggaatgcctgtcaatgggagcggcagcagatcgtcgagcagactctgccagaaccacttccacttttaaggcccctgcttccaagccagagactgccgctcctaatgatgcaaacggcactgccaagcctcccttcctctcaggcgagaatccatttgcaaccgtcaaacttcgcccaactgtaacgaacgaccgatctgctcccataataagatag

SEQ ID NO: 216095 - DNA, 4656 bp, synthetic construct
  misc_feature 1..4656: note = Description of Artificial Sequence: Synthetic coding sequence
  source 1..4656: mol_type = other DNA
atggaaaacactggttggatgggcaagggtcataggatgacccctgcttgccctctactcttatccgttatcctgtcgttgcgcctggcgacggcctttgacccggctcctagtgcttgctctgctctggctagcggagtgctgtacggcgcttttagcctacaagatcttttccccaccatcgcctctggttgctcctggacactggagaaccccgacccgacaaagtatagtctgtatctgcgtttcaatagacaagagcaggtgtgtgcgcatttcgcccctcgcctgctgcctctggaccactacttggtcaattttacgtgtctcaggccaagcccagaggaagccgtcgcacaagctgaaagcgaggttggaagaccggaggaggaagaggccgaggcagccgcaggtcttgagctctgcagcggttcaggcccattcacttttctgcatttcgacaaaaacttcgttcagctctgcctcagtgcagagccttcagaggctccgcgactcttggcacccgctgctttggcattcagatttgtcgaggttctgcttattaacaacaataatagctcccaatttacttgtggcgtgctttgtcggtggtcagaagagtgcggcagagccgctggtcgggcttgcggtttcgcccaacccggttgctcttgtccaggcgaagctggcgctgggagcactactaccacctctccaggaccgcctgccgcacataccttgtctaacgcccttgtgcccggaggtcctgccccaccagcagaggcggacctgcacagtggatctagcaatgatctctttacaactgaaatgaggtatggtgaggaacctgaggaagagcctaaggtcaaaacgcaatggcccaggtccgcggatgaacccggtctctacatggcacagacaggcgaccctgccgctgaagaatggtcgccttggtctgtgtgtagccttacgtgcggtcaaggcctccaggtgcgaacaagatcttgtgtttcatctccttacggcacgttgtgctcaggtccactgagggaaacgcgcccatgtaataattctgccacatgtccagtgcacggcgtatgggaggagtgggggtcatggtccttgtgctcccgcagctgtggtcgtggttcccgctccagaatgcggacgtgcgtcccaccgcaacatgggggaaaggcatgcgaaggccctgaattacagaccaaattgtgttccatggctgcttgtcctgttgagggtcagtggctggagtgggggccttggggtccatgtagcacatcgtgtgctaacgggactcaacagaggtcaaggaagtgttcagtggccggaccagcctgggcaacatgcaccggcgcattgactgacacacgggagtgctctaatttggagtgccccgcaaccgacagcaagtggggcccatggaacgcctggagcttgtgttccaagacatgcgacacaggatggcaacgaagattccgaatgtgtcaggcgactggcacacaaggctatccatgcgagggtactggggaggaagtgaagccgtgcagcgagaaaaggtgcccagcttttcacgagatgtgtagagacgaatatgtgatgttgatgacctggaagaaagcagcagctggtgagatcatttacaataaatgcccacctaatgcatccggttctgcctcccgccgatgtctcctgtctgctcagggcgtggcgtattggggcctgccgtcttttgccagatgcattagccacgagtataggtatctgtacctctccctgagggaacacctggctaaagggcaacggatgctagctggtgagggaatgtcacaggtggtgcgctccttgcaggaactactagcgcgacggacttactactccggggacttactcttcagtgtagacatcctacgcaatgtgacggatacatttaaacgggctacctacgttccatccgcagatgatgtgcagaggtttttccaagtagtctcattcatggttgacgctgagaacaaggaaaagtgggatgatgcacagcaagtctctcccggatctgtgcatcttctcagagtcgtggaagactttattcatctggtgggtgatgctctgaaggcatttcaatcctccctgattgtgacagataatctggtaattagcatccaaagggagcccgtttccgcagtttcctcggacatcacctttcctatgcgaggaagacgaggaatgaaggattgggtgcgccactccgaagatcgtctgttcctaccaaaggaggttctgagcctcagcagccctggtaaaccagcaacatccggtgcagctgggtcccccggacgaggccgagggccaggcaccgtgcctccaggaccaggccatagtcaccaacgcctgctacctgcggacccagacgaatcaagctatttcgtcatcggagctgtcctgtatcgtactttgggtttaattcttcctccgcctcgcccacccttagccgtgacatcaagagttatgaccgtcactgtcagaccaccaacccagccccctgcagagcccctcattaccgtggagctcagctacatcatcaatggaactacagatccccattgcgcatcatgggattactccagggcagacgcttcttcaggcgactgggataccgagaactgtcaaactttggagacccaggcagcccacactcggtgtcagtgccagcatttatctacattcgccgtgttggcccagccacccaaggacctcaccctagagctcgccggaagcccatctgtgcctctggtgattgggtgtgccgtgtcttgcatggcacttcttaccctgctggccatatatgcggctttttggaggtttataaagagcgaacggtccatcatcttactgaatttctgtctgagtatacttgccagcaacattctcatcctggttggacagagcagggttctctccaaaggagtctgcacaatgactgctgccttcctacacttcttttttctgagctccttctgttgggtgcttaccgaggcctggcagagctacttggcggtgattgggcgaatgcgaaccagactcgtgcgtaagagattcctctgcctgggatggggcctgcccgctctggtggttgcagtgtctgttggcttcacgaggacaaagggctacggcacctcttcgtactgttggctgtctttggaagggggactattgtatgccttcgttgggcctgccgctgtgatcgtgctagtcaatatgctgatcggcatcatcgtctttaacaagttgatggccagggatggcatctcagataagtcaaaaaagcagagagccggtgcatctctgtggtcatcttgtgttgttctgcccctcctggctctgacctggatgtccgccgtcctcgcaatgaccgataggagaagcgtgctgttccaggccttgttcgcagtattcaactccgcacaaggatttgttataaccgccgtccactgtttcctacgtcgtgaagttcaggatgtggtgaaatgccaaatgggagtctgcagagccgacgagtctgaagattctcctgatagttgcaagaatggtcagctccaaatactcagcgattttgaaaaggatgtggacctagcatgccagaccgtcttgttcaaagaggttaatacctgcaaccccagtacaatcaccggtacgctcagcagactaagcttggacgaggacgaggaacctaagtcctgcctggtggggcctgagggttctctgtcattcagccccctgccaggcaatatcctggtgccaatggcggcaagcccgggacttggggaaccccctccccctcaagaagccaatccggtgtatatgtgcggcgagggtggcctgcggcagctggacctgacgtggctgcggcctactgagccaggctccgagggcgactacatggttctgcccagacgaacattatctttgcagccagggggtggcggaggtggaggtgaggacgcccctagagccaggccggagggcacgcccagacgggcagccaaaaccgtggctcacacagaaggataccccagtttcctcagtgtggatcactctggtcttggcctcggacctgcttatggatctctccagaacccctatggcatgacctttcagcccccacctcctacaccatcggcgaggcaggtgcctgagcctggtgagcgttcccgcacaatgccaaggacagtgccgggtagcacaatgaaaatgggcagcttagagcgcaaaaagctcagatattctgacctggattttgaggttatgcacacacgaaagcgccattctgagctttaccacgagcttaatcagaaatttcacacgtttgacaggtatcgaagtcagtcaactgccaagcgcgagaagcggtggtcagtgtctagcggaggcgcagctgagcgctccgtgtgtaccgataagccctccccaggtgaacgcccaagcctgtcccagcacaggcgccatcaatcctggtccaccttcaaatccatgacgctcggaagcctgcccccaaagccacgcgaaaggcttaccctacatagagctgccgcttgggaaccgaccgagccacctgacggcgactttcagacagaggtttag

SEQ ID NO: 216096 - DNA, 4755 bp, synthetic construct
  misc_feature 1..4755: note = Description of Artificial Sequence: Synthetic coding sequence
  source 1..4755: mol_type = other DNA
atggagaatactggctggatgggaaagggccaccgcatgacccccgcatgccctctcttgctttctgttattctgtccctcagacttgcgactgcgtttgatcccgctccctcagcatgtagcgcactcgcctccggagttctgtacggcgcatttagtctccaagacctgttccccacgatcgcatccgggtgctcttggacactcgagaatcccgaccctacgaagtacagcttatacttgcgctttaacagacaggagcaggtttgcgctcacttcgctcccagactccttccgttagatcactatctggtgaactttacctgtctgagaccgagtccagaagaagcagtggctcaggcggagtccgaagtgggcaggccagaagaggaagaagcggaagcagccgctgggctggagctttgctccggcagcggtccttttacctttctgcacttcgataaaaatttcgttcaactctgcttaagcgcagagccctcagaagccccaaggttattggcaccagcagcattggctttcagatttgtcgaagtactgcttataaacaacaataacagctcccagttcacttgcggtgtgttatgccggtggagcgaggaatgcggaagggcagccggacgcgcatgtggcttcgcccagcccggttgttcatgtcccggagaggcgggagccggatcaaccacaactacttctcctgggcctccagctgcccataccctgtccaacgctctggtgccaggcggacccgcaccaccggcagaggctgacctgcactctggttcttctaatgatctgttcacaactgagatgcgatacggcgaggagcccgaagaggagcccaaagtgaaaacccagtggccccgtagtgccgacgaacccggactatacatggcccagacaggagacccggcagctgaggagtggtccccctggagcgtgtgctcactcacttgtggccagggactccaggtgcgcacccgttcgtgcgtctctagcccttatggcaccctgtgcagtggacccctcagagagactagaccgtgcaataacagtgccacctgtcccgttcacggggtgtgggaagaatggggtagttggtctctgtgtagtcggtcgtgtggtcgaggaagtcgctcacggatgaggacttgcgtacctccacagcacggcggaaaagcttgtgaaggccctgagttgcaaaccaagctctgttcaatggcggcttgccctgttgaaggccaatggctggagtggggaccgtggggcccatgcagcacatcctgtgccaacggcacacagcaaagatccagaaagtgctcagtggctggtcccgcatgggctacttgcaccggggctcttactgacacaagagagtgctcaaacctcgaatgtcccgctacagactccaagtggggcccatggaatgcttggtcactatgtagtaaaacctgtgatacgggatggcaacggaggttccgcatgtgccaagccaccggcacacagggctatccctgcgaaggtaccggagaggaagtaaagccttgtagcgagaagaggtgccctgcattccatgaaatgtgtagggatgaatacgttatgctgatgacatggaagaaagcagctgctggcgagatcatctacaataagtgtccccctaatgctagcggcagtgccagcaggagatgtcttctgtccgcacagggcgtggcttattgggggctgcccagtttcgctcgctgtatctctcatgaatatcgctacttgtacctgagtctgagggagcacttggctaaggggcagcgaatgctggccggagaggggatgagccaggtggtccggtcactccaggaactgctggcgagaagaacatactattccggcgacctgttattttctgtggatattctgcggaatgtgacagatacctttaaaagagccacctatgtcccaagcgccgacgacgtgcagcgcttcttccaggttgtgtcatttatggtggatgctgaaaacaaggaaaaatgggatgatgctcaacaggtgagtccgggttctgtccacctgctgcgtgttgtagaggattttatccatctcgttggcgatgctctcaaggctttccagtcttcactcattgtgacagataatctcgtcatcagcatccagcgcgagcccgtgagtgcggtttcatccgatataacgttccccatgagagggaggaggggtatgaaagattgggtcaggcattccgaggaccgcctgttcctaccaaaagaggtgctgtcactttccagcccgggtaagcccgctacttcaggtgccgcaggctccccagggaggggaagggggcctggtaccgttccacccggacccggtcattctcaccagcggttattacctgcggatccagacgagagcagttacttcgtcattggggcagtgctataccgcacactgggcctgatcttgccaccacccagaccgccactggcagttacctctagggttatgaccgtcacagttcgccctcccactcagcccccagcggagcccctcattaccgtggagttatcctatattataaacgggacgactgatccacactgcgcaagctgggactattctagggcggacgcatcttccggtgattgggatacagagaactgtcagaccctggagacccaggcggctcatactaggtgccaatgccagcacctgtctacctttgccgtgcttgcgcagccccctaaggatcttactctggagctggctggatcccctagcgtccctttagtcataggatgtgcagtatcctgcatggctctcctcaccctgttagccatctacgccgcattctggcgttttatcaagtcagagaggtcaatcatcctgttgaacttctgtctctctatccttgcatccaatattctcatccttgttggacaaagccgggtgctgagcaaaggtgtgtgcacgatgaccgctgccttcctgcacttctttttcctgagttccttctgctgggtactgaccgaggcgtggcagtcttatctcgctgtcatcggcagaatgcggacgcgcttagttcggaaacgttttctttgtctcgggtggggtttgcccgcattagttgtggctgtgtcagtgggttttacacgtacaaagggctatggaacaagctcatactgttggctttccttggaaggtggattactctatgcattcgtgggacccgcagctgtaattgttctggtcaatatgctgatcggaatcatcgtattcaacaagctcatggcacgcgacggcataagcgacaagagtaagaaacagcgcgctggatctgaacgttgcccctgggccagcctgctcctcccctgcagcgcctgtggcgcagtgccgtccccactcctgtcttcagcctccgccagaaacgctatggctagcttgtggtctagctgtgttgtcctcccactcctggcactaacatggatgtcagcagttctggctatgacagaccggagaagtgtactgtttcaagctttgttcgcggtgtttaactccgcccagggcttcgtgatcaccgccgtccattgcttcctgcgtcgggaggttcaggatgttgtcaagtgtcagatgggcgtttgcagggcagacgaatccgaggacagcccagatagctgtaagaatggtcagctccaaatactctccgattttgaaaaggacgtggatctggcatgtcagaccgtcttattcaaggaggtgaacacatgtaatccatccactattaccggaaccttgagtcgcttgtccttagacgaggacgaggagcccaagtcctgtctggtcgggcctgagggttccctgagtttcagtcccctgcccggtaacattcttgtgcctatggcagccagtccgggactcggggaaccgccacccccacaggaagcaaacccagtgtacatgtgtggagaagggggtctccgacagctggacctaacatggctgagaccgactgaacctggctcagagggggactacatggtactccctcgcaggaccctctccctccagcccggaggaggcggtggcggaggggaagatgcccctagagcaagacctgagggcaccccacgtcgggctgccaaaaccgttgcccatactgaggggtacccatctttcctttctgtggatcactccggcttaggcctcggtccagcttacggttctctgcagaacccatatggtatgactttccagcctcctccccctaccccatcggccagacaggtgcctgaaccaggcgaaagaagtcgcacaatgccacggaccgtgccaggctccacaatgaaaatggggtcactggaacgaaagaaactgcgctattccgaccttgacttcgaagttatgcacaccagaaagcggcactcagagctctatcatgaactcaaccagaaatttcacacatttgaccgttacaggtcacaatctaccgcaaaacgtgaaaagagatggagtgtctcttcggggggagctgcggagcgttccgtgtgcaccgataagccctctccaggcgaacgaccctcattatcccagcacagaaggcaccagtcatggtcaacttttaagtcaatgacattgggttcactgccacctaaacccagggaaaggcttacattgcacagggccgcagcctgggaaccaaccgaacctcctgatggagacttccagaccgaagtttag

SEQ ID NO: 216097 - DNA, 4758 bp, synthetic construct
  misc_feature 1..4758: note = Description of Artificial Sequence: Synthetic coding sequence
  source 1..4758: mol_type = other DNA
atggaaaatactggttggatgggcaaaggtcacagaatgactccagcctgccccctactgttgtcagtaattctttccttgcgacttgctactgcctttgaccctgccccaagcgcatgcagcgccctcgcatcaggcgttctatacggggcattctccctgcaggatttgtttccaactatcgcatctggctgttcctggaccctcgaaaacccagacccaaccaagtacagcctgtacctgagattcaaccgccaagagcaggtttgcgcacattttgccccaaggttactgccgttagaccattatcttgtgaactttacttgcttgaggccctctcccgaagaagccgtcgcccaggctgagtctgaagtaggtagacccgaagaggaagaagcggaggcggcagcaggcctggagctgtgctccgggagcggcccatttactttcctccattttgacaagaacttcgtgcagctctgcctgtctgccgagccttccgaagcccctcgactactggccccagccgcactagcatttcggttcgtggaagtcctgctgattaataataacaacagttcccaattcacttgtggcgtgctctgcaggtggagtgaagaatgcggtagggccgcaggaagggcttgtgggttcgcccaacctggctgttcatgccccggtgaagccggagctggaagcaccaccacaacatcaccgggtcccccagccgctcacacattatcaaatgctctggtcccagggggacctgctccccctgcagaagctgatctgcatagcgggtccagcaatgaccttttcaccaccgaaatgcgatatggagaggagcctgaggaagaaccaaaggtgaagactcagtggccgcgtagtgccgacgagcccggtctttatatggcacagaccggggaccccgctgctgaggagtggtccccttggagtgtgtgcagtctaacatgcggacagggtctacaagtccgcacgcgctcctgtgtatcatccccttacggtactctttgcagcggcccactgcgcgaaacaagaccatgtaacaactctgctacatgtccagtgcacggcgtttgggaagaatgggggtcatggtcgttgtgttcacggagctgcggcagaggcagccgcagccgcatgagaacgtgcgtccctcctcaacacggcggtaaagcctgcgagggtccagagctgcagactaagctctgtagtatggccgcttgcccagttgaggggcagtggctcgagtggggcccatggggcccatgcagcactagttgtgccaatggcactcagcagagatcaaggaagtgctccgtggcagggcctgcatgggccacatgtactggtgcgctcacggacactagagaatgctcaaatctggagtgccccgcaacagattctaaatggggcccttggaacgcgtggagtctgtgtagcaaaacttgcgatacaggctggcaacgcaggttcagaatgtgtcaggccactggtactcaggggtacccatgcgaaggaaccggagaagaagttaaaccctgctccgagaagaggtgtccagcttttcacgaaatgtgccgtgatgaatacgtgatgctgatgacttggaagaaagcggcagcaggtgagatcatttataacaaatgtccccctaatgcaagcgggagcgcttcccgccgatgcctgctctcagcacaaggcgtcgcatactgggggcttcccagtttcgccagatgcatatcacacgaatatcgttatctttatctcagcctgagggaacacctggcgaaggggcagcggatgcttgcgggagagggaatgtctcaggtcgttcgctccttgcaggagcttctggctcgccgaacctattatagtggcgatctgctcttcagcgtggatatcctgcggaacgtcacggatacgttcaagcgagccacctacgtccccagcgctgacgacgttcagcgattttttcaggtagtgagcttcatggtggatgcagagaataaagagaagtgggacgatgcccagcaagtttcccctggatcggtgcacctattgcgcgtggtggaggactttatccacctggttggtgacgctctgaaggccttccagtcctcgctcattgttaccgataacctggtgatttcaatacagagggaaccagtttctgcagtttcttcggatatcactttccctatgcgtgggagacggggaatgaaagattgggtgcgccatagtgaagatagactcttcttgcccaaggaagtactttcgctttcttctcccggaaagcccgctacctccggcgcagctggaagccctggccgaggacgaggccctggcaccgtgccccctggaccaggtcattcccatcagagacttctgcccgcagaccccgacgagtccagttactttgtgattggtgcagtcttgtaccggacgctgggcttgatcctccccccaccacgcccacctcttgctgttacctctagagtgatgaccgtcactgtacgccctccaacgcaaccgcctgcggagcccctaatcactgtggaactgtcatatataattaacgggactactgacccacactgtgcctcctgggattacagcagagccgatgcatcttctggcgattgggacaccgagaattgccagaccctggagacccaggccgctcacacacgctgtcaatgccagcatctgtccacctttgcagtgctcgctcagcctcccaaggacctcactcttgaacttgccggtagtcccagtgttcctctggtgatcggctgcgccgttagttgtatggcactcctgacgttattggccatctacgccgctttttggagattcataaaatccgaaagatctatcattctcctgaacttttgcttgtctatcctcgcatccaatatcttgatcctggtaggccagtcacgcgttctgagtaaaggggtgtgtaccatgaccgcagcctttctccattttttctttctcagcagtttctgctgggttttaaccgaggcttggcagagctatctggcagtgatcggcagaatgagaacacggcttgtccggaagagatttctttgcctggggtggggactgccggcactggtggtggccgtctctgtgggctttaccaggactaaggggtatggaacttcatcctactgttggctgagccttgagggtggtttgctttacgcatttgttggcccagctgctgtcattgttcttgtcaacatgcttattggcattatagtgttcaataagctcatggccagagacggtatatccgataagtcaaaaaagcagagagctggctccgaacgctgtccatgggcctctctgcttctcccatgcagcgcctgcggagccgtcccatcccccctcctgtcttccgcgtccgccagaaatgctatggcttccctgtggtcatcatgcgttgtgctcccccttctggctctgacctggatgagcgccgttctggctatgacagatcgtcggtccgtcctttttcaagcattattcgccgtctttaactctgctcagggattcgtgattaccgctgtgcattgttttttaagaagggaagtccaggatgtcgtaaaatgccagatgggtgtctgccgtgccgacgagagcgaagactcccctgactcatgtaaaaatggacaattgcaaatactgtctgacttcgaaaaagacgtggacttagcctgccagactgtcctgttcaaggaggtgaacacttgtaatccctcgaccattaccggcaccctgagcagactgagcctggatgaggacgaggagcctaaatcctgcctggtaggccctgagggctcgctgtcctttagcccactacctgggaatatcctggttccaatggctgctagtccgggtttgggtgagcctccaccaccacaggaggccaatccggtctatatgtgtggagagggcggactgagacagttggatttaacatggctccggccaactgagcctgggagtgagggagattatatggtgttgcctagacgcacactctccctgcagcccggtggtggtggcggaggcggagaggatgcccctcgtgcaagacctgagggaacgcctagaagagctgctaaaaccgttgcacacacagaaggatatccctctttcctttccgtcgatcattctggtctgggtctcggcccagcttatggatccctccaaaatccgtacggtatgacttttcagccaccaccaccaacaccctctgccagacaagtgcctgaaccaggggagcgaagccgaactatgccacggaccgttccaggaagtactatgaagatgggtagcctcgagaggaagaaattaaggtattccgacctcgactttgaaaaggtcatgcacaccaggaagcgacactcagaactgtaccatgaacttaaccagaaatttcatacttttgaccgataccgatcccagagcactgccaagcgtgagaaacgatggagtgtgtcaagtggcggtgccgctgagcgcagcgtgtgcaccgacaaacccagccctggagaacgcccttccctgtcgcaacacaggaggcatcagtcctggtcaacgttcaaatctatgaccttagggtccctgccacctaagcctcgcgaacgccttactctgcatagagcagcagcctgggagcccacagagccacccgacggagactttcaaacggaggtatag

SEQ ID NO: 216098 - DNA, 4665 bp, synthetic construct
  misc_feature 1..4665: note = Description of Artificial Sequence: Synthetic coding sequence
  source 1..4665: mol_type = other DNA
atgacccctgcttgcccgctcctgctgtccgtcatactgagcttacgactggctacagcattcgacccggctccctctgcatgttctgctctggcctctggcgtgctctatggcgctttctcgctccaggatttgtttccaactatcgcaagcggctgcagctggacactggagaatcctgatcccaccaaatactccctttacctcaggttcaacaggcaggagcaggtgtgtgcccactttgcccctagactcttgcccttggatcactacctagtgaattttacatgcctgcggccatctcccgaggaagccgtcgcacaggccgagtctgaagttggacggcctgaggaagaggaagcagaagctgcggcaggcttagagctctgttccggttctggcccttttacattcctccatttcgacaaaaacttcgtccagctttgtctctccgcagaaccatctgaggctcctaggctgctcgcaccggctgcgctagcattccgcttcgtcgaggtcctcctgatcaataataacaattccagccagttcacctgcggcgtgctttgtcgctggtctgaagaatgtgggagagcggcagggcgtgcatgcggatttgcacaaccgggatgctcatgtccgggagaggccggagctgggagcacgaccacaacttctccaggcccaccagcagcccatactctgtccaacgcgctcgtcccaggaggccctgcccctccggctgaagccgacctacactcaggctccagcaatgacctatttacgacagaaatgaggtacggggaagagcctgaggaggagcccaaagtgaaaacccagtggccacgctcagccgacgaacctggactgtacatggcgcagacaggagaccctgccgcagaagaatggtctccttggtccgtgtgcagcctaacatgcggccaggggctgcaagtgaggacgagatcttgtgtgagctccccctacggcacactctgcagcggcccattgagggaaacccgcccatgtaataatagtgccacatgtccggtccacggggtgtgggaagagtggggctcttggagcctgtgctctcggtcctgtggaaggggttcgagatcccgtatgcgcacgtgcgtgccgcctcagcatgggggtaaagcctgcgagggaccggaactgcagactaaattgtgctctatggcggcatgtcctgtcgaggggcaatggctcgagtggggaccctggggtccatgctcaacctcctgcgccaacgggacccagcaacgttctcggaaatgtagtgtcgccggtcccgcttgggctacttgcaccggcgcactgaccgataccagagagtgttctaaccttgagtgcccagccacggactccaaatggggcccttggaatgcttggagtctgtgttctaaaacctgcgatactgggtggcaaagacgttttcgcatgtgccaggccacaggaacccaagggtatccctgcgagggaaccggagaagaggttaaaccctgtagtgagaagagatgcccagcttttcatgaaatgtgtcgtgacgaatacgtgatgttgatgacttggaaaaaggccgctgccggagagatcatctacaataagtgcccgccaaacgccagcggaagcgcttctagacgctgcttacttagtgctcaaggggtcgcttattggggattaccgtcttttgcccgttgcatcagccacgaatatcggtacctgtacttgtccctgcgcgaacacctggcaaaaggtcagagaatgcttgcaggcgaaggcatgtcacaagtggtgaggtccctacaggaactcctggctaggagaacctactactctggagatttgttattctctgtggatatccttcgcaatgtcacagatacctttaagcgtgccacctacgtaccttctgcagacgatgtccaaagattctttcaggttgtttcttttatggtggatgccgagaataaggaaaaatgggacgacgcgcagcaggtgagccctggctccgtgcacctgttgcgggtagttgaagattttatccacctcgtaggcgacgccctgaaagcattccagtcaagcctgatcgtgacggataatctggtcatcagcatccagagggaacctgtgtccgctgtgagcagcgatataaccttccctatgagaggaaggagggggatgaaagattgggtgcggcactccgaagacaggcttttcctacccaaagaagtcctcagcctcagctcgcctgggaagcccgcaacaagcggggctgcaggcagcccaggacgcggacgcggtccagggactgtgccgccaggccctggacattctcaccagagactactcccagctgatccggacgagtcgtcttacttcgtcattggcgcagtcttgtaccgaacactgggacttatcctgcccccaccaaggccaccactggctgttacatcaagagtcatgaccgttactgtgcgccctccaacgcagcctcccgctgagcccttaataacggttgagctgtcctacatcattaatggaacaacggacccgcattgcgctagctgggattactcccgggcagatgcttcttcaggtgattgggacactgagaattgccagacccttgaaactcaggcggctcacacacgctgccagtgccagcacctgtctacgttcgctgtcctcgcacagccccctaaagatctcacgctggaactggctggttctccctccgtccctttggtgatcggatgtgccgtatcctgtatggcgctgctcacactgctggcaatctacgccgctttctggagattcattaagagcgagaggtcaattattctgttaaacttctgtttatctatcttggcatctaacatcctcattctggtgggccaaagccgagtgttaagtaagggggtttgcacaatgaccgcggcttttttacacttcttctttttgtctagcttttgttgggtgctgactgaggcttggcagtcatacctagccgtcatagggaggatgcgtacacgacttgtcagaaagcgttttctgtgcttgggatggggactccctgctctggtggtggccgtgagcgtgggcttcacaaggactaaaggttacgggacaagctcttattgttggctctcgctggagggtggcctcctctatgccttcgtgggtccagccgcagtgattgtgttagttaatatgctgatcggaattatcgtgttcaacaagctgatggcccgagacggcatctccgataagagtaagaagcagagggccggttctgaaagatgcccttgggcatcgctgctgttgccttgtagtgcctgtggagccgtgccatctccgttgctctccagtgcgagcgcacgaaatgccatggcctcactttggtcctcttgcgtggttttgccccttctggccctgacctggatgtctgctgtgcttgccatgactgacagacggtcggttctgtttcaggctctgtttgctgtattcaatagcgctcagggcttcgtgatcaccgctgtgcactgtttcctgcggcgagaggtacaggacgtagtgaagtgtcaaatgggcgtttgtcgggcagatgagtccgaagattctccagattcatgtaaaaacggacagttacaaatcctgtcggattttgagaaggacgttgatttggcctgccaaactgtactcttcaaggaagtgaacacctgtaacccttctaccatcacaggcaccctttcacgactgtcactcgacgaagatgaggaacccaagagctgcttggtcggcccagagggatccttatctttttctcctctcccaggaaacatcctggtgcccatggccgcttcccctgggcttggtgagccgcctccaccacaggaggctaatcccgtctacatgtgcggggaaggaggactgaggcaattagatctgacctggttaagacctaccgagccaggatcggaaggagactatatggtgctgcccagaaggacactgtcattacagccaggtgggggaggaggcggaggagaggatgccccaagggctcggccagaggggactccgaggcgcgcagccaaaaccgtggcgcacactgagggttatccatcatttctttctgtggaccacagcggcttgggcctgggtccagcttacggctcactacagaacccgtacggtatgacctttcaaccacctcccccaaccccctcagcaaggcaggtccctgagccgggtgaacggtcacgtaccatgcctaggacagtgcctgggagtactatgaagatgggctccttggagcgaaagaaactgcgatacagcgatctggactttgagaaggttatgcatactaggaagaggcactcagaactttatcacgagctaaatcagaaatttcacacttttgaccgctatcggtcccagtcaactgcaaaagacaagccatccccaggggaacgaccatctctaagtcagcatagaaggcatcagtcctggtcgacatttaaatccatgacccttggtagcctcccccctaagcccagggagaggctcactcttcatcgcgcagctgcctgggaaccaaccgaacctcccgacggcgacttccagacagaggtctag

SEQ ID NO: 216099 - DNA, 4401 bp, synthetic construct
  misc_feature 1..4401: note = Description of Artificial Sequence: Synthetic coding sequence
  source 1..4401: mol_type = other DNA
atgactccagcatgtcccctgctgctaagcgtgatccttagtttacggctagcaactgccttcgacccagccccatccgcctgttcagctctcgcctccggggtgctctatggggctttcagcttacaggacctgttccccactattgcatcgggatgttcatggaccttggagaaccccgatcccacaaagtactctctttacttgagatttaaccggcaagagcaggtctgtgctcactttgccccacggcttttacccctagaccactatctggtgaatttcacctgcttgcgcccttcccctgaagaggccgtggcgcaggccgagtccgaagtcggacgaccagaggaagaagaggctgaagccgcagcgggtctggagctctgctctgggagcggaccattcacttttttgcacttcgacaagaacttcgtccagctgtgcctgtcagctgagccgtctgaggcaccgaggctgctggccccagcggcactcgcattcagattcgtggaagtcctcctgatcaacaacaataactcatctcaatttacgtgtggggtcctctgtcggtggtccgaggaatgtggaagagccgcaggtcgtgcctgtgggtttgctcagcccggttgttcatgtcccggtgaagccggagccggatccacgacaacaacatcacccggacccccagcagcccacactctgtcaaatgccctggtgccaggcggacccgctcctccggctgaagctgaccttcactcaggttcaagcaatgacctcttcacgactgagatgaggtatggcgaagaacctgaagaggaaccaaaagtgaagacacagtggcccagaagcgctgacgaacctgggctgtacatggcccagacaggagatcccgctgccgaagagtggtctccatggtccgtctgtagtctaacttgtggtcaaggcctccaagtgcgaacacggtcatgcgtgagctccccgtacggaactctgtgttccggccctttacgggaaacgcggccttgcaacaacagtgctacctgccccgtggagggccaatggctcgagtggggcccatggggcccttgttcaacatcctgcgcaaatggaacccagcagcgctctcgtaaatgctctgtagcgggacccgcttgggcaacgtgtacgggtgccctcacagatactagggagtgctctaacctcgagtgccctgcgaccgactctaagtggggtccttggaacgcatggtccctgtgctcgaagacatgtgacactggttggcaacggcgtttccgaatgtgccaggcaacaggtactcagggctatccttgcgaagggacaggggaagaggtgaaaccttgctcagaaaagaggtgtcctgccttccacgaaatgtgcagggacgagtatgtgatgctgatgacatggaagaaggcagctgccggagagatcatctacaacaaatgtccacccaatgcaagcggctctgctagccggagatgccttctgagcgcccagggggttgcttactgggggctgcccagcttcgctcgctgtatttcccatgagtatcggtacttatacctatcgcttcgcgagcacctggcaaagggacaaagaatgcttgcaggggaagggatgagtcaagtagtcaggagtctacaggagttgctggcgaggcggacatactatagcggcgacctcctcttctccgtggacatactgagaaacgtgacagatacatttaagagagccacatacgttcccagtgccgacgacgtgcagagattcttccaggtggtgtcatttatggtagacgccgagaacaaagagaagtgggatgatgcccaacaggtttcccctggcagcgtgcatttgctgcgcgtggtggaagactttatccatcttgtaggggacgcactgaaggccttccagtcgagcctcatcgtgacagacaacctggtgataagtatccagcgcgagccagtctccgcagttagttctgacattaccttcccaatgcggggacggcgtggcatgaaggactgggtgaggcattccgaggatcgactttttttgcccaaggaagtgttgagcctttcctccccaggaaagcccgctacttccggcgcagccggttccccaggtagaggccgaggccctggaacagtcccaccaggcccagggcatagtcatcagcgcttacttccagcagaccctgatgagagctcctactttgttatcggagccgttctgtaccggaccctggggctgattttgcctcctccacggcctccacttgctgttacaagtagagtcatgactgtgacagtccggccaccgactcaaccccctgccgagcccctgataactgtcgaactttcatatataattaatggaaccacagatccacactgcgcatcctgggactactccagggcagatgccagctccggcgattgggatacagagaactgtcagactcttgagacccaagccgctcataccagatgccagtgtcagcacctctcgacattcgcagtactcgcccagcctcctaaagatctgactctggaacttgccggatccccatccgttccgctggtgattggctgcgccgtcagttgcatggccctcctgacccttctagccatttatgctgcattttggcggtttattaagtccgagagatccattatcttactgaatttctgcctgtctattctggccagcaacatccttatcctagtaggacagagtcgggttctttcaaagggcgtatgcacgatgacagctgctttcctgcactttttcttcttaagctctttctgctgggtccttacggaagcttggcagtcctaccttgctgttatcgggagaatgaggacacgactcgtacgtaagcgctttctatgtttgggatgggggctccctgctctggtagtagccgtctctgttggatttactcgtacaaagggctacggtacgtcctcctactgctggctctcactggagggcggactcttatatgcatttgtgggaccagctgcagtcatcgtgctggtgaacatgctgatcgggatcattgtcttcaacaagctgatggccagagatggaatttccgataaatctaagaaacaacgggcaggagcgagtctctggtcatcctgcgtggttcttcccttacttgccctgacttggatgagcgccgtgctggcaatgacagatcgcaggtccgtactcttccaggcgctcttcgccgtcttcaatagcgcacaggggttcgtgataactgcagtgcactgttttctgagaagggaggtgcaagatgtggtgaaatgtcaaatgggggtgtgtcgcgcagacgaaagtgaagactctcccgactcttgtaagaacggtcaactccagatcctttcagactttgagaaggacgtcgatcttgcatgtcagaccgtgctgtttaaagaagtgaacacgtgcaatccgtcaaccattactggaactttatcgcgactatcgctggacgaggatgaggagcctaaaagctgtctggtgggccctgagggttctctgagcttctcgcctcttcccggtaatatcctagtcccaatggctgcttcacctggcctcggagaaccacccccaccccaagaagcaaacccagtctacatgtgcggcgaaggcggactgcggcagttagatctgacttggctgcgtcccacagagcccggaagtgagggagactatatggttctccctcggagaaccttatcacttcagccaggagggggtggaggcggaggtgaagatgctccacgcgctcgtccagagggcacaccaaggcgggcagccaagaccgtagcccacaccgagggctatcctagtttcctgagtgtagatcattcaggattaggccttggacccgcatatgggagcctacagaacccctatggaatgaccttccagcccccacctccgactccttcagccagacaggtcccagagcctggggagcggagtcgtacaatgccaaggacggttccaggatctaccatgaagatgggctctctggagcgtaagaagctacggtattctgatttagacttcgagaaggttatgcacacacgcaagaggcatagcgaactctaccatgagctcaatcagaaatttcatacattcgataggtacagatcacagtcgactgcgaaggataaaccatcccccggtgagcgccctagccttagccagcacaggcggcaccagtcctggagcactttcaagagcatgacactgggaagtctacctcccaaaccacgggagcgtctgacattacatcgggcagctgcgtgggagcctaccgagcctccggacggagactttcagactgaggtatag

SEQ ID NO: 216100 - DNA, 4500 bp, synthetic construct
  misc_feature 1..4500: note = Description of Artificial Sequence: Synthetic coding sequence
  source 1..4500: mol_type = other DNA
atgactccagcgtgcccgctgctactgtctgtaattctgtccctgcgcctcgctacagctttcgaccccgctccatccgcatgtagtgcactggcatccggcgtgttgtatggagcttttagcctgcaggatttgttccccaccatcgcttccggatgctcatggaccctggagaaccccgacccaacgaaatactcactgtacttaaggttcaatcggcaggaacaggtgtgtgcacacttcgcccctcggctgctacccctggaccactacctggtgaattttacatgtctcagaccctcccccgaggaagcagtcgcccaggccgagtctgaggtcgggcgtccggaagaagaagaggctgaagctgcagccggactggagctgtgcagtgggagtgggccattcacttttttgcactttgacaagaacttcgtgcagttatgcctgagtgccgagccaagcgaggcaccgaggttgctcgcacctgctgccttagccttccggttcgtggaagtcttgctgatcaataataataactcctcccagtttacctgcggcgtcctgtgcagatggagcgaagagtgcggaagagccgcaggcagggcctgcggcttcgcccagcccggttgttcctgtcccggtgaggcgggtgctggtagtaccaccacaaccagcccgggaccgccagctgcacatacgctgagtaatgcccttgttcccggtggaccagctcctccagccgaggccgatcttcattccgggtctagtaatgacttgtttaccaccgagatgcggtacggcgaggaacctgaagaggaacctaaggtgaaaacacagtggccaagaagtgctgatgaaccgggactgtacatggctcagaccgtgcatggagtctgggaggagtggggctcttggtctctatgctctaggtcttgtggtcgtgggagccgcagccggatgaggacgtgtgtccccccacaacatggaggtaaggcctgtgagggcccagaactccagaccaaactgtgctccatggccgcatgtcctgtggagggtcagtggttggaatgggggccttggggcccatgttccacatcttgcgccaatggcacgcagcagcgctccagaaagtgctcagtcgctggccctgcttgggcaacttgcacaggggcactcaccgacactagggagtgtagcaacctggagtgcccagccaccgattccaaatgggggccatggaatgcctggtctctctgttcaaagacatgcgacaccgggtggcagagacggtttagaatgtgccaagcaactgggactcagggatacccctgcgaggggacaggagaggaagtgaaaccttgtagcgaaaagcgctgcccggctttccacgagatgtgccgggacgaatatgtcatgttaatgacatggaagaaggcagctgctggtgaaatcatatacaataaatgtcctcccaacgccagtgggagtgctagccgcaggtgcctcctgagcgcccaaggagttgcctattggggtcttccttctttcgcacggtgtatttcacacgaatacagatacctgtatctatctctgcgggagcatttggcaaagggtcagagaatgctcgccggtgaggggatgagccaggtggtccgctccctgcaggagctcctggcccgaaggacctactattccggagacctcttgttttctgtggatatcctacggaacgtcaccgacaccttcaaacgggctacttatgtgccctctgccgatgacgtacaacggttcttccaagtcgtctcctttatggtggatgccgagaacaaggagaaatgggacgatgctcaacaggtcagtccaggctcagttcacctgctaagggtggtggaagatttcatccacctggtgggagacgccctgaaggctttccaatcctcattaatcgttaccgacaacttggtcatctcaatacagcgtgaacccgtcagcgctgtgtcgtcggacatcacctttcctatgcgaggtcggaggggcatgaaggactgggtccgacacagcgaagatcggttattcctgcccaaggaggtgctgtcgttatcttctcccggaaaaccagcaacttcaggcgctgcgggaagtcctggccgaggacggggacccggtacagtgcctcccggacccggacattctcaccagcggctgttaccggctgacccagatgagtctagttacttcgtgatcggtgcggttctataccgtactctggggcttatcttgccccctcctaggcccccattggctgtgacttctagagtcatgaccgtgaccgtgcgaccacctactcagcctcctgcggagccattgataactgtggagctgtcttacatcatcaatgggaccactgatccacattgcgcatcttgggattattccagggcagacgcatccagcggagattgggatacagaaaattgccagacactggaaactcaggcggcacatacaagatgccagtgccagcatctgagtacctttgccgttttggcccagccgccaaaagaccttacactggaactggctggatccccttcagtacctctcgtgattggctgcgctgtttcgtgcatggctctattgacccttctagcgatctacgccgcattctggagatttattaagagtgagcgatcgattattcttctgaatttctgcttgtccattctggcaagcaacatactgattttggtgggccaaagtcgggtgctgtcaaaaggagtatgtaccatgacagcggcttttctgcacttctttttcctgagctctttttgctgggtgctaacagaggcctggcagtcttatttggcagtcattggtcgcatgcggactcggttggtcagaaagcgatttttatgtctggggtggggtctccccgcacttgtagtggccgtatctgtagggttcacccgcacgaaagggtatggcaccagtagttactgctggctgtctcttgaggggggattgttatatgcttttgtggggccagccgcagtgatcgtgctagttaacatgctgatcggcattatcgtgtttaacaagcttatggccagggatgggatctccgataagtcaaagaagcagcgggctggctcagagcgctgcccatgggcctccctcctcctgccttgcagcgcatgcggtgctgtaccctcccctttgttgtcctccgcaagtgccaggaacgccatggcttccctctggtcttcatgcgttgtgttacctttgctggctctgacatggatgagcgcggtgttggccatgaccgacaggaggtctgtcctgttccaggcactctttgcggtgtttaactccgcccaaggcttcgtcataactgccgtccactgttttctccgaagggaagtgcaggacgttgtaaagtgccaaatgggggtatgcagggcggatgagtctgaggatagccccgattcctgtaagaacggccaattgcagattctgtccgacttcgagaaggacgtggatcttgcatgccagaccgtgctttttaaggaggtgaacacctgtaatccttccacaatcacgggaactctgtcaaggctatccctcgatgaagacgaagagcctaaatcatgcctggtgggacccgaaggctcactcagctttagccccttacccggtaacatcctcgtgcccatggccgcttctccaggtctaggggagcctccaccccctcaagaggcgaacccagtgtatatgtgtggggaggggggattgcggcagctggatctgacctggcttcggcctaccgaacccggttctgagggtgactatatggtgctgcctagaagaacactctcactgcaacctggcggaggcggaggcggtggtgaagatgctcctcgagcgagacccgagggcacaccaaggagggcagcaaaaacagttgcacacactgaaggctatccgtctttcctgtcagtggatcactctgggttgggactgggcccagcctatggcagtcttcagaatccctatggtatgaccttccagccccctccaccgaccccttcggcacgtcaggtcccggagccaggagagcgatcacggaccatgccacgaacagtgccaggatcaactatgaagatgggcagcttggaaagaaagaagttgcggtatagtgatttggactttgaaaaagtaatgcataccagaaagaggcattcagaactgtatcacgaactaaaccagaaattccatacattcgatcggtatcggtcccagagtaccgccaaagacaaaccctctcccggagagcgcccaagtcttagtcagcatagacgacaccagtcttggtctactttcaagtcaatgaccctgggctcactgccaccgaagcctagagagcgcctgaccctgcatagagccgctgcatgggagccaacagagcccccagatggcgactttcagacagaagtgtag

SEQ ID NO: 216101 - DNA, 4503 bp, synthetic construct
  misc_feature 1..4503: note = Description of Artificial Sequence: Synthetic coding sequence
  source 1..4503: mol_type = other DNA
atgttatctttacgtgggccagatactcacgggaagggccataggatgaccccggcttgtcctctgctactcagtgtgattctctctttgaggcttgccacggccttcgatcctgccccaagcgcctgctccgccctagccagcggtgtgctctacggagccttctctcttcaagatctgttccccacgatcgcatccggctgttcttggaccttggagaacccagaccccaccaaatactccctttacctgcgtttcaaccggcaggagcaggtgtgcgctcatttcgcgccacgcttgttaccactggatcactacctggtgaactttacatgcctgcgtcccagcccagaagaagcagtcgcacaggcagagagcgaagtgggtaggcctgaggaagaagaagctgaagccgctgctggactggagctgtgttctggctcaggccctttcacattccttcactttgataaaaattttgtccagctgtgtctgtctgcagagcctagcgaagccccaagactgctggcaccggcagcgttagctttccggtttgtcgaagttttgctgatcaataacaataactccagccagttcacctgcggggtgctgtgtcgttggtcagaggagtgtgggagggccgcaggacgcgcttgtggttttgcccagcccggttgcagctgtccaggagaggccggtgcaggcagcaccactaccacctcaccgggaccacctgctgctcacacattgtccaatgcactagtgcccggaggacctgcccctccggctgaagctgatctgcatagtggatctagtaacgacctgttcactactgaaatgagatacggagaagaacctgaggaagagcccaaggttaagactcagtggccacggtcagcagacgagcctggtttgtatatggcgcaaacagtacatggtgtctgggaagagtgggggagttggtccctgtgctctcgttcatgcggtaggggtagccgaagcaggatgaggacttgcgttcctcctcagcatggcggaaaggcgtgcgagggacccgaactgcagaccaagctgtgctccatggctgcatgcccagtagaggggcagtggctggagtggggtccctggggaccgtgctcgactagttgcgccaatggcactcagcagaggtccaggaagtgcagcgtggcgggtccggcatgggctacctgcaccggcgctctcacggatacaagagagtgttcgaatctggagtgccctgccacggactcaaaatggggcccttggaatgcctggtcattgtgctctaaaacatgcgatacaggttggcagagacgatttcggatgtgccaagcaaccggaacacaaggctacccctgcgagggaacaggcgaggaggtcaaaccttgctcggaaaagagatgcccagcattccatgagatgtgcagagacgagtatgttatgctcatgacctggaagaaagcagctgcaggcgaaatcatctacaacaaatgcccaccaaatgcttcgggtagcgcctctcggaggtgtttgctgagcgcgcaaggagtggcctattgggggttgccatctttcgcccgttgcatctcgcatgagtacagatatctttatttgagcctacgggagcatctggctaagggacagaggatgcttgcaggagaaggcatgagccaggtagtgcgatccttgcaggaactgctggcccgtcgcacatactattccggcgatttgttgttctccgtcgacattcttaggaatgtgacagacaccttcaaacgggctacttacgtcccctcagccgacgatgtccagcgcttcttccaggtggtgagcttcatggtcgatgctgaaaataaggagaagtgggacgacgcgcagcaggtgtcgcctggttcagtgcacctgttgcgtgtcgtggaggattttatacatttggtcggagatgctctaaaagcgttccagagtagcctcatcgttaccgataacttagttatttctatccaacgtgaaccagtgtcagctgtctcatccgacattactttcccgatgaggggcagacggggaatgaaggactgggtgcgacactcggaggaccggctctttctccctaaggaagtgctgtctctgagctctccgggaaaacctgccactagcggcgcagcaggctccccaggcagagggagagggccaggcaccgtccccccaggcccaggacacagccaccagagactgctcccggcagacccggatgagtctagttactttgtgattggggcagtgctctacaggactctgggacttatactaccacctccgagacccccattagctgtgacgagtagggtaatgacagtaaccgtaagaccccctacacagcctccagctgaacccctaattacggtggaattaagctacattattaatgggacaaccgacccccactgtgctagctgggactacagcagagccgatgcaagcagcggggattgggatacagagaattgccaaacgctggaaactcaagctgcacatacccgctgccaatgtcagcacctgtccaccttcgcggttctggctcagcctccaaaagatctaacactggaactcgcgggaagcccttccgtaccgctagtaattgggtgcgctgttagctgcatggccctactaacactgttggctatttatgctgctttctggagatttattaagtccgagcggtctatcatcctgcttaacttttgtctcagcattttggcctcaaatatactgattctcgtggggcagagcagggtgctctctaagggtgtctgtacgatgactgctgccttcttgcattttttcttcctaagctctttttgctgggtcctgactgaggcatggcaatcttacctggccgttatcggcagaatgcgaaccagactggtgcgtaaaaggttcctatgtctgggctgggggctgcctgccctcgtcgtcgccgtgagtgtgggtttcacacgtaccaaaggctatgggacctcttcgtattgctggcttagtctagaggggggtctgctgtatgcattcgttggacccgctgcggttattgttctcgtgaatatgctgatcgggatcatcgtgtttaataagctcatggcccgagatggaattagtgacaagagtaagaaacagagggcaggggcatctctttggtcaagctgtgtggttttacccttgttggctctcacatggatgagcgccgtcctagccatgacagaccggaggagcgtgctgtttcaggctctgttcgccgtgtttaactccgcacagggatttgtgatcactgccgtgcactgctttctccggagagaagttcaggacgtggtcaaatgccaaatgggggtgtgtagggccgatgaatcagaagactcacctgatagctgtaagaacggccagttacagatcctcagcgacttcgaaaaagacgtcgatctcgcatgtcagaccgtactttttaaggaagtcaacacgtgcaatcctagcactatcacgggaaccttaagccgcttaagtctggacgaggatgaggaaccgaaatcgtgcttagttggccctgagggcagcctttctttctcgccactgccgggaaacattctggtgcccatggcagccagcccaggcctgggggagccacctccacctcaggaggctaatcccgtgtatatgtgcggcgaaggcggactgcggcagttggatctaacttggctgagaccaacagagcctggaagcgaaggcgattatatggtcctgccacgcagaaccctgagcttgcagcctggaggtggtggcggagggggtgaggacgctcctcgggcaagacccgagggaacacctcggagggccgctaagacagtggcccatacagagggatacccctcattcctcagcgtggaccattcgggtctgggcctaggtcccgcttatgggtctcttcagaatccatatggcatgaccttccagcctcccccacccacaccttcagcaagacaggtgccggaacctggcgagcgctcacggactatgccaagaaccgtccccggttccacaatgaagatggggagcctggagcgtaaaaaactccgatattctgacttggatttcgaaaaagttatgcatacaaggaaacgacatagcgaactttatcacgagttgaatcagaaatttcacacatttgacaggtatagaagccagagcactgccaaacgtgagaaacgctggtctgtctcaagcggtggagccgcagaaaggtccgtgtgcaccgataaacccagccccggtgagcggccttctctgtcacagcaccgtcgacaccagtcctggagtacatttaagtctatgaccctcggttctctgcctccaaagccacgcgagcggctgacattgcacagggcagctgcctgggagcccactgaacctcctgatggcgattttcagaccgaggtgtag

SEQ ID NO: 216102 - DNA, 2544 bp, synthetic construct
  misc_feature 1..2544: note = Description of Artificial Sequence: Synthetic coding sequence
  source 1..2544: mol_type = other DNA
ggcaaggggcaccggatgacacccgcttgcccgctgcttctcagcgtcatcttgtcattgcggctggcaacagccttcgatcctgcaccgtctgcctgctccgcgcttgctagcggagttctctatggggcattcagtcttcaagatctgttccctactatcgcctcagggtgttcttggacactcgagaatcccgacccaaccaaatacagcctgtatcttcgtttcaaccggcaggagcaggtttgtgcccacttcgccccacgtctccttcctttggatcattatctggttaactttacctgtctgagacctagccctgaagaggccgtcgcacaggccgagagcgaagtcggtcgccctgaggaagaagaagccgaggcagccgcaggcctagagctctgtagtggctccgggcctttcacttttctgcattttgacaaaaatttcgtgcaactctgtttgtccgcagagccgagtgaggcacctcgcctcttagctccggcagccctggcttttcggttcgtggaggtgctattgattaataataacaacagttctcagttcacctgtggcgtgctatgtcgatggagtgaggagtgtggcagggccgcaggaagggcctgtggtttcgctcaacctggttgttcgtgccccggagaagccggtgcaggatccactacaaccaccagccccggaccaccggctgctcataccctgagcaatgctctggtccctggaggcccagcgcctccagcagaagctgacttgcactccgggtccagtaacgatctatttaccaccgagatgaggtatggcgaggaacccgaagaagagccgaaggtcaagactcagtggcctcggtcggcggatgaacctgggctttacatggcccagacaggggatcccgcagccgaagaatggagcccatggtctgtgtgtagtttaacttgcggccagggccttcaagtacggactcgcagctgtgtgtctagcccatacgggactctctgttctggtccactgagggagacccggccatgcaacaacagtgctacttgtccagtcgaaggacagtggctggagtggggaccgtggggcccttgcagcacatcctgcgctaacggcacccaacagaggagccggaagtgtagtgttgccggacccgcttgggccacgtgcaccggggcactaactgacactagagaatgtagtaacctggaatgcccggcaacagactcaaagtggggaccatggaatgcctggtccctatgtagtaagacctgtgacaccggctggcagagacgcttccgcatgtgccaagcaacagggacccagggctacccttgtgagggcacgggtgaggaagtgaagccttgctctgagaagcgttgcccggcattccatgaaatgtgtcgggacgagtatgttatgctgatgacctggaaaaaggcggcagcaggagagataatctataacaaatgccctcctaacgctagcggctccgccagtaggcgctgtctcctttccgcccagggtgtggcctactggggactcccatctttcgctcggtgtataagtcatgagtacagatatctgtacctgagccttagagagcacctggctaagggacaaaggatgctcgccggagagggtatgtcacaggtagtaaggtcactgcaggagctgctcgcacgcaggacttactactctggcgatttgctcttctccgtcgacatcctgaggaacgtgacagatacattcaagcgcgctacttatgtgcccagcgcggacgacgtgcagcggtttttccaggtggtcagcttcatggtggatgcggagaataaggagaaatgggacgatgcccagcaggtgtcgccaggctctgtccatttgcttcgcgtagtcgaagactttatccatctggtgggtgatgcattgaaagcgtttcaatccagcttgatcgtgaccgacaacctcgttatttccatccagcgcgaaccggtctcagctgttagcagcgacataaccttcccgatgaggggcagacgaggtatgaaggattgggtacggcactccgaggaccgcctttttcttcccaaagaggtgctgtctctttcctcaccaggtaagcccgctacgtcaggtgctgctggctctccgggacgaggccgtggtccaggaactgtgccccctgggcctggacacagccatcaacggctcctgccggctgaccccgacgaaagttcctactttgttattggcgctgtgctttataggactctcgggctgatattgccccctcctcgtcccccactcgcggtcacttctcgcgtcatgactgtgacagtcagaccacccacacagcctcccgcagaaccgctgattactgttgaactgagctatatcataaacggcacaaccgatccgcactgcgccagttgggattactctcgagcggacgcttcgtctggagactgggatacggaaaactgtcagacactcgagacacaggccgctcacacaagatgccagtgccagtag

SEQ ID NO: 216103 - skipped

SEQ ID NO: 216104 - DNA, 3528 bp, synthetic construct
  misc_feature 1..3528: note = Description of Artificial Sequence: Synthetic coding sequence
  source 1..3528: mol_type = other DNA
atggctcagactgtgcatggtgtgtgggaggagtggggcagttggtcgctgtgttcccgtagctgcggtcgagggagcaggtccagaatgcgcacctgtgtcccccctcagcacggcggtaaggcttgtgagggaccagagttacagacaaagttatgctctatggcagcttgccccgtcgagggacagtggcttgagtggggaccatggggaccatgcagtaccagttgcgctaacggcacacagcagaggagtaggaagtgtagtgtggccggaccagcttgggccacttgcactggagcgctcaccgatacccgcgaatgttctaatttagagtgtccggcaaccgatagcaagtggggaccctggaatgcctggtcgctctgttctaagacatgtgataccgggtggcaacgcaggttcaggatgtgtcaggctaccggtacccagggttatccatgtgaggggactggagaggaagtaaagccttgctccgaaaagaggtgccccgctttccacgaaatgtgcagagacgaatacgttatgttaatgacatggaaaaaagccgcagctggggagattatctataataagtgtcctcctaatgcttctggatccgccagtcgaagatgtctgctgtccgcacaaggggtggcctactgggggctcccgagtttcgccaggtgtatctcccacgagtatagatacctctatctttccctgagagagcatctggccaagggacagcggatgttggccggagagggcatgagtcaggttgtacgatcccttcaggagctgttggcacgaagaacctattactcaggggaccttctgttcagtgttgatattctgaggaatgttaccgatacgtttaaaagagctacatatgtgcccagtgccgatgacgtgcaacgattcttccaggtcgtgagttttatggtagacgccgagaacaaggagaagtgggatgacgcccagcaggtgtctccagggtccgtccacttactgcgggtggtcgaagattttatacaccttgtgggggatgcccttaaggcatttcagtctagcctgatcgtcacagacaatctcgtcatctcgatccaaagagaaccagtaagcgccgtgtcttccgatatcacatttcccatgagggggaggcggggtatgaaggattgggttcgtcacagcgaagatagactgttcctgcccaaagaggtcctctccctgagttcacccggtaagcctgccacatcaggagcagcaggatcacctggcaggggcaggggcccagggactgtgccccctgggccaggacattctcaccaacgcctgcttcccgcagatccagacgagtcaagttacttcgtcatcggcgctgttctgtacaggaccctcgggctgatcttaccaccgcctcgtccgcctctcgcagtaacatcgcgcgtcatgacggtgacagttcggccacccacgcagccgccagcagagcctctcatcacggttgaactgtcctatattattaatggaacgacagatccccactgcgcatcttgggactatagccgggctgatgccagctctggcgactgggacacggagaactgtcagacactcgagacgcaggccgcacacactaggtgccagtgtcagcacctttcaacctttgccgtactcgcacagcctcctaaagaccttactctagaactggcagggtcacctagtgttcctctagtgattgggtgcgctgtttcctgtatggctctactgaccctcttggctatctatgccgcattctggcgcttcattaaaagcgagcgcagcataattctgctaaacttctgccttagcattcttgcgtccaatatcctaattttggtgggccaatctagagtgctgagcaagggtgtctgcaccatgaccgccgcttttctgcatttcttttttctaagctcattttgctgggtacttacagaggcatggcagagctaccttgcggtgatcggaaggatgagaaccaggctggtgcgtaagaggttcctgtgtttgggttgggggctgcccgctctagtggttgctgtgtctgtcggtttcacaaggaccaaagggtatggtacatctagttactgttggctgtctctcgaaggtggcctgctgtacgcctttgttgggcctgccgcagtcatcgtgctggtgaacatgctcattggcattattgtcttcaacaagctgatggctcgggacggcatctcagacaaatccaaaaagcagcgggctggcgcatctctgtggagtagctgtgtcgtacttcctctgttagccctgacatggatgagcgcagtgctggccatgacagaccggcgtagtgtgttatttcaggccttgttcgccgtcttcaacagcgcccaaggttttgtgattaccgcagtgcactgcttcctgcggagggaggtgcaagacgtggtaaagtgtcagatgggggtgtgcagagctgacgagagtgaggactcgcctgattcatgcaaaaacgggcaactgcagattttaagtgactttgagaaggacgtggacttagcttgtcagacagtcctatttaaggaagttaacacctgcaatccttcaacgattacaggcactctcagtcgcctgagcctcgacgaggacgaagaacccaagtcttgcctagtcggaccagaggggagcctttctttctcaccccttccaggcaacattctggtgccgatggccgcatccccaggccttggtgagcccccaccaccacaggaggccaaccccgtgtacatgtgtggggagggcggtctacgacagctcgatctaacctggctccggcctacagagcccggaagtgagggcgactatatggtccttccacggagaacacttagcctgcagcccggtggtggcggaggcggtggggaagacgctcctcgggcacgacccgagggtaccccaagaagagccgcaaagaccgttgcccacactgagggttacccatcgttcctgagtgtagatcattcaggattggggctgggccctgcatacggatctctgcagaacccatatggcatgaccttccagccccctccacccacccccagtgcgcgtcaggtcccggagccaggggagcggtcccggacaatgccgaggactgtgcccggtagcaccatgaagatggggtcactggagagaaagaaactgcgttatagcgatttagactttgaaaaggtgatgcacacccggaagcgacacagtgaactttatcatgaactcaatcaaaaatttcatacatttgatagatatcgctcacagagcacagcaaaggacaaacccagccccggtgagcggccttccttatcccagcaccggcgtcaccaatcttggagcacctttaagtcgatgacacttggcagtcttcccccaaaaccacgggagaggctgactcttcacagggctgcagcctgggagcctactgagccccctgacggagacttccagactgaagtgtag

SEQ ID NO: 216105 - DNA, 4656 bp, synthetic construct
  misc_feature 1..4656: note = Description of Artificial Sequence: Synthetic coding sequence
  source 1..4656: mol_type = other DNA
atggagaatacaggctggatggggaagggacaccgtatgacgcccgcatgcccactgctcctatctgtgattctttccctgagactcgccaccgctttcgatcccgctccatcggcttgttccgctcttgcatcaggtgtcctctacggggcttttagcctgcaggacctgtttcccaccatcgcatctgggtgctcttggacactggagaacccagatccaactaagtattctctgtatctgcgatttaatcgccaggaacaggtgtgtgcccactttgccccacgccttctgcctttagatcattatttggtcaacttcacttgcctgaggccttcgccggaagaagccgttgcccaggcagagtccgaagtcggaagacccgaagaagaagaagcggaggccgctgctggattggagctctgctccggttctggtccctttaccttcttgcactttgataagaacttcgtacaactttgtcttagtgccgagccgtcagaggccccacggttgctggcacccgcagccttggcattcaggttcgttgaagtattgctaattaacaacaataattcatcgcagttcacatgtggcgtgctgtgtcgatggtcagaagagtgtggacgtgctgctggacgcgcttgtggatttgcacaaccaggctgttcctgcccaggtgaggcaggagccggtagcaccacaacgacctcaccgggaccccctgcagcccataccctgagcaatgccttggtgcccggaggacctgctccaccagctgaagctgatctacattctggttcttcgaatgacctgttcaccactgaaatgagatatggcgaggagccagaagaagaaccaaaagtgaagactcaatggccaaggtccgccgacgagcctggcttgtacatggcacaaactggagaccctgcagcggaggagtggtcaccctggtcagtttgctcattgacgtgtgggcaagggctccaagttcgtaccagatcatgtgtctcatccccttatggcaccctttgcagtgggccactgcgcgagacacgcccttgtaacaattcagccacatgtcctgtccatggggtctgggaagaatggggttcttggtcgctctgttctaggtcctgtggccgagggagccggagtaggatgaggacctgtgtgccgcctcaacatgggggaaaggcctgtgaggggcctgaactccagactaaactctgctccatggctgcctgcccagtcgaaggccaatggcttgaatggggtccctggggtccttgttcgacaagctgtgccaatggcacccagcagcgatcgcgaaagtgtagcgtcgcaggccctgcgtgggccacatgtacgggggctctgaccgatacccgggaatgctccaatctggaatgcccggcaactgacagcaaatggggaccatggaacgcctggtccctctgctctaagacctgtgatacgggttggcagaggcgctttcgcatgtgccaggccacgggcacccagggatatccttgtgagggaactggtgaggaagtgaagccatgcagcgagaagaggtgtccggcattccacgaaatgtgccgtgacgaatatgtaatgcttatgacatggaagaaagcagccgctggcgagatcatctacaataagtgcccaccaaacgctagcggctctgcaagcaggcggtgcctgctcagcgctcagggggtggcgtactggggtctcccatcttttgccagatgcatttcacacgaatacaggtatctctatttatctctcagagagcacctggccaaaggccagagaatgctcgccggagaaggcatgtcgcaagttgtgaggtcactgcaggaactactggctaggcgaacgtactactcaggcgatctgctcttttcagttgatatactgaggaatgttacggacaccttcaagagggcaacatacgtgccctccgccgacgacgtacagagattctttcaggttgtgtcattcatggtggacgccgaaaataaagagaaatgggacgacgcccagcaagtctctcccggatcggtccatcttttaagggtggtggaggacttcatccaccttgtcggcgacgctcttaaagcatttcagagtagtttgatcgtcactgacaatttggtgataagtatccagagggaacccgtctctgccgtttcttccgatattacatttcctatgcgaggacggagaggaatgaaagattgggtccgtcactctgaggatcggctgtttctgccgaaagaggtcctgtctctgagctccccgggaaagcccgcaacttctggcgcagcgggaagcccagggaggggtaggggacctggtactgtcccccctggcccaggccactctcaccagcgtctcctccccgcagatcctgacgagtcaagctattttgtgattggcgcagttctgtacagaaccctgggcctgatactacctcctccacgtccccctctggctgtcacctccagggttatgaccgtcacggttcgacccccaacacagccacctgcagagcccttaattacagtcgaattgtcatacatcatcaatggcacaactgacccccactgcgctagctgggactactctagagctgatgcgtcttctggcgactgggatacggagaactgtcagactctcgaaacccaggccgcacatacccgctgtcagtgccagcatctaagcacattcgctgtgctggctcagcctccaaaggatttaacactggagttggctggctctccctcagtgccgctggtgattgggtgcgccgtgtcatgcatggcgcttctcactcttttggctatttacgcagcgttctggcgctttatcaagagcgagagatcgatcatcttgctaaacttctgtctgagcatccttgcctcaaacatcctaattctggtaggccagtccagagtgctatccaagggagtttgtacaatgactgctgctttccttcattttttcttcctgtcgagcttttgttgggtgctaacagaagcttggcagtcctatctcgctgttatcggccgtatgcgcaccaggctcgttcgaaaaagatttctctgtctggggtgggggcttccagcacttgttgtggcggtctccgtggggttcactcgcactaaaggctacggaaccagctcatactgctggctgagcctagaagggggtctgctgtacgctttcgtgggacccgcagccgtcatcgttctcgtgaacatgctgataggaatcattgtgtttaataaactcatggcacgagacgggatttcggacaagagcaagaagcagagggccggagccagcttgtggtcatcttgcgtggtgctcccactgttggctctgacatggatgtcggcagtcctcgcaatgaccgatcggagaagtgtgctctttcaggcactattcgccgtgttcaattctgcccagggcttcgtaattacagctgtacattgcttcctgcggagggaagttcaggacgtcgttaaatgccagatgggggtgtgtagagctgatgaatctgaggactcccctgactcatgcaagaatggccagctgcagatcctgtctgattttgaaaaggacgtcgatctcgcctgccagaccgtgttgttcaaggaggttaacacctgcaatccatccactattaccggcacactatctcggctctcactcgacgaagatgaggagccgaagtcttgtttggttggaccagaaggatctctgtcattcagccctttgccgggaaatatcctcgtgcctatggctgcaagcccaggcctcggcgaaccccctcctccccaggaagcgaatccagtgtacatgtgcggcgaaggcggacttaggcaattagacctaacttggctgcggcctaccgagccgggatccgaaggagattacatggttcttcccagacgaacactcagcttacagccaggagggggaggtggcggaggcgaggatgccccacgggcacgcccagagggcacccccagaagggccgctaagacggtggcacacacagagggatacccctcttttctgagtgtcgaccattccggtctggggctgggtcccgcttatggatctcttcagaacccttacggcatgactttccaacctcccccaccaacgccgtcagcacggcaggtgcctgaacctggtgagaggagtcgtactatgcccagaaccgttcccggatcaactatgaagatgggctccctagagcgcaagaagcttagatattccgacttggacttcgaagtgatgcacaccagaaaaagacacagtgaattgtaccatgaactcaatcagaaatttcatacattcgatcgatatagaagtcaatcaacggccaaaagggagaaaaggtggtcagtgtctagcggcggagccgcagaacggtctgtatgtacggataagcccagtccaggcgagcgtcccagtttgtctcagcaccgcaggcatcagtcctggtcgacatttaagtccatgactctgggttctttacctcctaagccaagagagcgtctgacccttcatagggccgctgcatgggagcccaccgagccacccgacggggactttcagaccgaagtgtag

SEQ ID NO: 216106 - DNA, 2187 bp, synthetic construct
  misc_feature 1..2187: note = Description of Artificial Sequence: Synthetic coding sequence
  source 1..2187: mol_type = other DNA
atgctgctccctcaggggaaagaggctgtagaaggcaaaaagtgccagggcaggcagcgcagagcgggactgtctgaggtatggagtaggaaactgagaaatgagtccctgggcacctggtcaacacagggctgcaagacggtgctgactgatgccagccatacgaagtgtctgtgtgatagactgtccaccttcgctatcctcgctcagcaacctagagaaataataatggagtcctctggcactccaagcgtcacattgatcgttggcagtggtttatcatgcctagccttgatcaccctggccgtggtttacgccgcactatggcggtacatccggtccgaacggtcaatcatcttaatcaatttctgtctgtccattatttcctctaacatcttaattcttgttggccaaacccagactcacaataaaagcatctgcacaaccactacagccttcctccattttttctttctggcaagtttctgctgggtgctgaccgaagcctggcagagctacatggccgtcacagggaagatccgaacgagactgattcgcaagcggtttctgtgtcttggatgggggcttccggctctggtcgtggccacatctgttggctttaccagaacgaaagggtacggcaccgaccactactgctggctgtcactggagggaggtctgctttacgcattcgttggacctgccgcagcagtggtcctcgttaacatggtcatcgggatcctcgttttcaacaagctcgtgagtagagacggtatcctggacaaaaagctgaaacaccgggctggccagatgagtgagccgcacagcgggttaaccctcaaatgcgcaaaatgtggagtggtgagtacgactgcactcagtgcaactaccgcttcaaacgcgatggcatccctttggtcctcttgtgtggtcctgcctctgcttgctctgacttggatgagcgctgttttggctatgactgacaaaaggtctatcctctttcagatcctctttgccgtcttcgatagcctgcaaggattcgtgatcgtgatggttcattgcattctgagaagggaagtacaggacgccttcaggtgtagactgaggaactgccaggacccaattaacgccgacagctccagtagctttccaaatgggcatgcacaaatcatgacagattttgaaaaggacgtcgatatagcgtgtcgcagcgtcttacataaagacataggcccatgccgcgctgccactattaccggtacactcagtcgtattagcttgaatgatgacgaggaagagaaaggcacaaatcccgagggcctgagttacagtacactccctgggaacgtcatcagcaaggtgattatacaacagcctacaggtctgcacatgcctatgagcatgaacgagctgagtaacccatgtctaaaaaaagaaaactctgagctacgcagaacagtgtatctatgtacggacgacaacctgaggggcgctgatatggatattgtccaccctcaagagcgtatgatggagagtgattatattgtgatgccacgcagtagcgtgaacaaccagccttccatgaaagaggaatcaaagatgaatatcgggatggagacactacctcacgaaaggctacttcactataaggtgaaccccgagttcaacatgaacccacctgtgatggaccagttcaacatgaacctagaacagcatctcgcaccccaggagcatatgcagaacttgccgttcgagcccaggacagccgtgaagaacttcatggctagcgagctggatgataacgctggtctctcacgctcagaaaccggctcaacaatcagtatgagctctctagagcgtcgcaagagtaggtattcagatctggattttgaaaaagtgatgcacactcgtaagcgccacatggagctcttccaggagctgaatcagaagtttcagactctggaccggtttcgagatatcccgaatactagctcaatggaaaatcctgcccctaataaaaatccatgggatacctttaaaaatccctccgagtacccccattataccaccataaacgtgcttgacaccgaggctaaagatgcccttgagttacggccagccgagtgggaaaagtgcctaaatctcccactggatgtacaggagggcgactttcagaccgaggtttag

SEQ ID NO: 216107 - DNA, 4569 bp, synthetic construct
  misc_feature 1..4569: note = Description of Artificial Sequence: Synthetic coding sequence
  source 1..4569: mol_type = other DNA
atgaaagccgtaaggaatctgcttatatacattttttctacttacctcttagtgatgttcggattcaacgccgcacaggacttttggtgctctaccttggtcaaaggggtaatttatggtagctacagcgtctccgaaatgtttcctaaaaactttactaattgtacctggacacttgaaaatcctgatccaaccaaatactctatttaccttaagtttagcaaaaaagacctgtcatgcagcaactttagcttattggcctaccagtttgaccatttcagccacgaaaaaattaaagacctcttgagaaagaatcatagcatcatgcagctatgcaacagcaaaaatgcttttgtatttctgcagtacgacaaaaacttcatccaaatacggagggtgtttcccacgaacttcccgggactgcagaagaagggcgaggaggatcaaaagagcttctttgagttccttgtgctcaacaaggtcagcccatcccagttcgggtgtcacgtgctgtgcacatggctggagtcttgcttaaaaagcgaaaacggcagaaccgaaagttgtggaatcatgtatactaagtgcacctgcccacagcacctgggagaatggggcattgatgatcaaagcttgatcctgctgaacaacgtcgtcctgcccctcaatgagcagacagaagggtgtctgacacaagagctgcagaccacacaggtgtgcaacttaactcgcgaggcaaagcgcccaccaaaggaggaatttggcatgatgggggaccacactattaagtcacagagacctagaagcgtgcacgagaaacgagtgcctcaggaacaggccgacgccgctaagttcatggctcagaccggcgaatctggcgttgaggagtggagccagtggtccacctgtagcgtgacatgcgggcagggctcacaggtgcgcaccaggacatgtgtctcgccctacggaactcactgcagtggtcccctgagagaatcccgtgtctgtaacaacaccgcgctatgcccagtgcacggagtttgggaagaatggagcccatggtcattgtgttctttcacatgtggcaggggccagagaacacggacgcgctcttgtacgcctccacagtacggcggacggccttgcgagggcccagagacccaccataaaccatgtaacattgccctgtgccctgttgacggacagtggcaagagtggtcttcatggtcccagtgttcagtgacatgctctaacgggacccaacagaggtcccggcagtgcactgccgcagctcacggtggctccgagtgcagggggccttgggcggagtctcgagagtgctacaaccccgagtgtacagccaatggacagtggaaccagtggggccattggagtggttgcagcaagtcatgcgatggcggttgggagcgtcgcattcggacttgccagggtgctgtcattactggacagcagtgtgagggcacgggtgaggaggtacgaaggtgtaatgagcaacggtgtcctgcgccttacgagatttgcccggaggactaccttatgtccatggtctggaaaaggactcccgctggggatctggcattcaaccaatgccccctgaatgctactgggacgacttcgcgcaggtgctcgttatccctgcacggtgtggccttctgggagcagcctagcttcgctcgctgtatttccaacgagtaccgacacctgcagcacagcattaaagagcacctcgccaaaggccagaggatgctcgctggcgacggcatgagtcaggtgactaagacgctcctggatctgacgcagaggaagaacttttatgcaggagatttgttaatgtccgtggagatccttcgaaacgtgactgacacattcaagagggcctcctatatccccgcatcagatggagttcagaatttcttccagattgtgtcaaacttgctcgatgaagagaataaggaaaaatgggaagacgcacaacagatctaccctggatctattgagctgatgcaggtcattgaagacttcatacacattgtaggcatgggcatgatggatttccaaaacagctatctgatgactggaaacgtggtcgcttccattcagaaattacccgctgcgtcagttctgacagatattaactttcctatgaaggggaggaaagggatggtggattgggccaggaactctgaggaccgcgtggttattcctaagagtatctttaccccagtctcctctaaggagctggacgagtcctctgtgtttgtcctgggggcagtgctgtacaaaaacctggacctcatccttcctactctcaggaactacacagttattaattctaagatcattgtagtaacgattcggccagagcccaagacaacggactctttcttggaaattgagttggcccatctggccaatggcacactgaacccctactgtgtgctgtgggacgattcaaaaactaacgaaagtttgggcacctggtccactcaggggtgtaagactgtcctaacagacgcgagccacaccaaatgcctgtgcgacaggctatctacctttgccatactcgctcagcagcctcgggagatcattatggaaagttccggcacgcctagtgtgactctgattgtgggcagcggcctgtcgtgcttagccttgattacactggcagtcgtttatgctgccctgtggagatacattagatcggagaggtcaatcatcttgataaatttctgcctaagtataattagcagtaacattcttatcctggtggggcagacacagacccataataagagtatttgcacgaccactacagcatttctccacttctttttcttggctagcttttgctgggtcttgactgaggcctggcaatcctacatggccgtgacaggaaagatccgtacccggctcatcagaaaacgcttcctgtgcctggggtgggggctcccagccttagtcgtagctacctctgtgggctttaccaggactaaaggctacgggactgatcattattgctggctcagtctggaaggagggctgctgtacgctttcgttggacccgcagccgctgtcgtgctcgtgaacatggtaatcggcattctggtgtttaacaagctcgtatccagggacggcatcctcgacaaaaaactcaagcatcgggcaggtcaaatgagtgagccccactccggcctaactctgaagtgcgctaagtgcggcgtggtgtccactaccgctctgtctgctacaacagcgtccaacgctatggccagcttgtggagctcttgcgtggtgctccctctgctggccctcacgtggatgagcgccgtgcttgccatgactgataagcggtcaattttattccagatattgttcgcagtgtttgactctctgcagggtttcgtgatcgtaatggttcactgtattttgcgtagggaggtccaggatgcctttcgttgtcgcctgcgcaactgccaggacccaattaacgccgatagctccagcagcttccccaatggccacgcccagatcatgaccgattttgagaaggacgtggatattgcatgccgctcagtcttgcacaaggatatcggcccttgccgcgcagctacaatcaccggaacgttgagccgcatttcactcaatgatgacgaagaggagaaaggaacaaaccctgagggcctgtcctatagtactctgcctgggaacgtcatcagcaaagtgatcattcagcagcctaccgggctgcacatgcctatgagcatgaacgagctgtctaacccttgcctaaaaaaggagaacagcgaactgcgcaggactgtctacttgtgcaccgacgataacctgagaggggcagatatggatatcgtgcaccctcaagagagaatgatggaatctgactatatagtgatgcctagaagctcagtgaacaatcaaccctctatgaaggaggaatctaaaatgaacatcggcatggagaccctgcctcatgaacgtcttctacactataaggtcaacccggagttcaatatgaaccccccagtcatggatcagttcaatatgaacctagaacagcatctggcgccacaggagcacatgcagaatctgccgttcgaacctcggactgccgtgaagaattttatggcaagcgagcttgatgacaatgctggactctcacgatccgaaaccggttccaccatctcgatgtctagcctggagcgcagaaaatcccggtatagcgacttggactttgaaaaggtgatgcatactagaaagaggcatatggagttattccaggaacttaatcagaagttccagactttggataggttccgggacatcccgaataccagttcaatggaaaatcctgccccaaacaaaaatccttgggacaccttcaaaaacccctccgagtacccgcactatacaacaatcaatgtcctggacaccgaggccaaagatgccttagagctcaggcctgccgagtgggagaaatgcctgaatctgcccctggacgttcaggagggtgactttcagaccgaagtttag

SEQ ID NO: 216108 - DNA, 1461 bp, synthetic construct
  misc_feature 1..1461: note = Description of Artificial Sequence: Synthetic coding sequence
  source 1..1461: mol_type = other DNA
atggtgattggcatcctcgtattcaataagcttgtctcaagagacgggatactggacaagaaattaaaacacagagctggccagatgagtgagccgcattcaggattgactctcaagtgtgccaagtgtggggtagtgagcaccactgcactgagtgcgaccacagccagcaatgcaatggcctccctttggtcctcatgtgttgtgctgcccctgttggcgttgacatggatgtccgcagtacttgcaatgacagataaaaggagcatacttttccagatcttatttgcggttttcgactctctgcaaggattcgtgattgtgatggtgcactgtattcttcgtcgggaggtgcaggatgcattcagatgccgattgcgtaattgtcaggatcctatcaacgccgactccagtagctcctttcccaacgggcatgcacagatcatgactgacttcgaaaaggatgtggatatcgcgtgccgctccgtgctgcataaagatattggaccttgccgagctgccaccatcaccggtacgctgtctcgaatatcactgaatgacgacgaggaggaaaagggaacaaaccctgaagggctgtcctacagtacccttcctggaaatgtcatctccaaggtaataatacagcagcctaccgggctgcacatgccgatgtcaatgaatgaactatctaacccatgtctaaagaaggaaaactccgagctgaggaggacggtgtatctgtgtaccgatgataacctcaggggggcagacatggatatcgtccatccacaagagaggatgatggagtctgattacattgtcatgccgaggtcatcagtgaacaatcagcccagtatgaaagaggaaagtaaaatgaacattgggatggaaactcttccccatgagcggttgctgcactataaggttaaccccgagttcaacatgaatccaccagtgatggatcaatttaacatgaatctggagcagcaccttgccccacaagaacatatgcagaatctcccgtttgagcccaggacggcagtcaagaattttatggcctcagaacttgatgacaatgctgggctgtcgaggtctgagacgggatccacgatttcaatgtcaagcctagagagacgtaagagccggtactcagatcttgatttcgagaaggttatgcataccaggaagcggcacatggagttgttccaggaactgaaccagaagttccagacactagatcgcttccgcgatatccctaacaccagttctatggagaatccggcaccgaataagaacccatgggacaccttcaagaatcccagcgaatatcctcattatactaccattaacgtactcgacacagaagctaaggacgccctggagctgcgtcctgctgaatgggagaagtgtcttaatttgcctctagatgttcaggagggcgatttccagactgaggtgtag

SEQ ID NO: 216109 - DNA, 978 bp, synthetic construct
  misc_feature 1..978: note = Description of Artificial Sequence: Synthetic coding sequence
  source 1..978: mol_type = other DNA
atgaaggctaaagacttgatcgtgactcctgcgactattttgaaagagaagcccgatcccaacaacctcgtctttgggactgtattcacagaccatatgctgacagtggaatggagtagtgaatttggatgggagaagccacacattaaaccacttcaaaatctgtctctgcatcccggatcgtcagctcttcactatgcagtggaggtctttgacaaggaagaattgctggaatgcatccagcagctggtaaagttggaccaggagtgggtgccctactctacaagcgcctcactttatattaggcctacgtttattggcacagaaccatcactgggtgtgaagaaacccacaaaggcactcctctttgtcttactgtcccccgtgggcccatacttctctagtggtacctttaatcctgtgtcactctgggcgaacccaaaatacgtaagagcttggaagggagggaccggcgattgcaaaatgggtggcaactatggatcaagcctgttcgcacaatgcgaggcagtggacaatggatgccagcaagtgttgtggctgtatggcgaggatcaccagattacagaggtaggcaccatgaacctctttctttattggatcaatgaagacggggaggaggaactggctactccccctctggacggtattatactcccaggagtgacccgacgttgcatcttggatttagcgcaccaatggggagaattcaaagtgtctgaacgctatcttaccatggacgatctgaccacagctctggaagggaatagggtgcgggagatgtttgggtctggcaccgcctgtgttgtatgtccggttagcgacattctgtacaaaggcgaaactatccacatccctacaatggagaacggaccaaagctcgcaagtagaattctgagtaaactgactgacatccaatacggccgtgaggagtccgattggaccatagtactgtcctag

SEQ ID NO: 216110 - DNA, 1158 bp, synthetic construct
  misc_feature 1..1158: note = Description of Artificial Sequence: Synthetic coding sequence
  source 1..1158: mol_type = other DNA
atggattgttcaaacggctgctctgctgagtgtaccggcgagggcggaagtaaagaggtcgtcgggacattcaaggccaaagatctgattgttaccccggctactatcctgaaggagaagcccgatcccaataaccttgttttcgggaccgtgttcaccgaccacatgctaaccgtagagtggagctcagagtttggctgggagaaaccacatataaagccactgcagaatctgagccttcatccaggcagttctgcactccattacgccgtcgagctgttcgaaggacttaaagcattccgtggcgtcgacaacaaaattcgccttttccagcctaacctgaatatggacaggatgtaccgttcagctgtgcgcgctactttgcctgtttttgataaggaagagttgctcgaatgtattcaacaactggttaaattggatcaggagtgggtgccctacagcacctcagcgtctctgtatatcaggcctaccttcatcggcaccgaaccttctcttggcgttaaaaagcctacaaaggccctgctgtttgtgcttctcagtccagttggcccttacttttcgtccggtacgttcaaccccgtttcactgtgggccaaccctaagtatgttcgggcttggaaaggcggtaccggtgactgtaagatgggcggaaattatggcagctctcttttcgcacagtgtgaggccgtggataatggatgccaacaggtactttggttgtacggagaagaccaccaaataacggaagtgggcacaatgaacctgtttctgtattggataaatgaagatggcgaagaagagctggcaaccccgcctctggatggaataatcctgccaggggtcaccaggcgatgcatcctggacctggctcaccagtggggcgagtttaaagtgagcgaacggtacctgacaatggacgacttgaccaccgccctcgaagggaatcgggtaagggagatgttcggcagtggcaccgcgtgcgtggtttgcccggttagcgacatcttgtacaagggggagactatccatatccctacaatggaaaatggccctaagctggctagccgcatcctcagcaaactgaccgacatccaatacggacgtgaggagtccgattggacaatcgtgctttcttag

SEQ ID NO: 216111 - DNA, 1197 bp, synthetic construct
  misc_feature 1..1197: note = Description of Artificial Sequence: Synthetic coding sequence
  source 1..1197: mol_type = other DNA
atggcctcccccctcaggtccgctgctgctctggctcgtcaggactgttcgaatggatgcagcgcggaatgcactggagaggggggatctaaagaggttgtgggcacctttaaggctaaagatctcatcgtcacccctgcaaccatcctgaaagaaaaacccgatccgaataatctggtgtttggtacagtattcacagaccatatgcttacagtcgagtggtcgtcggaatttgggtgggagaaaccccacatcaagccattgcagaatctgagcctgcatcctggctcctctgctctccactacgcagtcgaattatttgaaggccttaaagcattcagaggagttgacaacaaaatacggctgttccagccaaacctgaacatggacaggatgtatcggagcgccgtccgagccacactgcctgtgttcgacaaggaagaactcctggagtgtatccagcaactagtcaaattggaccaggagtgggtgccatattctacttctgcttccctgtatattcggccaacattcatcggaacagaaccaagtctaggtgttaagaaacccactaaagctttgctgtttgtcctcctttctcctgttggcccatattttagtagcggaacatttaatcctgtttcgttgtgggccaacccgaaatacgtacgggcttggaaaggtgggactggggactgtaagatgggaggaaactatggctcttctttatttgcacagtgtgaggcagtggacaatggctgccaacaggtactgtggttatacggtgaggatcaccaaatcacggaagtcggaaccatgaatcttttcttgtactggataaatgaagacggcgaagaggagttggcaaccccacctttggacggaattattctgcctggggtgacacggcgttgcatcttggatcttgcacaccaatggggagagtttaaagtgtccgaaaggtacctgacgatggatgatctgactacggcgcttgaggggaaccgggttagggaaatgtttggttctgggaccgcttgcgttgtttgtccggtgtccgacatcctgtataagggcgaaactattcatattccaacaatggaaaacgggccaaagttagcctcccgaattctctccaagcttaccgatattcaatatggtcgggaggaatccgactggaccattgtcctgtcctag

SEQ ID NO: 216112 - DNA, 1050 bp, synthetic construct
  misc_feature 1..1050: note = Description of Artificial Sequence: Synthetic coding sequence
  source 1..1050: mol_type = other DNA
atgaaggattgtagtaacggttgtagcgcagagtgcaccggagagggtgggagcaaggaagttgtggggacttttaaggccaaagacctgattgtgaccccagcaacgattctcaaggaaaagccagatccaaataatcttgtgtttgggacggtgtttaccgaccatatgcttactgtggaatggagcagtgagtttgggtgggagaaacctcatattaagccccttcagaacctgtcgctccatccagggagttccgcccttcattacgccgtggaagtctttgataaggaagagctcctggagtgcatccagcagctggtaaagctggaccaggaatgggttccttattcaacatctgcaagcctgtatattaggcccacgttcattggaactgagccgagccttggagtaaagaagcccacaaaggcgctcctgtttgttctgctgtctcctgtgggtccctacttttctagcgggacgttcaatcccgtctcactttgggccaacccaaaatatgttcgcgcatggaagggtggcactggcgattgcaagatggggggaaactatgggtcctctctgttcgctcaatgtgaagcagtggacaacggctgccagcaggtactctggctatacggagaggaccatcaaataacagaagtgggtacaatgaatctgtttctttattggattaacgaagatggcgaagaagagttagccactccgccactggatgggataatactgcccggagttactcggcgttgcatcctggacctggcccaccagtggggcgagttcaaggtgtctgagcggtacctgacaatggatgatctgacaacggctctggaggggaacagggtgcgcgagatgttcgggtccgggacagcttgtgttgtgtgtccagtctctgacatcctgtataaaggtgagacaatccacattcctaccatggagaacggtccaaagctggcgtcccgcatattaagtaaattgactgatatacaatacggccgtgaggagagcgactggacgatcgttctgtcttag

SEQ ID NO: 216113 - DNA, 1161 bp, synthetic construct
  misc_feature 1..1161: note = Description of Artificial Sequence: Synthetic coding sequence
  source 1..1161: mol_type = other DNA
atgaaggactgttcaaatggatgttcagccgaatgcaccggcgagggaggatccaaagaagtcgtcggcacatttaaagccaaggatctaattgttaccccagcaacgatcctcaaagagaaaccagatcctaacaacctggtcttcggtaccgtgtttactgaccacatgcttacagtggaatggagctcagagttcggatgggaaaagccccatattaagcctttgcagaacctgtcactgcatcctggtagctcagcactgcactacgcagtggagctctttgagggtcttaaagccttcaggggcgtcgataataagattagactgtttcagcctaacctcaacatggatagaatgtaccggtccgccgtgcgggctacattgcccgtgtttgataaggaagagctgctcgagtgtatccagcaactggtgaaattagatcaagagtgggttccatactctacttccgcatccctttacatccgcccaaccttcatcggaactgaaccatctttaggtgtgaaaaagcctaccaaggccctcctgtttgtgctgttgtctccagttggaccttactttagttcagggactttcaaccccgtctctctttgggccaatccaaagtatgtcagagcttggaagggcggtacaggagactgtaaaatgggtgggaattacggctcctccctatttgcgcagtgcgaggccgttgataacggttgccaacaggttctatggctttacggagaggatcaccaaattaccgaagtcgggacaatgaacctgtttctatattggattaacgaggatggggaggaggaactcgccactccaccgctcgacggcatcatactgcccggagttaccaggcgttgcatactggaccttgcccaccagtggggtgagtttaaggttagcgagaggtacttaacgatggacgatttaacgactgcactggaaggcaaccgagtgagggaaatgtttggaagcggtactgcctgtgtcgtctgtccggtgagcgatatcttgtataagggagaaaccatccacatcccaaccatggaaaatggcccaaagctggcgagtcggatcttgtctaaactcaccgatatccagtatgggagagaagagagcgactggactatcgtgctttcctag

SEQ ID NO: 216114 - DNA, 1179 bp, synthetic construct
  misc_feature 1..1179: note = Description of Artificial Sequence: Synthetic coding sequence
  source 1..1179: mol_type = other DNA
atggccgcagccgcattggggcagatctgggccaggaagctgctgagtgtgccctggctgctgtgtggccctagacgttatgcatccagtagtttcaaggccgctgatcttcagctcgagatgactcagaagccgcacaagaagccagggccaggagaacccctagtttttggaaaaactttcaccgaccatatgctcatggtggaatggaatgacaaggggtgggggcagccacgcatccagccattccagaatctaacgctgcatccagctagttcttccctgcactactccctgcaactgttcgagggaatgaaggccttcaaaggtaaagaccagcaggtaagactcttccgcccatggcttaatatggaccggatgctgaggtccgccatgcggctgtgcctgccctcctttgataaactcgagcttctggaatgcatcaggaggctgatcgaagtcgacaaagactgggtgcccgacgcggcagggacatctctttacgtgcgccctgtattgattggtaacgagccgagcctgggggtgtcgcagcccacacgggctctgttatttgtgatcctctgccccgtcggggcttattttcccggtggctccgttactccggtgtcgttactcgccgaccccgcattcattagggcatgggtcggcggtgtcgggaactacaagttgggcggaaattacggccctaccgtcctcgtgcagcaggaggcgctgaaaagaggttgcgagcaagttctctggctgtacgggcctgaccaccagctgaccgaggttggaacgatgaatatctttgtgtactggacacatgaggatggggtgctggagctcgtgactccacctctcaacggcgtaatcctgccgggagtggtcaggcagagccttttggatatggcgcagacgtggggggagttcagggtggtagagaggacaatcactatgaaacagctgctccgggcattggaagaaggcagagtgagagaagtgtttggatcaggtactgcttgccaggtttgtcctgtacatcgaatcctttacaaagaccgtaacctccacattcccacaatggaaaacggaccggagctgatcctgagatttcagaaagagctgaaagagatacagtatggtatacgggctcacgaatggatgttcccagtttag

SEQ ID NO: 216115 - DNA, 1059 bp, synthetic construct
  misc_feature 1..1059: note = Description of Artificial Sequence: Synthetic coding sequence
  source 1..1059: mol_type = other DNA
atgactcagaaacctcataaaaaacccggtcctggtgaacccctcgtgtttggaaaaacttttactgatcacatgttaatggtggagtggaatgataagggttggggacagccgaggatccagccttttcagaatttaaccctccatccagccagctcaagtttacattacagcttgcagctgtttgagggaatgaaagcattcaaaggaaaggaccagcaggtccgtctgtttcgcccatggctcaatatggatcgaatgctgcgatccgcgatgcggctctgcctgccaagctttgataagctggagctgctggaatgtatccgtcgattaatcgaggtcgacaaagactgggttcctgatgccgctggaacttccctttacgtccgcccagtactcatcggaaatgaaccatccctcggagtgagtcaacccacacgtgccctgttgtttgtcattctgtgcccagtgggagcctactttcctgggggttctgtaacaccggtgagcttgttagcagaccccgcatttatacgggcatgggtagggggagttgggaactataagctgggtggaaattacgggcctactgttctggtccagcaggaggctctcaaaagaggctgcgaacaggtcctctggctttacgggccagaccaccagctgactgaagttggtaccatgaatatcttcgtgtattggactcatgaggacggcgtcctagaactggtgacccccccacttaatggggttatcttgcccggtgtggtgcgccaatctttactggacatggcacagacctggggggagttcagagttgtggagagaaccattacaatgaagcagctcctgcgggcattggaggaaggccgagtccgcgaggtattcggttcaggcaccgcatgccaggtgtgcccagtgcaccgcattctatataaagatcgcaatctacacattcccaccatggaaaatggtcctgagctgatactccgcttccagaaagagctgaaagagatccagtatggaatcagagcccacgaatggatgtttccagtgtag

SEQ ID NO: 216116 - DNA, 903 bp, synthetic construct
  misc_feature 1..903: note = Description of Artificial Sequence: Synthetic coding sequence
  source 1..903: mol_type = other DNA
atggctgccgcagctcttggacagctatttgaaggaatgaaggcttttaagggtaaggaccaacaggtcaggttattccgaccttggttgaacatggatcgaatgttgaggagcgctatgcgcctgtgtctgccctctttcgataaattggaactgcttgaatgcatccgacggttgatagaagtggataaggactgggtcccagatgcagccggaacttctctctatgtccgccctgtgcttatcgggaatgaaccttctctcggtgtctcccaacccactcgggcattgcttttcgtgattctgtgccctgtgggggcatacttccccggaggttcagttacgcctgttagcctcttagcggatcccgctttcataagggcgtgggtggggggagtgggtaactacaaactcggtgggaattacggaccaacagtcctggtgcagcaagaggcactgaaaaggggctgcgaacaagtgctgtggctgtacggccctgatcaccaattaaccgaagtgggaaccatgaacatctttgtctattggacccacgaggatggcgtactagaactggttacccctccactcaacggtgtcattctccccggagtggtgcgccagtcactgctggatatggcgcagacctggggggagtttagggtggtcgagagaacaatcaccatgaagcagctgctccgcgcactcgaggagggtcgtgtccgggaagttttcgggagcggtactgcctgtcaggtctgtcctgtccaccggatcctgtacaaggacaggaatctgcatattccaacgatggagaatggcccagaactcatcttgcgcttccagaaagaattgaaagagatccagtatggaatcagagcacatgaatggatgtttcccgtgtag

SEQ ID NO: 216117 - DNA, 1338 bp, synthetic construct
  misc_feature 1..1338: note = Description of Artificial Sequence: Synthetic coding sequence
  source 1..1338: mol_type = other DNA
atggcggtcgccatcgccgcagcccgagtctggaggctgaaccggggtctttctcaggccgcactgttgcttcttcgccaaccaggggctcgcggtctcgcgagatctcatccacccagacaacagcaacaattctcctccctcgacgacaagccgcaatttcccggtgcatctgctgaattcatagataagctggaattcatacagccaaacgtgatatctggaataccaatttaccgcgtgatggatcgccagggacaaatcattaacccaagtgaagatcctcacttgccaaaagagaaggtgctcaaactttacaaaagcatgacactcctgaacacaatggaccgaattctctatgaatctcagcgacaggggagaatctctttttacatgacaaactatggtgaggaggggacccacgtgggttccgccgcagccctggacaacacagatctcgtgttcggtcagtatcgcgaggccggtgttttgatgtacagagattacccgctcgagctgtttatggcccagtgttacggcaacatcagcgatttgggcaaggggaggcaaatgcctgtccattacggttgtaaagagcggcactttgttactatttcctctccgctcgctacacagatacctcaggcagtcggtgctgcctatgctgctaagcgtgccaatgccaacagagtcgttatatgctactttggcgagggcgcagcttctgagggggatgcacacgctggatttaacttcgccgcaacgctggaatgccccatcattttcttttgccgcaataacgggtatgccattagtactccaacttccgaacaatacaggggggacgggatcgccgcaaggggcccaggttatggaatcatgtccattagggtggatgggaacgacgtttttgctgtgtacaatgctactaaagaggcccgaagaagggccgtagccgagaatcagccatttctgatcgaggccatgacatatcgtatcgggcatcacagcacatccgatgattccagcgcttataggagtgtagatgaggtgaattattgggacaaacaagatcatcctatatcccgactgaggcactacctactgtctcagggctggtgggacgaagaacaggagaaagcgtggaggaagcagtcccgaagaaaggtgatggaagcgttcgagcaagcggaaagaaaacccaagcccaatcccaacctgctgttctccgacgtttaccaggaaatgccagctcagctgagaaagcagcaagaaagcctcgctcggcacttgcagacttacggggagcattatcctctggatcacttcgacaagtag

SEQ ID NO: 216118 - DNA, 1212 bp, synthetic construct
  misc_feature 1..1212: note = Description of Artificial Sequence: Synthetic coding sequence
  source 1..1212: mol_type = other DNA
atggctgtcgccattgcggcagcaagggtgtggcgcctcaatcgagggctgtcacaggccgctctgctgctgcttcggcaacctggcgcaagggggctggccagatctcaccccccacgccaacaacagcaattttcctcactcgacgataagcctcaattccccggagctagcgcagagtttattgataagcttgagtttatccagccaaatgtgatttccggcatcccaatctatagggtgatggacagacaaggacagatcataaaccccagcgaggacccacatctaccaaaggaaaaggtccttaagctgtataagtctatgactttgttaaacacaatggaccgcattctgtacgaatcccagagacagggcagaataagcttttacatgaccaactacggtgaggagggaacgcatgtgggatcagccgcagcattagacaatacagatttagtgttcggacagtacagagaggcaggggtgctcatgtatcgagactatcccctagaactgttcatggcccagtgttacggtaatatttctgacctcggaaagggcagacagatgcctgtgcactacggctgtaaagaacggcatttcgttacgatctcaagccccctggccacacagataccccaggctgtcggtgccgcatacgccgcaaagcgggctaatgctaatcgggtagtgatctgctatttcggtgagggcgcagccagcgaaggtgacgctcacgcgggatttaatttcgccgctactctggagtgtcctatcatctttttctgtcgtaataatggttatgctatcagcacgccaacttctgaacagtataggggagacggaatcgccgcacgtgggcctggatatggtatcatgtcaattcgcgttgatggtaatgatgttttcgcggtttatacagccaccggcggtccaaaggcacgagcctccgtagggccttcgtccccttccactactgggacatgtggaatcatgatgcctctgcatgcaatgggactgtggcaccctgtctctcaccagcaggaactgtcagccgcacctaagcctaagggtacaacaaagcccattctcgagtcatacttgaagagtcatttactgggacacagccggtaccagctttacatccaccaggatgctgtccgaagagagaagccccagagcaatttgaacagggagtcactgatttag

SEQ ID NO: 216119 - DNA, 1179 bp, synthetic construct
  misc_feature 1..1179: note = Description of Artificial Sequence: Synthetic coding sequence
  source 1..1179: mol_type = other DNA
atggcggtggtggctgccgctgccggttggctcctgaggctgagggcggctggagccgaggggcactggcgacgcctgcctggagcgggactagccagaggattccttcatccagccgcaaccgtggaggatgcagcccagagacggcaggtagctcactttaccttccagcctgaccctgagccgcgagagtacggacaaacccaaaagatgaacctgtttcaatccgtgacttccgccctggataattcactcgctaaggatccgaccgcagtcatctttggggaggatgtggccttcggtggtgtattcagatgtactgtgggtctacgcgataagtatggcaaggacagagtatttaatacgccattatgtgaacaaggaattgtcggatttgggataggtatcgcagttaccggcgctacggcgattgcggaaattcagtttgccgactacatattccctgcttttgatcagatcgttaatgaagcggctaagtatcgctatagatccggcgacttgtttaactgcggctctctgactatcaggagcccatggggatgtgtgggccacggtgctctctatcatagtcagtctcccgaggcttttttcgctcactgcccaggtatcaaagtcgtcattcctagaagtcccttccaagctaaggggctcctcctgagctgcatagaagacaagaatccctgcattttctttgagccaaagatcctgtacagagccgctgccgaagaggttcccatcgagccgtataatatcccattatcccaggcagaggtgatccaagaaggcagcgatgtaactcttgtggcttgggggacacaagtacacgttattcgggaggttgcctcaatggctaaagaaaagctcggagtcagctgcgaagtgattgatctgagaaccatcatcccatgggatgtggatacaatctgtaagtccgtgatcaaaaccgggcgactgctgatatctcacgaggcaccactaacaggcggttttgctagcgaaatttccagcacagtgcaggaggagtgctttcttaatctcgaagcccctataagtcgtgtatgcggatatgatactcccttccctcatattttcgagccattttacattccggataagtggaaatgttacgatgcgctgaggaagatgatcaactattag

SEQ ID NO: 216120 - DNA, 1179 bp, synthetic construct
  misc_feature 1..1179: note = Description of Artificial Sequence: Synthetic coding sequence
  source 1..1179: mol_type = other DNA
atggccgtagttgccgctgccgctggttggctgcttaggcttcgtgctgcaggcgctgagggccactggcggcgactcccgggagccggattggccagaggcttcctgcacccggctgcaactgtggaggacgccgctcagcgacgccaggtggctcactttaccttccagccagaccctgagcccagggaatatgggcaaacacaaaagatgaacttgtttcagtcagtaacaagcgctctggataattctcttgccaaggatcccactgccgtcattttcggggaggatgtggcgttcggaggggtctttaggtgtactgttgggctgcgtgataaatacgggaaggaccgggtgttcaatacccccttatgcgagcagggcattgtgggatttgggatcggaatcgccgtaaccggcgctaccgcaattgccgaaatccaatttgctgactacattttccccgctttcgaccagatcgttaacgaagctgctaaatacaggtacagatccggtgaccttttcaactgcgggtctctcaccatcaggtcgccctggggatgcgtcggccatggcgcactgtaccactcccagtccccagaggcctttttcgcgcattgcccaggcattaaagtagtcatacctcgctctccattccaagcgaaaggtctgcttttgtcttgcatagaagacaagaatccatgcatcttcttcgagcccaaaattctctaccgagcagccgctgaggaggtccctatagaaccgtataatatccccctgtcccaagcagaggtgatccaggaagggagtgacgtcaccctggtggcctggggcacacaggtgcacgtgatcagagaggttgcatctatggcgaaagagaaattgggcgtgagttgtgaggtaattgacctacgcacaatcataccatgggatgtagatactatctgtaagagtgtgattaaaaccggtaggctgttaatatctcatgaagcccctctcaccgggggatttgcctcggagattagctccaccgtgcaggaagagtgtttcctaaacttagaagccccaatatcccgggtctgtgggtatgatacacccttcccccacatctttgagcccttctatatccccgataagtggaagtgctacgacgctctaaggaaaatgatcaactattag

SEQ ID NO: 216121 - DNA, 657 bp, synthetic construct
  misc_feature 1..657: note = Description of Artificial Sequence: Synthetic coding sequence
  source 1..657: mol_type = other DNA
atggctgtcgtggctgccgctgcaggatggctactcagactgagagctgccggagcggaaggccattggaggagactgccgggagctggtttggccagaggattcctgcaccctgctgccaccgtagaggacgctgctcagcgtcgccaggttgcccacttcacttttcagcctgatcctgaacccagggagtacggccaaacgcagaagatgaacttattccagtctgtgacttctgccctggacaattctctagccaaggaccccacagccgttatatttggtgaagatgtggcctttggcggtgtattccggtgtactgtgggtctgagagacaaatatgggaaggaccgggtctttaatacacccttatgcgagcaaggcattgttggcttcgggataggaatcgccgtcactggggcaactgccatcgccgaaattcaatttgcggactatatcttccccgcattcgatcaaatcgtcaatgaggcggcaaaatacaggtacaggtctggagacttgttcaactgtggatctctgacaatccgatcaccttggggttgcgtgggccatggtgccctctaccattcacaatccccggaggccttcttcgcacactgccctgggatcaaaatcaaggtgatcagtctaagctag

SEQ ID NO: 216122 - DNA, 969 bp, synthetic construct
  misc_feature 1..969: note = Description of Artificial Sequence: Synthetic coding sequence
  source 1..969: mol_type = other DNA
atgaacttgttccagagcgtgacctctgccttagataacagtctcgcaaaagaccctactgcggtgatatttggggaggatgtggcttttggcggagtatttcgttgtacagtgggcctacgagacaaatacggaaaagatagggtgtttaacactccgctctgcgagcaggggatagtcggttttggaattggcattgccgtgacaggtgctaccgccattgccgagatacagtttgctgattacatctttcccgctttcgatcagatcgtgaacgaggctgctaagtatcgataccggtcaggggatctgttcaattgcggctcgctgaccatacgtagcccttgggggtgtgtgggtcacggcgctttataccatagtcagagcccagaagcttttttcgcacattgtccaggcatcaaggtggtcattccacgttcaccattccaggctaagggcctgctcctgtcgtgtatcgaggacaaaaatccatgtatattttttgagcccaaaatcctgtaccgcgctgccgcagaggaggtgccaatcgagccatacaacatacctttaagccaggccgaagttatacaagaagggtccgatgttacgctggtggcttgggggactcaagtgcacgtcatccgagaggtggcatcaatggcaaaggaaaagctgggtgttagctgcgaggtcatcgacctgagaacaatcatcccctgggatgtggacactatttgtaagagtgtgatcaagaccggcagactgctgataagccacgaggcccctctcacagggggtttcgcaagtgagatctcttcgactgtccaggaggagtgttttcttaacctggaagcccctatctcacgggtgtgcgggtatgacaccccattccctcacatctttgaacctttctacatccctgacaaatggaagtgttatgacgcgctgcgcaaaatgatcaactattag

SEQ ID NO: 216123 - DNA, 657 bp, synthetic construct
  misc_feature 1..657: note = Description of Artificial Sequence: Synthetic coding sequence
  source 1..657: mol_type = other DNA
atggccgtcgtggccgcagccgctggctggctgctgcgcctcagagccgcaggagctgagggccactggaggaggcttccaggagccggtctggcaagagggttcctgcaccccgcagccaccgtggaggatgctgcacagcgaagacaagtcgcccattttacattccagccagaccctgaaccacgggaatatggccagacacagaaaatgaacctgttccagagcgtaactagcgctctggataatagcttagctaaggacccaactgcagtgatctttggtgaggacgtggcttttggcggtgtgtttagatgcacagtcggactgagagacaaatacggcaaggatcgcgtctttaacacgcccctgtgtgagcaggggatcgttggattcggcatcggtattgcagtgaccggcgctacagccatcgccgaaatccagttcgcagactacatcttccctgcgtttgaccagatcgtcaacgaggctgcaaagtacagatatcgctctggggatctgttcaattgcggctctctgacaataaggtctccctggggctgcgtgggccacggagccctctaccactcccagagtccggaggcttttttcgcccattgccccggtatcaagattaaagttatctctctcagctag

SEQ ID NO: 216124 - DNA, 1779 bp, synthetic construct
  misc_feature 1..1779: note = Description of Artificial Sequence: Synthetic coding sequence
  source 1..1779: mol_type = other DNA
atgtctgtcagtctggtcgtcattcgcctcgagctggccgaacattcaccagttccagcagggtttgggttttctgctgctgccggtgaaatgagcgacgaagagatcaaaaagacaacgttggcctctgcagtggcctgcctggagggcaagtccccaggcgagaaggttgccattattcatcagcacctgggacgccgagaaatgacagatgtgatcatcgaaacaatgaagtctaaccctgatgaacttaaaactacagttgaggagagaaaatcatccgaagcatccccaactgcacaaagatctaaggatcattccaaggaatgcattaatgccgctccagacagcccctccaagcagctgcctgaccagatcagtttttttagtgggaacccatccgtcgagatagtgcatggaatcatgcatttgtataagacaaacaagatgacctccctgaaggaagacgtcaggcgcagcgctatgctatgcatcctgactgtgcccgcagccatgacatcgcatgacctgatgaagtttgtagccccatttaatgaagtcatcgaacagatgaaaatcattagggacagcacgcctaaccagtacatggttctcattaaattcagagcccaggccgatgccgatagtttttatatgacctgtaatgggagacagttcaactccattgaggatgacgtttgtcaactggtgtatgttgaaagagcagaggtgctgaaaagtgaagacggcgcaagcctccccgtcatggacttgacagaactgcccaagtgcaccgtatgcctagaaagaatggatgagagcgtaaatggcatcctaacaaccctgtgcaatcattcgttccactctcagtgtctgcagcgctgggatgacaccacatgcccagtgtgcagatactgccagacacctgagccggtggaggaaaacaagtgcttcgaatgcggcgtgcaggagaatctgtggatctgtctcatttgtggccacattggatgcggccgatatgtgtcaagacacgcttacaaacacttcgaagagacgcagcatacctacgcaatgcaactaaccaaccaccgcgtctgggattatgcaggcgacaactatgtgcataggctggtggcttccaagactgatggcaaaatcgttcaatatgaatgcgagggggatacatgccaggaggagaaaatcgacgccctgcagctcgaatactcctacctactgacctcacagttagagagtcagagaatctactgggagaataaaattgtgagaatcgagaaagatacagccgaggagatcaacaatatgaagacaaaattcaaagagaccatcgaaaaatgtgataatctggagcacaagttgaacgatctgctgaaggagaagcagtctgtggagcggaaatgtactcagctaaataccaaggtggccaaactcacaaatgaattgaaagaggagcaggagatgaataaatgcctacgggctaatcaagtcctgctgcaaaacaaactcaaggaggaggagcgagtattgaaagagacatgtgaccagaaggatcttcagattacagagatccaggaacagctgcgagatgtcatgttctatctcgagacacaacaaaaaattaaccacctcccagccgagacccgacaagaaattcaggagggccaaatcaatattgcaatggcaagtgcctccagccctgcatccagcggcggatcaggaaaacttccgagccgcaaaggccgatcaaaacggggtaaatag

SEQ ID NO: 216125 - DNA, 1242 bp, synthetic construct
  misc_feature 1..1242: note = Description of Artificial Sequence: Synthetic coding sequence
  source 1..1242: mol_type = other DNA
atgcatttatacaaaactaataagatgacctctcttaaggaagatgtgcgcagaagcgcaatgctgtgcatcctgactgtcccggcagccatgacctcccatgacctcatgaaatttgtggcgccttttaatgaggtgatcgagcagatgaaaattatacgcgactccacccctaatcagtatatggtgctgattaagtttagagctcagggggcttccctgccagtgatggatctgacagagctgcccaaatgtactgtgtgtttagagaggatggatgaatccgttaatgggatcttaaccacactctgtaaccattcattccatagccaatgtttacagcgctgggatgatacaacctgtcccgtctgtagatattgtcagacccctgaacctgtagaagaaaacaagtgctttgagtgcggcgtacaggagaatctttggatttgcctgatctgtggccacatcggttgtggcagatatgtgtcaagacacgcatacaaacacttcgaagagacccagcacacctacgcgatgcagctgacaaaccaccgcgtgtgggactacgctggagacaactatgtgcaccgcttggtcgcaagcaaaacagatggcaagatcgttcagtacgagtgtgagggcgacacttgccaggaagagaagatagatgcactgcagttggaatattcatatctcctaacctcacaattagagagccaaaggatttactgggagaataaaatagtgagaattgagaaagatactgcagaggaaatcaataatatgaagaccaagttcaaggaaacaatagagaagtgcgataacttggagcacaaactgaacgacctgctgaaagaaaaacagtcagtggagaggaaatgcacacagttgaacacaaaagtggcaaaactgactaatgagttgaaggaagagcaggaaatgaacaagtgcttgcgggctaaccaggttctgctgcagaacaagcttaaagaggaggagagagttttgaaggagacatgtgatcagaaagaccttcagattactgagatccaggagcagctgagggacgtgatgttttatcttgagactcaacagaagatcaatcatctgcccgctgaaacccgtcaggaaatccaggaagggcaaattaacatagctatggccagcgcaagctccccagcatcttccggtggcagcggaaagttgccatcacgaaagggcagatctaaaaggggcaaatag

SEQ ID NO: 216126 - DNA, 2136 bp, synthetic construct
  misc_feature 1..2136: note = Description of Artificial Sequence: Synthetic coding sequence
  source 1..2136: mol_type = other DNA
atgaataagggctggttggaactggaaagcgacccaggcctgttcaccctattagtggaggactttggtgtcaagggcgtccaggtcgaggagatctacgacttgcagtccaagtgccagggacctgtgtatggattcatctttctctttaaatggattgaagagaggcgttccagaagaaaagtgagtacactggtcgacgacacaagtgtgatcgatgatgatatcgtgaacaatatgttctttgcccatcaacttattcctaattcctgtgctacacacgctttgttgtcagttctgctcaattgcagttctgtcgatctggggcctaccctatccaggatgaaagacttcaccaaaggttttagccctgaaagtaagggctacgctatcgggaatgccccagagctggctaaggcccacaacagccacgcccgaccagaaccacggcacctgcctgagaagcagaatggtctcagcgcagttcggacaatggaagctttccactttgtttcctatgtccccattaccggtcggctgtttgaactggacggcttgaaggtgtatcccatcgatcatggaccttggggcgaggacgaagagtggactgataaagcccgtagggtgattatggagaggatcgggttggctactgccggtattaagtacgaggctcgcctgcacgttcttaaggtcaacaggcaaaccgtgctcgaggctctccaacaacttataagagtgacacagccagagctgatccagacgcataagagtcaggagagccaactcccagaggagtcaaagtctgcttctaataagagtccactcgtgctggaggccaatcgcgctccagctgccagtgaaggcaaccacacagatggtgcggaggaagccgcagggtcttgcgcccaggcacctagccatagccctcctaataaacctaagctggtggtaaagccaccagggtccagtctgaacggggtgcatcctaacccaacccccatcgtccagcgcctgccggcattcctggacaatcacaattacgccaaaagtcctatgcaggaagaggaggacctggcagccggtgtaggtagatctcgggtgcccgtgagacccccacagcagtatagcgacgacgaagacgactacgaagatgatgaggaagatgacgtccagaatacgaatagtgccctgcgatacaaaggaaaagggacaggtaaaccaggagcgctatcgggctctgccgacgggcagctgtcagtcttgcaacctaatacaatcaacgtgttggcagagaagctaaaggaatcccagaaggacctcagtatcccgctgtcaataaagaccagcagcggagctgggtcacctgctgtcgccgtccccactcactcccaacccagccctacaccctcaaatgaaagcactgacactgcctccgagattggatccgccttcaactcccccctcagatcacccattcgttcggctaacccaacacgtcctagcagcccggtgacttcacacatatccaaggtcctctttggagaagacgatagcctattgcgggtcgactgcattcgctacaatcgggctgtaagggaccttggaccggtcatatctaccggactcttgcacctagcggaggacggagtgctgtcgcccctggcactgactgaaggagggaaaggaagcagtccctccatccggcctatccagggaagtcagggcagcagctcccccgtcgaaaaggaggtagtggaagccacagactcacgagaaaagacagggatggtccgtcctggcgaaccattatctggcgaaaaatatagccctaaggaactacttgccctgcttaagtgtgttgaggctgagattgcaaactatgaagcctgtttaaaggaagaggtcgagaagaggaaaaagtttaaaatagatgatcaacgacgcacacacaattacgatgagttcatctgcaccttcatcagtatgctggctcaggagggcatgctggctaatctggttgagcagaatatatccgtgaggaggcggcaaggcgtgtctatagggagacttcataaacagaggaagcctgacaggaggaagcgtagccggccatataaagcaaaaagacagtag

SEQ ID NO: 216127 - DNA, 2190 bp, synthetic construct
  misc_feature 1..2190: note = Description of Artificial Sequence: Synthetic coding sequence
  source 1..2190: mol_type = other DNA
atgaacaaggggtggctggagctggaaagcgaccctgggttgttcactctcctggtggaggactttggagtcaagggagtccaagtagaggaaatttatgaccttcagtctaagtgccagggtccagtttacggttttattttcctattcaaatggatcgaggaacggagaagccgccgtaaggtttccaccctcgtggatgacacatctgttatagatgatgacattgtgaataacatgtttttcgcccaccaattaatccctaacagctgtgcaacacacgccttgctgagtgtgcttttgaattgctccagcgtggatctaggaccaacactcagccgcatgaaggatttcaccaagggcttttctcctgaaagcaaaggatatgctataggcaatgccccagagttagcaaaggcccataatagtcacgcacggccagagcccaggcacctgccagaaaaacaaaatgggctctccgcagtacgcaccatggaagctttccactttgtgagttacgttcccataacagggagattatttgagctagatggtctgaaagtctatccaattgaccatgggccatggggagaagatgaagagtggacagataaggcccgaagggtgataatggaaaggattgggcttgccacagcaggcgagccttaccatgatattcggttcaacctgatggccgtcgtgcctgatcgtaggattaagtatgaggccagattgcacgtactaaaagtaaataggcagacagtgctagaggcattacagcagctaatcagagtgacccaacctgagctaatccagacccataagtcccaggagtcccagctgcccgaggagtccaagtcggcctctaataaatcgccactggtgctcgaagcaaatcgtgcccctgctgcttcagagggcaaccacactgatggggcagaagaggccgctgggagctgtgcacaggctcccagccactctcctccaaacaagccaaagttagtagtcaagcctccagggagcagccttaacggagtgcaccccaatcccactccgatcgtacagcggctgccagccttcctggacaatcataactacgccaaaagccctatgcaggaggaagaggacctcgcagctggcgtgggcagaagccgggtgccagttaggcctccccagcaatatagtgacgatgaagacgattacgaagatgatgaggaggatgacgtgcagaatactaacagcgccctgaggtacaaaggaaaggggaccgggaaaccaggcgcactcagcggaagcgcagatgggcagctttcagtgttacaacctaacaccattaacgtgttagccgagaagctcaaggagtcccaaaaggatcttagtattcccctttcaatcaaaacgtcgtccggagctggcagccccgctgtggctgtacctacgcacagccaaccgtctccaaccccaagcaacgaatccacagacactgcctctgagattggatccgcctttaattcacctctacgaagccccattcgctctgctaaccccacccgtccctcctctcctgtaacctcccacatcagcaaagtgctgttcggagaagacgactcactcctaagggtcgattgcatcaggtacaaccgagccgttcgcgaccttgggccagtgatttccaccggcctgctccacctggccgaggacggtgttctgtccccgcttgccctgacagagggaggcaaggggtcttcaccgtccatcaggcccatccagggcagtcagggcagctcgtctcccgtagaaaaggaggtggttgaggccaccgacagccgagaaaagacaggcatggtcagaccaggagagcccttaagcggtgagaagtacagtccgaaagagctgttggccctcctgaaatgtgttgaggccgagatcgccaactatgaagcctgtctgaaggaagaggtagagaaacggaaaaaatttaagatcgacgaccaacgcagaacccacaattacgatgagttcatttgcaccttcattagtatgctagcccaggaaggtatgctggcaaacctggtcgagcaaaacatcagtgtacgcaggcggcagggtgtgtcaatagggaggctgcacaaacagaggaagcctgaccggcgtaaaagaagtcggccttacaaggccaagcgccagtag

SEQ ID NO: 216128 - DNA, 879 bp, synthetic construct
  misc_feature 1..879: note = Description of Artificial Sequence: Synthetic coding sequence
  source 1..879: mol_type = other DNA
atggccgtgcaggtggtgcaggctgtgcaggccgttcacctagagtcagacgctttcttggtgtgtctcaatcacgccttatcaacggaaaaagaagaggttatgggattatgcattggggagcttaacgatgacacatcccgtagcgatagtaagttcgcttataccgggacagagatgcggaccgtcgcagaaaaggtggatgccgtgagaatagtgcacattcatagcgtgatcatccttcggcgaagcgataagagaaaggaccgggtggagatctccccagagcaattaagcgctgcctcaacagaagccgagaggctggccgagctcaccgggcgacccatgagagtcgtgggttggtaccactcacaccctcacattactgtttggcccagccacgtggatgtgagaacccaggcaatgtatcagatgatggaccagggattcgtcggtctgatattttcgtgctttatagaggacaagaacactaagactggcagggtgttatatacatgctttcagagcattcaggcacagaagagtagtgagtatgaacggattgaaattccgatccacattgtaccccacgtgaccatcggcaaagtttgtttagaaagtgccgtggagctcccaaaaatcctgtgccaggaggagcaggacgcgtatcgacggattcatagtcttactcatcttgactccgttaccaagatccataacggcagtgtgtttaccaagaatttatgctcacagatgtctgcagtttcaggtcccttattgcaatggttggaggacaggctcgagcagaatcaacagcatcttcaagagctacagcaggaaaaggaagagctgatgcaggaactatcttccctggaatag

SEQ ID NO: 216129 - DNA, 876 bp, synthetic construct
  misc_feature 1..876: note = Description of Artificial Sequence: Synthetic coding sequence
  source 1..876: mol_type = other DNA
atggccgtgcaggttgtacaggccgttcaagcagtccacctggagtccgatgcctttctggtttgcctcaaccatgccttgtcgacagaaaaagaggaagtgatggggctgtgtattggggaactaaacgacgacacaaggtccgactctaagttcgcttacaccgggacggaaatgaggacagtagctgagaaagttgacgctgtgcgtatcgtgcatattcactctgtaatcatactccgtcggtccgataaaaggaaggaccgcgtggagattagccctgagcagctcagcgctgcttctacagaggctgaacgccttgctgagttgacggggagacctatgcgcgtcgtggggtggtatcattcccacccgcatatcactgtgtggcccagccacgttgatgtgaggacccaggccatgtaccagatgatggatcagggttttgttggcctcatattcagctgttttatcgaagacaagaacactaagacgggcagggtattgtacacctgttttcagtctattcaggcacagaaaagctctgaatatgaaaggatcgaaatcccaattcatatcgtgccccatgtgacaattggcaaggtctgcctcgagagcgccgttgaactcccaaagattctgtgccaagaggagcaagatgcttataggagaatacactccctgacacatctggatagcgttaccaagattcacaacggctctgtcttcactaagaacttgtgctcgcagatgtccgccgttagcgggcctctgctgcagtggttagaggatcgactagaacaaaatcagcagcacctacaggaacttcagcaggaaaaagaagagttaatgcaggagctgtcgtccttggaatag

SEQ ID NO: 216130 - DNA, 951 bp, synthetic construct
  misc_feature 1..951: note = Description of Artificial Sequence: Synthetic coding sequence
  source 1..951: mol_type = other DNA
atggctgtgcaggtagtgcaagccgtgcaagccgtgcacctagaatccgacgctttcctagtctgtctgaaccacgccctgtccacggagaaggaggaggtgatgggcctgtgcattggcgaattaaacgatgacacgcgctccgacagcaaattcgcttatactggcaccgaaatgaggacagtagcagagaaggtggatgctgtcagaatagttcacatccattccgtcataatactcagaaggtctgacaagcggaaagatagggtcgagatcagccccgagcagctgtcggccgcttctaccgaagctgaacggctggccgagttgactggacgtcccatgagagtggtaggctggtatcactcacatccacacatcactgtttggccctcccacgttgatgtaaggactcaagccatgtaccagatgatggatcaggggttcgtaggattgatatttagctgttttatcgaagacaagaacaccaaaaccggacgggtcctgtacacatgtttccagtccattcaggcccagaagagctctgaatccctgcatggccctcgagatttctggtcttcttctcagcatatcagcatcgagggccaaaaagaagaagaacggtatgaacgtattgagataccaattcatatagtgcctcacgttacaattggaaaggtttgcctggaatcggctgtcgagctgccaaaaatattgtgccaggaagaacaagatgcgtatagacgcattcatagtctgactcatctggatagtgtgacgaagattcacaacggaagtgtattcactaagaacttatgtagtcaaatgagcgctgtgagcgggccactgttgcagtggctagaggacaggctggagcagaatcaacaacatcttcaggaactgcaacaagagaaggaagagttaatgcaggaactgtccagccttgaatag

SEQ ID NO: 216131 - DNA, 954 bp, synthetic construct
  misc_feature 1..954: note = Description of Artificial Sequence: Synthetic coding sequence
  source 1..954: mol_type = other DNA
atggcagtacaagtggtgcaggcagtccaggctgtccacctggaatccgatgctttcctggtgtgcctgaatcacgcactctcaactgagaaggaggaagtgatgggcctctgcatcggtgaagtgagctccccgtctagatccgattctaagtttgcctatactggcactgagatgcgtacagtggctgagaaagtcgacgcagtgcgcatagtgcacattcactcagtgatcatcctgcgcagatccgacaaaaggaaagaccgcgtggaaatcagtcccgagcaactatccgcagcctccaccgagacccacaggctggccgaactcaccggacggcctatgcgggtagtgggttggtaccatagccaccctcatatcaccgtctggccctcacatgtggacgtgcggacccaagcaatgtaccaaatgatggatcagggctttgtcgggttgatcttctcttgctttattgaagacaaaaatactaaaacagggcgtgtgctttacacgtgctttcaaagtattcaggctcaaaaatcatcagaaagtctgcacggccctagagatttttggagcagtagccagcacatttccattgaggggcaaaaagaggaggaaagatatgagaggattgagatacctatccatattgtaccgcatgtaacaattggaaaggtgtgtctggagtcggcggtggaattgcctaaaatcctttgccaagaggaacaggatgcctatcgcagaatacattctcttacccacttggatagtgtgaccaaaatacacaacggaagcgaagtatttactaagaatctttgtagccagatgtccgccgtgtccggtcctcttctgcagtggttagaagaccgactggagcagaaccagcagcacctgcaagaattgcagcaggagaaagaagagctgatgcaagagctctcaagccttgagtag

SEQ ID NO: 216132 - DNA, 747 bp, synthetic construct
  misc_feature 1..747: note = Description of Artificial Sequence: Synthetic coding sequence
  source 1..747: mol_type = other DNA
atggccgtgcaagtcgttcaggccgttcaggccgtacatcttgagagcgacgcttttctcgtctgtctgaatcatgcactgtctaccgaaaaggaagaagtaatgggcttgtgcatcggcgaagtttcgagcccaagccgctcagacagtaagttcgcctataccgggacagagatgcgcaccgttgccgagaaggtggacgcggtgcgaatagtccacattcactccgtaataatcctgaggagatctgacaaacggaaggacagagtcgaaatctcacctgagcagctcagtgctgcaagcacagaaacacatcgcctggccgaactgaccggtaggcctatgcgcgtagtgggctggtatcactcccacccacatataactgtgtggcctagtcacgtcgatgtaaggactcaggctatgtatcagatgatggaccaggggtttgtggggcttattttttcatgctttattgaagataagaatactaagacagggcgtgtcctatacacgtgtttccagtctatccaagcccaaaagtcaagcgaccttacacatctggatagtgtaacaaaaatccacaacggaagcgaggtattcacaaaaaatttgtgttcccagatgtctgctgtgtccgggcctttactccagtggctggaagaccgtctcgaacaaaaccagcagcatcttcaggagcttcagcaggagaaagaggagttgatgcaggagctgagctctctggagtag

SEQ ID NO: 216133 - DNA, 1845 bp, synthetic construct
  misc_feature 1..1845: note = Description of Artificial Sequence: Synthetic coding sequence
  source 1..1845: mol_type = other DNA
atgggaaaccagatgtccgtcccccagcgggtcgaggaccaagaaaatgaaccagaagcagaaacttaccaggataacgcctcagctctcaatggagtgcccgtggtggtctccacacatactgtgcagcatctggaggaggttgatctcgggatatcagtaaagaccgacaatgtcgctacaagtagccccgagaccaccgaaataagcgccgtggctgacgccaatggaaaaaatctgggaaaggaggcaaagcccgaggcacctgcagctaagtcccgattctttttaatgctttcccggccagtgccaggtagaacgggcgaccaggctgcagatagttccctcgggtcagtaaagctggacgtgtcttccaataaagcccctgccaacaaagacccttctgaatcctggacactgccagttgcagccggtccaggccaggacactgacaaaacccccggacacgcaccagctcaagataaggtgctgtcagctgctcgcgaccccaccctgctgccacctgagaccggtggcgcagggggagaggctccatccaaaccaaaggattcctctttcttcgacaagttcttcaagctggataaggggcaggagaaggttccgggagattcccagcaagaggcgaagagagcagagcaccaggacaaggttgacgaggtgcccggactaagcgggcagtcagacgatgtgcctgcaggtaaagatatcgtggacggtaaagaaaaagaggggcaggaactgggtaccgccgactgctcggtgcccggagatcctgaaggtctcgaaacggcaaaggacgattctcaggccgcagcgatcgccgagaataacaattctataatgtctttcttcaagacccttgtgagtcccaacaaggcagagactaagaaggatccagaggatacagccagcaaggccgagagcgtttgcgacgggcaggccggacagaagacctcggaaatacaggcaagaggaaccaagaaaaaacacctggactcacctcgtctgggcctggcctttaggaagttttttcggcataagggcgctgagaaatctcccacgaccagcgccgacctgaagtccgacaaagccaactttacctcacaagaaacacagggcgcaggcaaaaattctaagggatgtaacccctccggacatacgcaatcagtgaccactcccgaaccagccaaggaagggaccaaggagaagtccggaccgaccagcctgcccttaggtaagcttttctggaaaaaggttgtatgcgaatcccccgttgagatcattaagtccaaagaggtggaaagtgctctccagacagtggatctaaacgagggggacgccgcaccagagccaacagaagcgaagctcaagcgcgaggaatcaaagcccaggacatctctcatggctttcctccgccaaatgacttcggattccacggaaaagaccattactccaccggagccggaaccaactggggctccacaaaagggcaaggaagggtcttctaaagataagaagtcagcagccgagatgaacaagcaaaaaagtaataaacaggaggccaaagaacccgcacagtgtaccgaacaggccaccgttgataccaattctctccagaacggcgataagttgcagaagcggcctgaaaagcgacagcaatccctgggagggtttttcaaggggctggggcctaaacgcatgctggacgctcaagtacagactgatccagtgtccattggtcccgtgggtaaaagtaaatacacaggaaaatgcgtgttctcccatgtcaagaagaaatggccatttcaggaatggagctattag

SEQ ID NO: 216134 - DNA, 1755 bp, synthetic construct
  misc_feature 1..1755: note = Description of Artificial Sequence: Synthetic coding sequence
  source 1..1755: mol_type = other DNA
atgggaaatcagatgtccgttcctcaacgggtggaagaccaggagaatgagcctgaggcagagacatatcaggacaatgcatcggcccttaacggggtacctgtcgtggtctccacacataccgttcaacatcttgaagaggtggacttgggaatatctgtgaaaaccgacaacgttgccaccagctcccccgaaaccaccgaaattagtgcagtagcagacgccaatggaaaaaacttaggaaaggaggcgaagccagaggcacccgcagctaaaagcaggttcttcctgatgcttagtaggccggtgcccggacgcacaggcgaccaagctgcggactcctccctcggttctgtcaaactggatgtatcctcgaataaggcacctgctaataaggacccctcagagagctggacccttccagtggccgctggccctggacaggatacggataaaacccctggtcacgctccggctcaggataaggtactcagcgccgctcgggaccctacactgctgccgccagagacagggggtgccggaggagaagcacctagcaaaccaaaggattcctcgtttttcgacaaattttttaaattagataaaggtcaggagaaggtacctggtgattcccaacaggaggctaagcgcgctgaacaccaggacaaggtggacgaggtgccgggactgtccggtcaaagtgatgatgtgccagctggcaaagacatcgtcgacggcaaggaaaaagaaggccaagagcttgggaccgctgattgttccgtccctggggatccagaaggcctagaaactgccaaagacgacagtcaggccgctgcaatcgccgagaataacaactctatcatgagcttctttaaaaccctggtgtctcccaacaaggcggaaaccaaaaaggaccccgaagacaccggcgctgaaaagagtcctaccactagtgccgatctgaagtctgacaaggctaacttcacttctcaggaaacccagggggctgggaaaaattccaagggctgtaacccaagcggtcatacccagagcgtaacaactccagagcctgccaaggaaggtacaaaagagaaaagtggcccaactagtctgcccctcgggaaactgttttggaaaaagagtgtcaaggaggactcagtgcctacaggggctgaagagaacgtagtctgcgagtcacccgtagaaatcatcaagtctaaagaggtggagagcgcgctgcagaccgtggatctcaatgagggtgacgctgcaccagagccgacagaagccaaattgaagcgtgaagaatccaaaccaagaacctccctgatggcattcttaagacagatgagcgtaaagggagatggagggatcactcactctgaggaaataaatggaaaagattcttcgtgccaaactagtgacagcacagaaaaaaccatcaccccaccggagccagagccaacaggggcaccgcaaaaaggcaaagagggatcatccaaggacaagaagtccgctgcagaaatgaacaaacagaagagtaataagcaagaggctaaggagccagcccagtgtaccgagcaggcaaccgttgatacgaactccttgcagaacggggataaacttcagaagcgccctgagaagcggcagcaaagcttggggggatttttcaagggtttggggcctaagcggatgctagacgcccaggtgcaaacagaccctgtctctattgggcctgtaggaaagtctaaatag

SEQ ID NO: 216135 - DNA, 495 bp, synthetic construct
  misc_feature 1..495: note = Description of Artificial Sequence: Synthetic coding sequence
  source 1..495: mol_type = other DNA
atgttgagtagaccagtgccagggcgtacaggggatcaggccgctgattcttctctgggctccgtaaaactcgatgtatctagtaataaggctccagccaacaaagacccgagtgagtcctggacactgccagtagctgctggacccggacaagatacggataaaacacccggtcatgcccctgcacaggacaaggtgctgtcagccgctcgggaccctaccttattgcctccagagaccgggggtgctgggggagaggcacctagcaagcctaaagatagcagctttttcgataaatttttcaagcttgacaagggtcaagagaaagtgcccggagactcccagcaggaggcgaagcgggcagaacatcaggacaaagtcgatgaagtgccgggtctctcaggacagagcgacgatgtgcccgcaggcaaggtgagtgtgccccgttgcatacacctggtgcttaacgcctgctcaggtgcgcttatgggctag

SEQ ID NO: 216136 - DNA, 753 bp, synthetic construct
  misc_feature 1..753: note = Description of Artificial Sequence: Synthetic coding sequence
  source 1..753: mol_type = other DNA
atgagctttttcaaaaccctcgtgtcccccaataaagcagaaacaaagaaagatccagaagataccgcctctaaagccgagtccgtgtgcgatggtcaggctgggcagaaaacctcagaaatccaagccaggggcacaaagaaaaagcatctcgattcccccagactaggcttggcttttcggaagttcttccggcacaagggggcagaaaaaagccccactaccagcgcggatctgaaatcggataaagccaatttcacctcacaggaaacccagggtgctggaaaaaattctaaaggttgcaacccctccgggcacactcagagtgtcaccacacccgagccagctaaggagggcactaaggaaaagagcggacccacctctctgccgctggggaagctgttttggaaaaaaacctccgacagtaccgagaaaactatcacaccgccagagcccgaacctactggggcaccacagaaaggtaaggagggtagttctaaagacaagaaaagtgccgcagaaatgaacaagcaaaaatccaataagcaagaagccaaagagcctgcgcagtgcacagagcaagctactgtggacaccaattcactgcagaacggggacaaattacagaaacgaccggagaaacggcagcagtctctggggggatttttcaaggggctgggaccgaagcgcatgctggacgcccaagtgcaaaccgaccctgtttccatcggaccagttggtaagtccaaatag

SEQ ID NO: 216137 - DNA, 1155 bp, synthetic construct
  misc_feature 1..1155: note = Description of Artificial Sequence: Synthetic coding sequence
  source 1..1155: mol_type = other DNA
atgagtgctccaatcaagctgcagcgcaccaagacccaggtgagagctggccactttcgctggcaactcgacagaggacgaacgcagatcaagcctcagggaacacctcgacccaaaacgcggtctagccttccacccggaatacctcggttctctcatctgagacagggtgagcaagaggaaaagcttcctccatccccgagaaccccttttttcgacaagttctttaaactcgacaaaggccaagaaaaagtccccggagattcgcagcaggaagcaaagcgggctgaacatcaggacaaagtggatgaagtcccagggctgagcggccagagcgatgacgtgccagccggtaaggacatcgtggatggcaaggagaaggagggtcaggagctaggaaccgcggattgctccgtgcctggcgatcccgaaggactggagacggcaaaagatgattcccaagccgcagccatcgctgagaacaacaatagcattatgtccttctttaaaacccttgtgagccctaataaagctgagacaaaaaaggatcctgaggataccggcgctgaaaagtctcccaccacctccgccgacctgaagagcgataaagccaattttacttcgcaagagacgcagggcgcagggaagaacagtaagggatgtaatccatccgggcatactcagtctgtgacaacccctgagcccgctaaggagggaaccaaggagaagagtgggcctacctccttgcctctggggaagttgttttggaagaaatccgtgaaggaagactctgtgcctaccggcgctgaggagaacacgtccgacagtaccgagaagactattacccctcccgagccagagccaactggggcaccccagaaagggaaggagggaagctccaaagacaagaaaagtgcagctgaaatgaacaaacaaaaaagcaacaagcaggaggcaaaggagccagcccagtgcactgaacaggcgactgtggacacaaactcacttcagaacggagacaagttgcagaaacggccagagaaaagacagcaaagcctgggaggtttcttcaagggccttggtcctaagaggatgcttgacgctcaggtgcagacggaccctgtgtctataggtcccgtgggaaagtccaagtag

SEQ ID NO: 216138 - DNA, 678 bp, synthetic construct
  misc_feature 1..678: note = Description of Artificial Sequence: Synthetic coding sequence
  source 1..678: mol_type = other DNA
atggccggtacaggccttgtagccggagaggtggtggtggatgccctgccgtattttgatcagggatatgaggcaccaggagtgcgcgaggcagctgctgcactcgtggaagaagagactcggcgataccgacctacaaaaaactacctgtcctatctgactgcgcctgattatagtgctttcgagaccgatattatgaggaatgagtttgagagactggcagctcgtcagcccatcgagttgctcagcatgaaacgttatgaactccccgctcctagttctggccagaagaacgatattactgcttggcaggaatgcgtcaataattctatggcccagttggagcaccaggccgtgaggatcgagaatttagaattgatgagccagcacggctgcaacgcttggaaggtgtacaacgagaacttggtgcacatgatcgaacacgcccagaaggagctgcaaaaattacgtaaacacatacaggatttgaattggcaacggaaaaatatgcagctcacagcaggctccaagctgcgtgagatggaatctaactgggtcagtctggtctccaaaaactatgagatcgaaagaaccatcgtccagcttgagaatgaaatctatcagattaaacaacagcacggtgaggctaataaggaaaatatccgccaggatttctag

SEQ ID NO: 216139 - DNA, 477 bp, synthetic construct
  misc_feature 1..477: note = Description of Artificial Sequence: Synthetic coding sequence
  source 1..477: mol_type = other DNA
atgcagagaacaggcggtggtgcccctaggcctggtaggaaccacggactgccaggctccttgaggcagcccgacccagtggccctcttgatgctgctggtggacgccgatcagcccgaacccatgcgaagcggcgctcgagagctcgctctgttcctcacacctgaacctggggcagaggccaaggaagttgaagaaaccatcgaggggatgttgcttagactcgaggaattctgctctctggccgatctgatcaggtctgacaccagccaaatcttagaagagaacattcccgtgctgaaggctaagctgaccgagatgagaggaatttacgctaaggtcgatagactcgagaaatcaccggctcctgttcctgtcacatatgaactgcccactctgtacaggacagaggattatttccccgttgatgccggtgaagcgcagcaccacccgaggacttgccctagacccctgtag

SEQ ID NO: 216140 - DNA, 570 bp, synthetic construct
  misc_feature 1..570: note = Description of Artificial Sequence: Synthetic coding sequence
  source 1..570: mol_type = other DNA
atgcagcgcacagggggaggagccccaaggcccggacggaatcatggcctccctggatctctgcggcagccggaccccgtggcactgttgatgctgctggtagacgcagaccaaccagaacccatgagaagtggtgcgagggagctcgcactcttcctcacacccgagcccggtgctgaggcgaaggaagtggaagagaccatagaagggatgctcctgcgccttgaagagttctgcagcctggctgacctaattagaagcgacacatcccagattttggaagaaaacatcccagtgctgaaagctaagcttaccgagatgaggggcatctacgctaaggttgatagacttgaggccttcgttaagatggtgggtcatcatgtggctttccttgaagcagacgtattgcaggccgaaagagaccatggagcatttccccaggccctgcggagatggttgggttcagcagggttaccttctttccgcaatctagagtgtagtggagccattctggcccattgcaatttgagactgagtgggtctagtgattctcccgcaagcgcctcttag

SEQ ID NO: 216141 - DNA, 636 bp, synthetic construct
  misc_feature 1..636: note = Description of Artificial Sequence: Synthetic coding sequence
  source 1..636: mol_type = other DNA
atgcagcggacgggcggtggagcacctcggccaggcaggaaccatggtttgcctggatcgctccgccagcctgaccccgtcgccttgctcatgttgctggtggatgcagaccagccagaaccaatgcgaagcggtgctagagagcttgcattattcctgacgcctgagcctggggcagaggccaaggaggtggaggagacaatcgagggcatgctactgcggttagaagagttttgtagtctcgcggatctgattaggtccgacacttctcagatccttgaggagaatatcccagttctgaaggctaagctaaccgagatgagagggatctatgcgaaggtggatcggcttgaagctttcgttaagatggtcggtcatcacgtggcattcttagaagctgacgtgcttcaggcggaaagggatcacggggcatttcctcaggccctgcggcgttggctcggatctgcagggctgccctccttcaggaatgttgagtgctccggcacaattcccgcaaggtgcaacctccggctaccaggtagttccgacagccccgcaagtgcatcacaggtagccggtataactgaagtgacatgcacaggcgctcgggacgtgagagctgctcacacagtttag

SEQ ID NO: 216142 - DNA, 612 bp, synthetic construct
  misc_feature 1..612: note = Description of Artificial Sequence: Synthetic coding sequence
  source 1..612: mol_type = other DNA
atgcagcggaccggcggaggcgctccgcgacccggacggaaccatgggctacctggatcactgagacagccagatccagtggcgttactgatgctgttggtggacgccgatcagcccgaaccaatgaggtcaggcgctagggaactggccctgttcctgacacctgaaccgggtgccgaggccaaggaggtggaagaaacaattgaaggcatgctcttgaggttggaggaattttgttcccttgccgacctgattcgatcagatacttcacaaattttggaggaaaatatcccagttctgaaagccaaactaactgaaatgcggggaatatacgcgaaggtcgaccgtctcgaggcatttgtgaaaatggtcggccatcatgttgctttcctggaggctgacgtgctccaggccgaaagagaccacggagctttcccccaggcccttagaagatggttagggagcgccggactgccaagctttcggaacaagagcccagcccctgtgcctgtgacctatgagctccctactttgtaccgcactgaagattatttcccggtggacgccggtgaagctcagcatcaccccagaacatgccctcggcctctatag

SEQ ID NO: 216143 - DNA, 627 bp, synthetic construct
  misc_feature 1..627: note = Description of Artificial Sequence: Synthetic coding sequence
  source 1..627: mol_type = other DNA
atgactggccgagtgtgcagagggtgcgggggaacagatattgaactggacgctgcccgaggtgacgcagtgtgcaccgcctgcggatcagtgctggaggacaacatcattgtgtctgaggtccagttcgtggagagcagcggcggaggatcttccgccgtcggccagttcgtctccctggacggagccggtaagactccaacgctggggggaggatttcatgttaatttgggcaaggaaagccgggctcagacactgcaaaacggcaggcgtcacatccaccacctcggcaatcagctccagctcaaccagcactgccttgacactgctttcaacttttttaaaatggccgtttcccgacatctcacccggggtcggaagatggcccatgtgatcgccgcatgcctgtatttggtctgtaggactgagggcactccccatatgctgttagatttgtcagacctgctgcaggttgattctctcagaccagcttcgttccccacctggggctgcgacctgggtgtggtcactagggtggtcacaggagtttatccaaggtgcctacacgcaagccaatggcccgtgtgtgccgcttgtcctgtcaggaaattctggtctgtaggatag

SEQ ID NO: 216144 - DNA, 1689 bp, synthetic construct
  misc_feature 1..1689: note = Description of Artificial Sequence: Synthetic coding sequence
  source 1..1689: mol_type = other DNA
atggccgtttctcggcacctaaccaggggcaggaaaatggcacatgtgatcgccgcttgcttgtacctggtgtgcaggactgaggggactccccatatgctcttagatctgagtgacttactacaggtgaacgtttatgtgttaggcaagacattcctactattggcccgtgaactgtgtattaatgcgcctgctattgatccctgtctatatattcctaggttcgcacaccttctggaatttggcgagaagaaccatgaggtctccatgacggccctccggctgttgcagaggatgaagcgtgactggatgcacaccgggagacgcccttccggcctgtgtggggctgctctgctcgtggctgcacgtatgcacgattttcgcaggacggtaaaagaagtgatcagcgtcgtgaaggtgtgtgagagtacgcttagaaaacggctcacagaatttgaagacactccgactagccagctgacaatcgacgaatttatgaaaattgatttggaggaagagtgcgatcccccatcttacacagctggccagagaaaactgcgcatgaagcagttagaacaggtactgtctaagaaactggaggaggtggaaggtgaaatctcctcctaccaagacgccattgaaatcgaattagagaattctcggccaaaagccaagggcggactggccagtctggctaaggatggctctacagaagacaccgcttccagcctgtgtggagaagaagacaccgaagatgaagaactggaggcggcagcatcccacctgaacaaagatttgtatagggagctgcttggcggtgctcccggttcttcagaggctgccggaagccccgagtggggcggacggccacctgcactggggagcctcctggacccactacccactgccgcatccttagggatttctgattccatcagggaatgtatttcaagccagagctctgatccaaaggatgcctccggcgacggtgagctggacctgagcggaattgacgacctcgagatcgaccgctacattctgaacgagagcgaagctcgagtgaaggctgaactatggatgagagagaacgccgaatacctgagagaacagcgggagaaagaggctcgaattgccaaggagaaggaattagggatctataaagaacacaaaccaaagaaaagctgcaaacggagagagcccatccaggcctcgacggcaagagaagccatcgagaagatgctcgaacaaaaaaagatttcttccaagatcaattattccgtactgcggggattgtcaagcgccggtgggggaagcccgcaccgagaggatgcacagcctgagcactcagctagcgcaaggaagttatctcgcaggcggactcccgcaagcaggtccggtgctgaccccgtaacgtccgtcggaaaacggctccggcctctggtctccactcagccggctaaaaaagtagctacgggggaggctctgctgccttcctcccctaccttaggagcggagcccgctcggcctcaggccgttctcgtagaatctggtccagtgtcgtaccatgccgatgaggaggctgatgaagaggaaccagatgaggaggatggtgagccctgtgtcagcgctctgcagatgatggggagcaacgactatggctgtgacggcgacgaagacgatgggtactag

SEQ ID NO: 216145 - DNA, 408 bp, synthetic construct
  misc_feature 1..408: note = Description of Artificial Sequence: Synthetic coding sequence
  source 1..408: mol_type = other DNA
atgacggccctacggttactgcaacgcatgaaaagggattggatgcacaccggacgcaggccctcaggactgtgcggggcagcattgctggtggccgctagaatgcacgacttccgaaggacggtaaaggaggtgatctcggtggtcaaggtctgcgaatctacgctgagaaaacgactgaccgagttcgaggatactcccacctcacagttgacgatcgacgagttcatgaaaattgatttggaggaggaatgcgaccctccgccaatcgaagagggaggtcagactgaagccagggagcccccacaagcctcctcctgggaaggtccatcaactactcgccgacgtagtcaactgtggcacggctgtcctgggtgtgggaggggtggctttactctgtgcccttag

SEQ ID NO: 216146 - DNA, 723 bp, synthetic construct
  misc_feature 1..723: note = Description of Artificial Sequence: Synthetic coding sequence
  source 1..723: mol_type = other DNA
atgacaggcagggtttgtaggggatgcggtgggactgacattgagcttgacgcagccaggggcgacgccgtctgtacagcctgcggatcagttttagaggacaatattattgtcagtgaggtgcaatttgttgagtcttctggaggcggatcttccgctgtggggcaatttgttagcctcgatggcgctggaaaaacacccaccctggggggtggattccacgtgaatctcggtaaagaatccagggcccagacactccagaacggaagacggcacatccatcatctgggcaatcagcttcagctaaaccagcattgcctcgacacagcttttaatttctttaagatggccgtatcacgccatctcactcgtgggagaaaaatggcacatgtcatagctgcctgtctctacctggtctgccgcaccgagggaactccacacatgctgctagatttgtcagacctcctgcaggtggactcactgagacctgcatcctttcctacttggggttgcgacttgggggttgtaactcgtgtggtgactggtgtgtatccccgatgcccaagaatttccgtcgccggactttgttgcctgccgtcccaggaggtgctagtgtgtaggatgagaggactgcatgacatgggcgtgacagtcagagatctgtgggagtgtgggtccccttggcaagagcatctgcctatgctgggcactgttgggtgctag

SEQ ID NO: 216147 - DNA, 555 bp, synthetic construct
  misc_feature 1..555: note = Description of Artificial Sequence: Synthetic coding sequence
  source 1..555: mol_type = other DNA
atgacagcccttagactcttacagagaatgaagcgggactggatgcataccggaagacggccatccgggttgtgtggagcagcccttctggttgcagcccgtatgcatgacttccgaagaaccgtgaaagaggtgatatcagttgtaaaggtttgcgagagcaccctccgcaaaaggctaaccgagttcgaggacaccccgacatcccagcttaccatcgacgaattcatgaaaatagatctggaggaagagtgcgatccacccagttataccgctgggcagaggaaactccggatgaaacagctggaacaggtcctgtctaagaagctcgaggaggttgaaggtgaaatcagtagctaccaggacgcaatagagatcgagcttgagaactctcccccttctcggagggagggaaggcggaggcccgagtcgctgcccagaccattgcggggtaaagcccctgtgccactcgtgggtggcctgagctctggcatggctgcgcctgacgttgctgagggggctagtccttgcgtactccggagaggctggccttag

SEQ ID NO: 216148 - DNA, 1953 bp, synthetic construct
  misc_feature 1..1953: note = Description of Artificial Sequence: Synthetic coding sequence
  source 1..1953: mol_type = other DNA
atgactgggagggtatgtagaggatgtggaggcacggacatcgaactcgacgcagccaggggagatgccgtctgtaccgcatgcggtagtgtcctggaggataacatcatcgtgagcgaggtgcaattcgtcgagtctagcggagggggaagcagcgccgtgggacagttcgttagtcttgacggcagaaggcatattcaccatctgggtaaccagctccagcttaatcaacactgccttgacaccgcttttaatttctttaaaatggccgtgagccgacatctgacccggggaaggaagatggctcacgtcattgctgcatgcttgtacttagtctgcaggactgaaggcaccccccatatgctgctcgacctttccgatcttctacaggtgaatgtgtacgtcctgggcaagactttcctcttactcgctagagaactatgtattaacgctcctgccatagatccttgcctttacattcccaggttcgcccacctgctggaatttggcgaaaaaaatcacgaagtgagtatgaccgcgctccggctcctgcagcgtatgaagcgcgattggatgcacacaggccgaaggcctagcggtttgtgcggggctgccctccttgtggccgcaaggatgcacgatttccgaagaacggtgaaagaggtcatttcagtggtcaaggtgtgcgaatcaactttacgcaagaggctgacagaatttgaagacactcctacctctcagctgacaatagatgagttcatgaaaatcgacctggaagaggaatgtgaccctcctagttacactgccggacagagaaaactccgaatgaaacaactagaacaagtgctgtcaaaaaagctcgaagaggtggaaggcgagatatctagttaccaggacgccatcgagattgagctcgagaacagtcgacctaaagcgaaggggggacttgctagtctggccaaggacggctctacggaggacaccgcttcttcactgtgcggcgaggaggatacagaagatgaagaactcgaggcagctgccagccatcttaataaggacctgtacagggagctgttgggcggagcccctggcagcagcgaggcggcaggttcacccgaatggggtggcagaccaccagcgctgggcagtcttcttgaccccttacctacagccgcttcactgggaatttccgacagtattagggagtgtattagcagtcaaagttcggacccaaaggacgcatccggggatggggagctggacctgagtggaatcgacgatcttgagatagaccgctacatcttgaacgagagcgaggccagagttaaagccgagttgtggatgcgagaaaacgctgagtatctccgggaacagcgggaaaaggaggctcgtattgccaaagaaaaagaactcggtatttacaaagaacacaaacccaaaaagtcatgcaaaagacgcgagcctattcaagccagcacagcacgagaagcaatcgaaaaaatgctcgagcagaaaaaaatcagcagcaagattaattactctgtcctgagagggctgtccagcgctggcggtggctctccacatcgcgaagacgcccaaccagagcactcagctagcgctcgcaagctgtctcggagaaggactcccgcttcgcgttcaggagccgaccccgtgacctccgtcggaaagcggctaagacccctagtgtccactcagcccgctaaaaaggtcgcaacgggtgaggccttattgccctcttctcccaccctgggcgcagaacctgccaggccccaggctgtcctcgttgaaagcggacccgtatcctatcatgctgatgaggaggccgatgaggaggaacctgatgaggaagacggcgagccatgtgtttccgcactacaaatgatggggagcaacgattatgggtgcgatggtgacgaagatgacggatattag

SEQ ID NO: 216149 - DNA, 1422 bp, synthetic construct
  misc_feature 1..1422: note = Description of Artificial Sequence: Synthetic coding sequence
  source 1..1422: mol_type = other DNA
atgacagccttacgcttacttcaacggatgaaacgggattggatgcatacagggagaagaccatctgggctttgtggggctgctcttttggttgctgctcgcatgcatgattttcgcagaaccgtaaaggaggtgatatcagtcgtgaaagtgtgtgaaagcacccttcgcaagcgtctgacagaattcgaagataccccaacctcacagttgactatcgacgaatttatgaagattgatctggaggaggagtgtgatccacccagctacaccgcgggacaaaggaagctgaggatgaagcaactggagcaagtcctgtccaaaaagctggaggaagtcgaaggagagatctctagctaccaggacgcgattgaaatcgagctagagaacagccgcccaaaggctaaagggggattggccagcttagcgaaggatgggtcaaccgaggatactgcttccagcctatgcggcgaagaggatacagaggacgaggaactagaggctgctgcgagtcatcttaataaagacctgtaccgagagcttcttgggggagcaccgggatctagcgaggctgccggatccccagaatggggcggtcggcctccggctctcggatctctgcttgatcctttgcctaccgcagcttccttagggatcagcgacagtatccgggagtgcatttcatctcagtcatcagaccctaaagatgccagcggagatggtgagttggatctttccggtatcgatgacctggagatagaccgctatatattaaatgagagtgaagccagggtgaaggctgaactatggatgagagagaatgccgagtatctgagggaacagcgcgaaaaggaagcacgtatagctaaggaaaaagaactggggatctacaaggaacacaaacctaagaagagttgcaaacggagggagcccattcaagccagcacagctcgagaggccattgagaaaatgctcgagcaaaaaaaaatttccagcaagatcaattactccgtgctgcggggactatcttcggcaggcggaggctcgccacatcgtgaggacgcgcagccggaacacagcgcaagtgccagaaagttaagcagacgtagaaccccagcttccagatccggtgcagatccagtgactagcgtggggaagcggctcagaccgctcgtttcaacccagccggctaagaaggtggcaaccggggaggcccttcttccctccagccctaccctgggcgcagaaccagccagaccccaggctgtattggtggaatccgggcctgtaagctaccacgctgacgaagaggcagatgaagaggagccggacgaggaagatggggagccttgcgtgtcggccctacagatgatgggctctaacgattacggatgtgatggcgacgaggatgacggatattag

SEQ ID NO: 216150 - DNA, 1755 bp, synthetic construct
  misc_feature 1..1755: note = Description of Artificial Sequence: Synthetic coding sequence
  source 1..1755: mol_type = other DNA
atggctgtctcacggcatctgaccagagggcgaaagatggcgcacgttattgccgcttgcctataccttgtgtgtagaactgaaggtactcctcacatgctgctggatctgtccgatttgttacaggtgaatgtttatgtcctgggtaagacttttttgctgctcgccagggagctgtgcataaacgcgcctgccatcgatccctgtttgtacatccctaggttcgcacacctactggaattcggagagaaaaatcatgaggtctccatgaccgctctaagactgctgcaacggatgaagagggactggatgcataccggacggagaccgagcggtctttgtggcgcagctctgttggtagcggcaagaatgcatgattttcggagaactgtcaaggaggttatttcagtggttaaagtttgcgagtctacactgaggaagcggctgactgagttcgaggacacgcccactagccagcttaccatcgacgagttcatgaagatcgacctcgaagaggagtgcgaccccccatcatacacagccggacagaggaagttgcgcatgaagcagctggaacaggtgctaagtaaaaagttagaagaggtagaaggtgaaatctcttcataccaagacgctattgagattgagctggaaaattctcgtccaaaagcaaagggtggactggctagcctggctaaagacggaagcacagaggatacggcgtcatcattatgtggagaggaagacacagaggatgaagagctggaagcagcagccagtcatctgaataaagatttatatagggagctactcggtggcgctccgggttcttccgaggcagccggttcacccgaatgggggggaaggcccccagctttgggctcactcctcgatccattaccaaccgccgcaagcctggggatctctgactccatacgcgaatgtatttcttcgcagagttccgacccgaaggacgcatcgggagacggagagcttgacctgagcggcattgatgacctggaaattgataggagagacctctccatgccacgttgtgcgaaggccaagtcgcagccccactttcccgtactggcccagtacatccttaatgaatctgaggccagggtcaaagcagagttgtggatgagggagaatgccgaatatttgcgtgagcagagggaaaaggaagctagaattgctaaagagaaggagctgggaatatataaggagcacaagcccaaaaaatcctgcaaacgcagggaacctatacaagccagcaccgccagagaggccatagagaagatgttggagcagaagaaaatcagttcaaaaattaactactcagttttacggggtctcagtagcgctggagggggatctccccatagagaagatgcccagcccgagcattccgcttcagctcgcaagctttctcgacgacggacccctgcgagccgtagtggcgcagacccagtgacatcagtcggcaagagactgagacccctggtaagcacccagcccgctaaaaaagttgccacaggcgaagccttactgccttcttctcctacactcggtgccgaacctgctcggccacaggccgtgctcgtcgaatctgggcctgtctcataccatgccgacgaagaagcagatgaagaggagcctgatgaagaggacggcgagccttgtgtgtcggctctccagatgatgggtagtaatgattatgggtgtgacggagacgaggatgatggctactag

SEQ ID NO: 216151 - DNA, 1320 bp, synthetic construct
  misc_feature 1..1320: note = Description of Artificial Sequence: Synthetic coding sequence
  source 1..1320: mol_type = other DNA
atgcacgatttccggagaactgtcaaggaagtgatctccgttgttaaggtctgcgagtctaccctcagaaaacgattaactgaattcgaggacactccaacttctcagcttaccatagatgaattcatgaaaattgatctcgaggaggagtgtgatcctcctagctatacagctggacagaggaagctccgcatgaaacagttagaacaggtgctgtccaaaaagctggaggaggttgagggcgaaatttctagctatcaagacgccatcgagatagagttagagaacagcagaccaaaagcaaagggcggactggctagcctggctaaagatgggtccacagaggacacggcaagcagcctttgtggggaagaggatacagaggatgaggagttggaggccgctgcaagtcatcttaacaaggatctgtacagggagttactgggaggtgcaccgggaagttccgaagcagcaggcagcccggagtggggcggtaggcccccagcgctcgggtctctgctcgatcctcttccaaccgctgcatcactgggaatctcggactccatacgggagtgcatttctagtcagtcctctgacccaaaagatgcctccggagacggcgagctggacctgtctggcattgatgatctggaaatcgatagatatatccttaacgaaagcgaggccagagttaaagccgaactgtggatgcgcgagaacgcagaatatctgcgggagcaaagagaaaaagaagcaaggattgccaaagagaaagaattaggtatatataaggagcacaaacccaaaaagtcctgcaaaagacgggagcctattcaagcaagcactgccagagaggcaatcgagaagatgcttgagcaaaaaaagatctcttctaaaattaactatagcgtgctgcggggtcttagcagtgccggagggggttcacctcacagagaagatgcccaaccagagcactccgctagtgctaggaagctctctaggaggaggacaccagcctcccgctctggcgctgaccccgtgacctccgtaggcaaacggttgcggcctctggtctcgacgcagcctgcaaagaaggtcgctactggtgaagcgctattgccaagcagccccacgctgggggcagaacctgccagacctcaggcagtgttagtggaaagcggccctgtttcttatcacgccgacgaggaggcggatgaggaagagcctgatgaggaggacggagaaccttgtgtgtccgcacttcagatgatgggtagcaatgattacgggtgtgacggtgacgaggacgacgggtattag

SEQ ID NO: 216152 - DNA, 2034 bp, synthetic construct
  misc_feature 1..2034: note = Description of Artificial Sequence: Synthetic coding sequence
  source 1..2034: mol_type = other DNA
atgacgggaagagtctgtcgaggctgtggtggcacggacattgaactggacgctgctcgtggagacgccgtctgcaccgcctgcggtagtgttctggaagacaatattatcgtgagcgaagtacaatttgtggagtccagcggcggtggcagtagtgccgttggtcagtttgtgtctttggacggtgctggcaaaacacccaccctgggtggcggttttcatgtaaatcttggaaaggagtcacgggctcagacactgcagaatgggagacgccatatacatcatttgggaaaccaactgcagttaaatcagcactgtctcgacaccgccttcaactttttcaagatggccgtgtctagacacttaaccagaggcaggaaaatggcccatgtcatcgctgcctgtctatatctggtatgcaggactgaaggtacacctcacatgcttctagacttatcggatctgctgcaggtaaacgtgtacgtactcgggaaaaccttcctgttattggcacgggagctctgcatcaatgcgcctgcgatcgacccatgtttatatatccctcgcttcgcgcacttgctggaatttggcgagaagaaccatgaggtgagtatgactgcccttaggctcttgcagagaatgaagagggattggatgcatacgggaagacggccaagtgggctgtgtggggctgctctgcttgtggccgcacggatgcatgacttcaggcggacagtgaaggaagttatcagcgtggttaaggtttgcgaatcaacattgagaaagcgactaaccgaatttgaggacactcccacatcacagcttaccatagatgaattcatgaagatcgatttagaagaggaatgcgatcccccttcttacactgccggacagcgcaagctgcgcatgaagcagttggagcaggttctgtcaaaaaaattggaagaggtggaaggagagatttcctcataccaggatgcaatcgaaatcgagctggaaaactcccgcccaaaggctaagggcggacttgcatcactggcaaaagatgggtccacagaagatacagcgagcagcctttgcggcgaggaggacaccgaggatgaagagctggaagctgcagcctctcacctaaataaggacttgtaccgcgagctgttgggcggtgctccaggaagctccgaagcggctggcagccccgagtggggcggaaggccacccgcactgggctctctcctggaccccttacctacagcagcatctttaggcattagtgattcaataagggaatgcataagttctcagagctctgatccaaaggacgccagtggcgatggcgagctggacttaagcggcattgacgacctggaaatcgacaggtacatcctgaatgaatccgaggcaagagtgaaggcagaattgtggatgcgggagaatgcggagtatttaagggagcagcgggagaaagaggcaaggatcgccaaagagaaggagctgggaatttacaaggagcataagccaaagaaaagttgcaagcgacgggaaccgatccaagcttctactgctcgcgaggcaatcgagaaaatgttggagcagaagaagatatcatccaagatcaattatagcgtcctgcggggactgtccagcgccggaggcggatcacctcaccgggaagacgcacagccagaacattctgcttccgctaggaaactttcaaggaggcggacaccagcctcacgcagcggagccgatccggtgacttctgtaggcaaacgattgcgcccactcgtatccacgcagccagcaaaaaaggttgcaacaggcgaagccctgttgccgtcatctcccacactgggggcagagcctgcgagaccccaggcagtcttggttgaaagtggtcctgttagctaccacgccgacgaggaagccgatgaggaagaacctgatgaggaagatggcgaaccatgcgtttctgcactgcaaatgatgggctctaatgactacggctgtgatggtgacgaggacgatgggtactag

SEQ ID NO: 216153 - DNA, 612 bp, synthetic construct
  misc_feature 1..612: note = Description of Artificial Sequence: Synthetic coding sequence
  source 1..612: mol_type = other DNA
atgagggaaaacgctgagtacctgcgagaacaaagggagaaggaagctagaatcgccaaggagaaggagcttggcatttataaagaacataagcccaaaaaaagctgcaagcgacgcgagcctattcaagcatcaaccgccagggaggccatcgaaaagatgttggaacagaagaaaatttcgtcgaaaatcaattattctgttttacgaggcctgtcttctgccggtggcggtagcccgcatagggaggacgcccaaccagagcactcagccagcgctcgcaaactgtcacggagacgaacgcccgcaagcagaagcggcgctgaccctgtaacttctgtcggtaagcgcctgcgtccattggttagtacacagccggcaaagaaggtcgccactggcgaagctctgctgccaagtagccctaccctcggggctgagcccgctaggccccaggcagtgttagtagagtccggtcctgtatcctatcatgccgacgaggaagcagacgaggaggagcccgacgaggaggacggcgaaccctgcgtgagcgccctgcaaatgatgggctcaaatgactacgggtgtgacggcgacgaagatgatggctactag

SEQ ID NO: 216154 - DNA, 714 bp, synthetic construct
  misc_feature 1..714: note = Description of Artificial Sequence: Synthetic coding sequence
  source 1..714: mol_type = other DNA
atgacagcactgaggttgcttcagcggatgaaaagagattggatgcacacaggcaggcgcccttctgggctgtgcggggctgccttgctggtcgcagctagaatgcacgatttccgtcggaccgtgaaggaagtgatctctgtcgtgaaagtttgcgagagtaccctaaggaagcgtttgactgaatttgaggatacccctacgagccaactcaccatagacgagtttatgaaaatcgatctcgaggaagaatgcgaccccccttcttacactgcaggccagcggaagttaaggatgaagcagctagaacaggtgctcagcaaaaaacttgaagaggtagaaggcgaaatcagctcctatcaggacgccattgagatcgagctggaaaattctcgccctaaggccaagggagggttagcaagtttggcaaaagatggatcgaccgaggatactgcctctagtctatgtggggaggaagacacggaggatgaggagctagaagccgcagcgagccatctaaacaaagacctctaccgggagttattagggggagctccaggttcttctgaggcagctggatcccccgaatgggggggtagacctccagctttagggtccctattggaccctctaccaactgcagcaagcttgggaatctctgattcaattagagaatgcatctcttctcaatccagcgaccctagtgaattctag

SEQ ID NO: 216155 - DNA, 138 bp, synthetic construct
  misc_feature 1..138: note = Description of Artificial Sequence: Synthetic coding sequence
  source 1..138: mol_type = other DNA
atgaccgcccttcgcctgctacagcggatgaagcgcgattggatgcacacaggacggaggcccagcggactctgcggcgcagccctgctagtagctgccaggatgcatgattttaggcgaaccgtaaaggaagtatag

SEQ ID NO: 216156 - DNA, 45 bp, synthetic construct
  misc_feature 1..45: note = Description of Artificial Sequence: Synthetic coding sequence
  source 1..45: mol_type = other DNA
atgacagccctgcggctgttgcagcgcatgaagcgcgactggtag

SEQ ID NO: 216157 - DNA, 468 bp, synthetic construct
  misc_feature 1..468: note = Description of Artificial Sequence: Synthetic coding sequence
  source 1..468: mol_type = other DNA
atgacggccctgcgccttctccagagaatgaagcgggactggatgcataccgggagacgcccatccggtctgtgtggcgcagctctactcgtagcagccaggatgcatgattttcggagaacagtgaaggaggtgatctctgttgtgaaagtgtgtgaaagcaccctgagaaaacgcctgaccgagttcgaggacacccccaccagccagcttactatcgacgagttcatgaaaattgatctggaggaggaatgcgacccaccaagttataccgcgggacagaggaaactgcgcatgaagcaactcgagcaggtgctcagcaagaaacttgaggaagttgagggtgagatctcttcataccaggacgcaatagaaatcgaactggaaaacagtaggccgaaggccaaggggggtctggcgtctcttgccaaagacggatcgaccgaagacaccgcctcctcattgtag

SEQ ID NO: 216158 - DNA, 8306 bp, synthetic construct
  misc_feature 1..8306: note = Description of Artificial Sequence: Synthetic coding sequence
  source 1..8306: mol_type = other DNA
atggccctggtgctggaaatcttcactctgttggcctcaatatgttgggtctctgcgaacattttcgagtatcaagtggacgcacaacccctccggccttgtgaacttcagagagaaacagccttccttaagcaggccgattatgtcccccaatgcgcggaggacggaagctttcagactgtgcaatgccagaatgacggcaggtcatgctggtgtgtgggggcaaatggctccgaagtgctcggaagccgccagcctggacgccctgtggcatgtttgagtttctgccagctccagaaacagcaaatcctattgtcaggctacatcaatagtaccgatacctcttatcttccccaatgccaagactctggagactatgctccagtccaatgtgatgtgcagcaggtgcagtgttggtgcgtcgatgcagaaggaatggaagtgtatggcacaaggcagctaggcaggcctaaacgatgcccacgcagttgcgagatcaggaacaggcggctgttgcatggtgtgggcgacaagtctccccctcagtgttctgccgaaggagaatttatgcctgttcagtgcaagtttgtgaacacgaccgacatgatgattttcgatttggtacactcttacaaccggttcccagacgccttcgtgacatttagctcatttcagagaaggtttcccgaggttagtgggtactgccactgcgccgactcacaaggccgagagctcgcagaaacaggactggagctcttactggacgagatctacgatacaattttcgccggtctggaccttccatctacatttacagaaacgacattatacagaattctgcagcggaggtttcttgccgtccagagcgtaatcagcggaagattccgctgcccgaccaagtgcgaggtggagaggttcaccgccaccagctttggacatccatacgtaccctcttgccggagaaacggagactaccaggctgtccagtgccagaccgaaggtccttgttggtgcgtggatgcccagggaaaagagatgcatgggactcggcagcaaggggaacccccttcctgcgccgaaggccaatcctgtgcctccgaacggcaacaggctctctctcgactgtatttcggtacatccgggtatttcagccaacacgatttattttcgagtccagaaaagcgctgggcatccccacgtgtggccagattcgccactagctgcccgcctaccataaaggagctgttcgtcgacagtggccttttaaggcctatggttgaagggcagagccaacagttctccgtttccgaaaatctgctcaaagaagcaattagagctatcttcccgtcacgtggtctcgccagactcgctttgcagtttacaaccaaccccaaacgactacaacagaacttatttggcggtaagttcctcgtgaatgtgggccagttcaacctgtctggcgctcttggcacccgcggtacttttaactttagccaattttttcagcagttaggactagccagttttttgaacgggggacgacaggaggatcttgctaaaccgctgtctgtggggcttgatagtaactcttcaaccggaactcccgaggctgcaaagaaggatggaacgatgaacaaaccgaccgtcggcagtttcggcttcgaaatcaacctgcaggagaaccaaaatgccctgaaatttctggccagcctgctggagctgcccgagttcctcctgttcctgcagcacgcgatcagtgtcccggaagacgtcgccagggatctcggtgacgtcatggagacagttctatctagtcagacttgtgaacaaacacctgagcgcctcttcgtgccctcgtgtaccaccgaaggaagctacgaggacgtacagtgcttcagcggcgagtgctggtgtgtaaacagttgggggaaagaactcccgggaagcagagtgcgtggcggacagccaagatgtccaaccgactgcgaaaagcagagggctagaatgcaatcactgatgggctcccagcccgcaggctccactctgttcgttcccgcttgcacaagtgagggacatttcctccccgtccagtgtttcaactctgagtgttattgcgttgatgcagagggccaggctatcccagggacgcggagcgcgatcgggaaaccaaagaagtgccctactccttgccagctgcagagcgagcaggcttttctgagaactgtgcaggcgttactgagcaactcttccatgctccctactctgtctgacacgtacattccacagtgttcaaccgatggacagtggcgccaggtacagtgtaacgggccaccagaacaggtgtttgagctctatcaacgctgggaagcccaaaataagggacaggacctgaccccggcaaagctactggtgaaaatcatgtcctacagggaggcagcctctggtaacttctcactctttattcagtctctttacgaagcaggccagcaagacgtcttccccgtcctgtctcagtaccccagccttcaagacgttccattagctgcactggaagggaagcggcctcagcccagagagaatatcctgcttgagccttatcttttttggcagatactcaatggccagctgtcacagtatccaggttcatattctgacttttcaacacctctcgcacatttcgatctgcgaaattgttggtgtgtggatgaagccggacaggaactcgaaggaatgcggagtgaaccttctaagcttccgacgtgccccggaagctgcgaggaggctaagctccgggttcttcagttcataagggagacggaagaaatcgtgtccgcctccaacagttcacgttttcctctcggggagtcgttcctcgttgctaaaggcatcaggctccgtaacgaggacctgggtctgcccccactcttccctccacgggaagctttcgccgagcagttcctgcggggaagcgactacgccattcgcttagccgcacagtcgaccctgtctttctaccagcggaggaggttctcacctgacgacagcgccggtgcctcggcgctgcttagatctggcccttacatgccccaatgtgacgctttcggcagctgggagccagtgcagtgccacgccggaacaggccactgttggtgtgttgacgaaaaaggaggtttcatccccggatcgctaaccgccagatcactgcagatcccgcagtgcccaacaacttgtgagaaaagccgcacttccggtctactcagttcctggaagcaggctcggtctcaggaaaatccttctcctaaagatctcttcgtgcccgcttgcctggagaccggggagtacgcgagacttcaggcgagtggggcaggcacttggtgcgtcgatcctgccagcggggaagagctgaggccagggagctccagcagtgcacagtgtcccagtttatgcaatgttctaaagagtggggtattatcacgacgggtgtctccaggatatgtcccggcatgccgcgcagaggacgggggtttcagcccggttcaatgtgatcaggcgcaaggctcatgttggtgcgtgatggactccggagaggaagtgcccggaacaagagttacagggggtcaaccagcctgtgagtccccaagatgccctcttcccttcaacgcctccgaggtcgtcggaggaaccatcctctgcgaaaccatttccgggccaacaggctccgctatgcagcagtgtcagctgctttgccgacagggtagctggagcgtcttcccacccggtccccttatttgctcattagaatcaggtaggtgggagtcccagcttcctcaaccacgggcatgtcaacggccacagctctggcagacgattcaaacgcagggccactttcagcttcagctccctccgggtaaaatgtgttccgccgattacgcggatctgctgcagacattccaggtatttatcctcgacgagttgactgctcgtgggttttgtcaaatccaggttaaaaccttcggaaccctggtgtctattccagtgtgcaacaattcatctgtccaggtggggtgtcttacacgagaaagactgggcgtgaatgtgacttggaaaagccgcctcgaagacatccctgttgctagtctgcctgacttacacgatatcgaacgagccctagttggtaaagaccttctggggagattcactgaccttatccagtctggctcattccaactgcacctggacagcaaaacattccctgccgaaactattagatttctacagggagaccattttggcacctctcctagaacctggtttggttgctctgagggcttttatcaggtgctcaccagcgaagcctcgcaggatggcttgggctgcgtaaaatgcccagaagggtcttactcacaagacgaagagtgtattccatgtccagtcggcttctaccaggagcaggccggttccctagcatgtgtgccttgccctgtgggacgaacgactatttcagctggagcctttagccaaacccactgcgtcacagattgtcagcgtaatgaggcaggtttgcagtgtgaccagaatggccagtacagggcatcacagaaggatcgcggttctggcaaagccttctgcgtagatggggagggaagacgactcccctggtgggagacagaagctccattggaggactcacagtgtcttatgatgcagaaattcgagaaggtgccagaaagtaaggtgatttttgacgccaacgcgcctgtggcagtgcggtcaaaagtgcctgattctgagtttccagtcatgcagtgtctcaccgattgtactgaagacgaggcttgttcttttttcacggtgtctacaacagagccagagatttcctgcgatttctatgcctggacttccgacaatgtcgcgtgtatgacctctgaccagaaacgtgacgccctcggaaacagcaaagcaactagttttgggagcctaaggtgtcaggtgaaagtccggtcgcacggtcaagacagcccagcagtgtacctgaagaaggggcagggctccaccaccacactgcagaagcgcttcgaacccacaggttttcaaaacatgctctccgggctgtacaatccaatagtgttttctgcctccggagccaatttgactgatgcccatttgttttgtttgcttgcatgcgatcgagacctatgttgcgacggctttgtcctcactcaggtacaaggcggagcaatcatctgtggtttgctgagctcacccagcgtcctgctatgtaacgttaaagattggatggaccctagcgaagcttgggctaatgccacatgtccaggtgttacgtacgatcaggaatcccaccaggttatcctcagactgggtgaccaggaatttattaagtctctaaccccgctggaaggcacgcaggatacatttaccaacttccagcaagtctacctgtggaaagactctgatatgggctctcgtccagaaagcatgggctgtagaaaagatacagtgcccagacctgccagccccacggaggccggtctgactacggagctcttcagcccggtggatctgaatcaggtgatcgtcaatggcaaccagagcctgtcttctcagaaacattggctcttcaaacatctattttcagcacagcaggctaacctgtggtgcttgtcccgctgcgtgcaggagcactccttctgccagctcgccgagatcacagagagcgcgtccctgtactttacctgcaccctttatcccgaagcccaggtatgcgacgatattatggagtctaacgctcagggatgtcgcctgatcctccctcagatgccaaaggctctgtttcgcaagaaggtgatccttgaggacaaagtcaagaatttctacaccaggctgccttttcagaagctgatggggatctcaattcgcaataaagtgcccatgtcagagaagagtatttccaacgggttcttcgaatgcgagagacgctgcgacgccgatccatgttgtactggcttcgggttcctgaacgtgagtcagctaaagggaggggaggtgacctgcctcaccctcaactccctggggatccagatgtgctccgaagaaaacggaggcgcttggagaatcctggactgtggctcacctgatatagaagtgcacacctatccctttgggtggtatcaaaagcctatcgcccagaataacgccccatcgttttgcccattggtcgtgttacccagtttgactgagaaggtcagcctggacagttggcagagcctcgccttgagcagtgtggtcgtggatccgtcgatccgtcattttgatgtggcacatgtgtcgaccgcagcgactagtaactttagtgccgtgagagatctgtgcctgtccgagtgttcccagcacgaagcctgtctcatcaccacgctgcaaacccagcctggagccgtcaggtgtatgttctacgccgatacccagagctgcacccacagcttacagggacagaattgccggttgttacttagagaggaggccacgcatatttacagaaagcccggaattagcctactaagctacgaagctagcgtgccatccgtccccatctctacacatggcagactgttaggccgttcacaagccatccaggtcggcacctcttggaagcaggttgaccagtttctaggtgtgccatacgccgctcccccactcgcagagcggagattccaggcgccagagcccctgaactggaccggatcttgggatgcaagcaagcctcgggcttcctgttggcagcccggtactagaacctccactagccctggggtttcagaagactgtttgtacctgaacgtgttcattcctcagaatgtcgcccctaacgccagcgtgctggtgtttttccacaacaccatggacagggaagagagcgaaggttggccggcaatcgatggctccttcttagccgctgtggggaacctgatcgtggtgactgcctcctaccgcgtgggggtattcggctttctgagcagcgggtccggtgaagtttctggcaactggggactcctggatcaggtcgccgctctgacctgggtgcagacacacattcgcggattcggcggtgatccaaggcgcgtgtccctcgctgccgataggggcggtgctgatgtggcaagcatacatctcttgaccgcaagagcaactaattctcagctttttcggcgagcagtactcatggggggttccgcactcagcccagcggcagttatcagccacgagcgggctcaacagcaggcaatagctttggcaaaagaggtgtcttgcccaatgtcctcgtcccaggaagtggtgtcctgcctccgccagaaacccgcaaacgttttgaacgacgcccagactaagctacttgccgtgtccggaccgtttcactattggggtcccgtgattgacgggcattttctgcgtgagccgcctgccagggccctcaagagatctctttgggtcgaggttgatttgctgataggaagttcccaggacgacggacttatcaatcgagccaaagcagtcaaacagttcgaggaatcacgtggccgaacgtcatccaagaccgcattctatcaggccctgcaaaactccctggggggagaggactctgatgctcgcgtggaggctgcggctacatggtattacagcctagagcattccaccgacgattatgcgtctttttcccgggctctcgaaaacgccactcgcgattatttcatcatatgtccaatcattgatatggcttccgcttgggcaaagagagcaagaggaaatgtctttatgtaccacgccccagagaactacggccatggctctctagagctattggccgacgtgcagtttgcgctcgggctccccttttacccggcatatgagggccagtttagcctggaagagaagagcctcagcctgaagattatgcagtatttctctcactttatacgaagcggaaaccctaattacccctatgagttctctagaaaggtgcccaccttcgcgacgccttggcccgattttgtcccgagagcaggcggagagaattataaagagtttagtgagctgctgccaaatcgccagggcctgaaaaaagctgactgtagtttctggtctaagtacatctctagcttaaagacatctgcggacggagctaagggaggccaaagcgccgagtccgaggaggaggagctaactgctgggagcgggcttagggaggatctgctgtctcttcaggaacccggatcaaaaacctattcaaaata

SEQ ID NO: 216159 - DNA, 1191 bp, synthetic construct
  misc_feature 1..1191: note = Description of Artificial Sequence: Synthetic coding sequence
  source 1..1191: mol_type = other DNA
atgccaggtcgaggaaggtgcccagactgtgtggtgacagagggtgtcttgacaacaaccttcagcgacgagggcaacctgcgcgaggtaacgtactcgagaagcacaggagagaacgaacaggtgtcacgtagccagcagaggggcctgagaagggtcagagacctatgcagagttctgcagctgccacctaccttcgaggacaccgcagtggcctattaccaacaggcctataggcattcgggtatcagggctgctaggctccagaagaaagaggtgctagtggggtgctgcgtgttgattacctgccgacagcacaactggcctttaacgatgggcgctatttgcacactgctctacgccgacctggatgtgttctcttccacatatatgcagatcgtcaaactcctgggtcttgacgtcccctctctctgtctcgcggagttggtgaaaacttactgcagtagctttaagttgtttcaggcctccccaagtgttcctgctaaatacgtggaagacaaagagaagatgctgtctcgaacgatgcaactggtggagttagctaacgagacctggctcgttactggaagacaccccctacccgtcatcacagctgccacgttcttagcctggcagagcctacagccagctgatcgattgtcctgttctctggctaggttctgtaagctagccaatgtggacctgccttacccggctagcagtagacttcaggaacttctggccgtgctgttgcggatggccgaacagctggcatggcttagagtcctccgtctcgacaagcggtccgtggtcaaacacatcggcgatctgctgcaacacaggcagtccctggtccgctccgcatttcgggacgggacagccgaggtggaaacccgggaaaaggaaccacctggctggggtcagggtcagggcgagggtgaggtgggcaacaatagcctgggcctgccgcagggcaagcgcccagcctctccggctctgctcttgcctccctgcatgctgaaatcccccaaaaggatttgcccggtaccccctgtcagtaccgtgacaggggacgagaatatatcagattctgaaatcgaacagtacttgagaactccccaggaggtgagggattttcagagagctcaagccgcacgccaagcggcaacaagcgttcctaatccaccttag

SEQ ID NO: 216160 - DNA, 1698 bp, synthetic construct
  misc_feature 1..1698: note = Description of Artificial Sequence: Synthetic coding sequence
  source 1..1698: mol_type = other DNA
atggccgaggggaaagccggaggtgccgctggcctgtttgccaagcaagtgcaaaagaaattctcccgagctcaggagaaggtgctccagaagctcgggaaggcggttgagactaaggacgagagatttgaacagagtgcttcaaacttctatcaacagcaggctgaggggcacaagctatacaaagacctgaagaacttcctgagcgctgttaaggtaatgcacgagagtagcaagcgggtatccgagaccctccaggagatttactcctctgagtgggatggacacgaagagcttaaagcaatcgtgtggaacaatgacctgctgtgggaggactatgaggagaaactagctgaccaagcagtgcggacgatggaaatctacgttgcccagttttccgagataaaggagcggatcgccaagcggggaaggaagctggtagactatgatagtgcaaggcaccatctagaagccgtccagaatgcaaagaagaaagatgaggcaaaaacagcaaaagcagaggaagagttcaataaagcacaaacagtgttcgaggatctaaaccaggagctgctagaggagctaccaatcttgtataacagtagaatcgggtgctatgtaacgatttttcagaatattagcaatcttcgagatgtattctaccgggaaatgagtaagctaaaccacaacctgtatgaggttatgtccaagctggaaaaacaacactccaataaggtttttgtggtgaagggccttagctcctcgtcacgccgatccctggttatcagcccccctgtcaggaccgcgacagtgtcttctcccctgacctcgcccacctccccctctacactgtccctgaagtcagaatctgagtcagtcagcgccacagaggatttggcccctgacgccgctcagggggaagataacagcgagattaaggaactgctggaggaagaggagatcgagaaggaaggttccgaagctagctcctcagaagaggatgaacctctccccgcttgcaacggtcccgctcaggctcaacccagccctacaacagaacgagccaaatcacaggaggaggttctcccctccagcacaacaccctccccagggggtgcgctgagccctagtggccagccatcgagctccgcaaccgaggttgtgctccggactcgaacagcaagcgaggggtcagagcagcccaagaaaagggctagtattcagaggacctccgcccctccttctcgacctcctccacctcgtgctaccgcctcacccaggccctcttcgggcaacatcccctcatcccctacggccagtggaggaggttcccctacatccccgagggcaagcctgggtaccggaaccgcaagccctcggacctcccttgaagtgtctccgaatcccgaacctccagagaagcccgtgagaactccggaggctaaagagaatgagaatattcacaatcaaaaccctgaagagctttgcaccagcccaactctgatgacgtctcaggtagcctcagagcccggagaggccaagaaaatggaggacaaagagaaagataataagctgatatccgcaaattcttctgaagggcaagaccagctgcaagtttccatggtacctgagaacaataacctgactgctcccgagcctcaggaagaggtatctactagcgagaacccacagctgtag

SEQ ID NO: 216161 - DNA, 1602 bp, synthetic construct
  misc_feature 1..1602: note = Description of Artificial Sequence: Synthetic coding sequence
  source 1..1602: mol_type = other DNA
atggcagagggcaaggccggtggcgctgctgggttgtttgctaagcaagtccagaaaaagttctcacgtgcgcaagaaaaggtcttgcagaaattggggaaggcagtagagaccaaggatgaaaggtttgaacaatccgccagcaacttctaccagcagcaggccgagggccacaagctttataaggacttgaagaactttctgagcgcagtcaaagtgatgcatgagtccagcaaacgcgtcagcgaaactctgcaggaaatctattcgtccgaatgggacggacacgaggagctgaaagccatagtatgggaaagaatagctaagcgtgggaggaaattggtcgattacgatagcgcccgtcatcacctcgaggctgtccaaaacgccaaaaagaaggacgaagcgaaaactgccaaggccgaggaagagttcaataaggcacaaactgtgtttgaggatttgaaccaagagttacttgaggagctgcctatcctgtacaatagccgcattggctgctacgtaaccatctttcagaatattagcaatctgcgggacgtgttttatagggagatgtctaagttgaaccacaatttgtatgaagtgatgagcaagctagaaaaacagcactcaaacaaagtgttcgtcgtgaaaggcctaagcagctcttcccgcaggtcattggtgatctcaccacctgttcggaccgctactgtttccagccctttgacctctcccacctctcccagcactctttcacttaaatccgaatctgaatcggtgagtgcaaccgaagatctagcaccagacgccgcacagggagaggacaactctgagatcaaggaacttctggaggaggaagagatcgaaaaagaagggagcgaagctagctctagcgaggaagacgagcctctgcctgcatgtaatggccctgcccaggcccagccttcgcccacaaccgagagggcaaagagccaggaagaggtgctgccatcatctaccactcccagccccggaggcgcactgtctccttctggacaaccctctagttcagcgacggaagtggtgctgaggaccagaactgcctcagaaggatcagagcaacccaagaagcgcgcttccatacagcggacaagtgctcccccttcgcgccctccgccaccaagagccaccgctagcccaagaccaagcagtggaaatatcccgtcaagcccaactgcctcaggcggtggaagcccgaccagccccagagcatctttgggaaccggaaccgccagcccaaggaccagcctcgaagtctcacccaatccggagccccctgaaaaacccgtacggacgcccgaagcgaaggagaacgagaacatccacaaccagaacccagaagaattgtgtaccagcccaacactcatgacctctcaagttgcttccgagcctggtgaggccaagaaaatggaggataaagagaaagataataaattgatctcagccaatagcagcgagggccaggaccaactgcaggtgtcaatggtgccagaaaataacaacctgaccgcccctgagccacaagaggaagtctccacgtctgaaaatcctcagctttag

SEQ ID NO: 216162 - DNA, 1620 bp, synthetic construct
  misc_feature 1..1620: note = Description of Artificial Sequence: Synthetic coding sequence
  source 1..1620: mol_type = other DNA
atggttctccagaagctggggaaggctgtggaaacgaaggacgaaagatttgagcagtctgcatctaatttttaccaacaacaggctgagggtcacaaactgtacaaggacctcaagaactttctgagcgccgtgaaggtgatgcatgagagttccaaacgagtgtcagagaccctgcaagagatttattctagtgaatgggacggccacgaagaactcaaggccatcgtttggaacaatgatctgctatgggaagactatgaagagaaactggcagaccaggctgtgagaaccatggagatttatgtggcgcagttcagtgaaatcaaggaacggatcgccaagcggggaagaaaactcgttgattatgactccgctaggcaccatctggaagctgtgcagaacgccaaaaagaaggacgaagcgaaaaccgccaaggctgaagaagaattcaataaggcccagactgtcttcgaggatcttaaccaggaacttttagaggagctccccattctatataactcacgtatcgggtgctatgttaccatcttccagaacatctccaacctgcgagatgtgttttacagggaaatgagcaagctgaatcataacctgtatgaggtcatgtcaaagctggagaagcagcattcaaataaagtcttcgttgtcaaagggctcagttcatcatccagacggtctctcgtcatatctccaccagtgagaactgccacagttagttctcccctgacttccccaacgagcccctccaccctaagtctgaagtcagaatccgagtctgtgtccgcaaccgaggacctcgccccagatgcggctcagggcgaggataactctgaaatcaaagagctcctggaagaggaggagatcgaaaaagaagggtcagaggcaagtagttcagaagaggacgagcccctgccggcttgcaacgggcctgctcaggcccagcccagtccaactacagagagagccaaatctcaagaggaagtgttaccctcttctaccaccccgagcccgggaggcgcattatcgcctagcggccagccctcttcgtccgccaccgaggtggtcctgagaacaagaaccgcaagtgaagggtccgaacagcctaaaaaaagagcctcgatacaaaggacatcagcacccccttcccgcccacccccacctcgagccaccgcttcacctaggcccagcagtggtaatatcccaagttctcccaccgcttcaggaggcggaagtcccaccagccctcgcgctagtctgggtactgggacagcatcgccgagaacatccctcgaagtgtctccgaatccggagccacccgagaaacctgtaaggactcctgaggccaaagaaaatgagaatatccataatcagaacccagaggaattgtgtacttctcccacccttatgacaagtcaggtcgctagcgagcccggagaagctaagaaaatggaggacaaggaaaaggacaataagttgatatcagccaattctagcgaagggcaggaccaactccaggtgagcatggtgcccgagaataataacttgacagcccctgagccgcaggaggaggtctctacttctgaaaacccccagctttag

SEQ ID NO: 216163 - DNA, 762 bp, synthetic construct
  misc_feature 1..762: note = Description of Artificial Sequence: Synthetic coding sequence
  source 1..762: mol_type = other DNA
atgagctggatcccttttaagatcggtcagcctaagaaacagatcgtgccgaagacggttgagagagacttcgaaagagagtacggcaaactccagcaactcgaggagcaaactcggcgtctccagaaggacatgaagaaatcaacagatgccgatcttgccatgtccaaaagcgctgtgaagatatctctcgacctcctgagtaaccctctctgcgaacaagaccaggacttgctgaacatggtcacagccctcgataccgccatgaagagaatggacgcatttaaccaggaaaaggtgaaccaaatccaaaaaaccgtcatcgagccattaaaaaagttcggctcagtgtttccttcgttgaatatggcggtaaagcgcagggagcaagccctgcaagactatagaaggctgcaagccaaggtggaaaagtatgaggagaaggaaaaaacaggtcctgtcctggcaaagcttcaccaggccagggaggaattgagacctgttcgggaggacttcgaagcaaaaaatcgtcagctgctggaggaaatgccacgattttacggatctcggttggattattttcagccctcttttgagagtctaataagagcacaagtcgtgtattattctgagatgcataagatcttcggagatctgagccatcagctcgaccagccgggtcactcggacgagcaaagagagagggaaaacgaagctaagctgtccgagctccgcgctctctcaatcgtggccgacgactag

SEQ ID NO: 216164 - DNA, 600 bp, synthetic construct
  misc_feature 1..600: note = Description of Artificial Sequence: Synthetic coding sequence
  source 1..600: mol_type = other DNA
atgtccaagtccgcggtgaagatatcactggatctgctatctaacccactttgtgagcaggatcaggatttgctgaacatggtcacagccctggacacagcaatgaagcggatggacgcgtttaaccaggagaaagttaaccagattcagaaaaccgtgatcgagccactgaagaaattcgggagtgtgttcccttctctaaacatggctgttaagagaagggaacaagccctccaagattaccggaggctccaggcaaaagttgagaaatatgaagagaaagaaaagacagggccagtgctggccaaactgcaccaagcccgtgaggaactgcgacccgtgcgggaagacttcgaggccaaaaaccgacaattgctggaagagatgcccagattctatggctcccgattggattattttcaaccctccttcgaatccctcatcagggcacaggttgtgtactacagcgaaatgcacaaaatctttggagatctttcgcaccagctcgaccagccaggccatagcgacgagcaaagggagagggaaaatgaggctaaactgtcagagctcagggcccttagcatcgtggcggatgactag

SEQ ID NO: 216165 - DNA, 2343 bp, synthetic construct
  misc_feature 1..2343: note = Description of Artificial Sequence: Synthetic coding sequence
  source 1..2343: mol_type = other DNA
atgacgcatacgaggcgcaaatccctgcctatgctcagctccggcctcacagggcgtcgagaaccgctccagatggaggactccaatatggagcaaggagtcgagggtgttgaacccggtatgcctgaaagccctgggcacctcacaggcaggagaaagaattatcccttgagaaaacggcctctggtccctgaaaagccaaaggcatgtaaggtcttgcttacgagactggagaacgttgctggccctcgatctgccgatgaggcagatgagctgccgcctgatctgccaaagcctccaagcccagcaccctcctctgaagacccgggacttgctcagccgaggaaaaggagactggcatcgttgaatgctgaggcccttaacaacctgctgctggagcgggaggacacttctagccttgccggaacaagacgcagccgggctggggatccgcataggtcccgggatagggacagagcgaccggaggatggagctcaagcaagaaacgacccaggctgggtgatttggggggagggtctcgagatctcagccccgagcctgcacccgatgaaggtcctcgccgtgatggtgaccctgcgcctaaacgtctggcctcactcaacgcggcagccttccttaaactttctcaggagagggagctgccactgcggctgcctcgtgcccacgccgaggttgacggcaggagcacagaaccacctgcccctaaggcccctcgacccaagtggcctaaagtaaatggcaaaaactaccccaaggcttggcagggggctagcagcggtgaagcagccggacccccagggtggcagggctgccccgacgaaccatggccatccgcaacgccgtgcggaccctcagtgcagccatcccatcagcctcttagcaaggccttggaaagcccactggggctgcggcctcacctgccgctgttgatgggaggtcaagcagcacttaagcctgaaccgggtcggcctggcgaagagtctcccgcacctaaacaggaattacaccagccaagttttcccacgccccaactgagcccccttccaatgccgggaaatcctgcggattacaatgggctgtgcgtcggcccagaattaacagccctgggatctttctatttgtattgtggacaggaaggactgcagtgcggcggatactccccttgcccaatgcttcctgaggggaaactttcccctgtggcagccccacacgaagagggattattactagcaccatcaagcgtgcctagtggaaccccatttcagcatcccccatggggatcctccagatactgtagctccgaagacacaggggtgaatgggtactccatatgcggtgtgcttccgctgtctgttacgcacgcagggaccacctgcggcggttgcccatacaagatgccgtttgctgcagaggggtgtcgttccctgggccagctggagtttccacttcccgaagcaggccatccagcctcccctgcccaccccctgctgggctgccccgtcccttctgtccctcctgctgctgagcccgtgccccatctacagaccccaacaagtgaaccccagacggttgctcgcgcttgccctcagagtgcaaaacccccttcaggatctaagtctgggctgagaacggggagctcgtgcagacacactgctcggtcaaaagccgctagaaggccgagccacccgaagcagcctcgcgtgcaaaggcccaggccgaggcgacgcaggcggaggcggaccaacggctgggtgccagtgggcgcagcctgtgaaaaggccgtgtatgtgctcgacgaacccgagcctgccatcagaaagtcttaccaagccgtcgagaggcatggggagaccatccgggtgcgcgatactgtcctgctgaaatcagggcctaggaagacttcgacaccctatgtggccaagatttctgcgctatgggagaaccctgagagcggcgagctgatgatgtccctcttgtggtactaccggccagaacacctgcaggggggacggtcacctagtatgcacgagccactccaaaatgaggtctttgcctccaggcatcaggatcagaacagcgtggcttgtatcgaggagaaatgctatgtactcacattcgctgaatattgccgcttctgtgctatggcaaaacgtcggggtgaaggcctgccttcccgcaagacagctctggttcctccttccgctgattattccacccctcctcatcgcactgttcccgaggataccgatccggagttagtgttcctctgcagacatgtgtacgacttccggcacgggagaattcttaaaaaccctcagtag

SEQ ID NO: 216166 - DNA, 2340 bp, synthetic construct
  misc_feature 1..2340: note = Description of Artificial Sequence: Synthetic coding sequence
  source 1..2340: mol_type = other DNA
atgacccatacgcgtagaaagtctctacctatgctgagctccgggctcaccggcaggagggaacccctccaaatggaggacagtaacatggaacaaggtgtagaaggcgtggagccgggaatgccggaaagccctggacacctaacgggtaggagaaagaactatcccctgcgcaagcgacctttagtccctgaaaagcccaaagcatgcaaagtgcttctcaccagacttgagaacgtggccggaccgaggagcgccgatgaagcagatgagcttccccctgacctaccaaagcccccaagcccagcaccttcctctgaggatcctggtctcgcccagcccagaaagaggaggctggcatcactcaacgctgaagccttaaacaacctactcctcgagagagaagacacttcgagtctagccggaactagaagaagcagagccggagacccgcacaggagccgcgatagagatcgtgccactgggggatggtctagctctaaaaagaggcccagactgggcgatctaggaggagggtctagggacctgagcccagagcccgcaccggatgaaggccctcgtcgggatggcgaccctgccccaaagcgattggctagtttgaatgctgctgccttcttgaagttaagccaagagagagagctgccactgagactcccgagggcccatgcagaggtggatggccgttccaccgagcctcccgcaccgaaggcccctaggcccaagtggcctaaggttaacggaaaaaattaccccaaggcttggcagggtgcgtctagtggagaggccgcaggccctcctggttggcaggggtgtcctgacgaaccatggccatccgcaaccccctgcggcccaagtgtgcagccctcacatcagcccctcagcaaagccctagagagcccactggggctaagaccccatctgcccctgctcatggggggacaggcagcgcttaagccagaacctggacgacccggagaggagagccccgctcccaaacaagaactccaccagccctcctttcccacaccccaacttagcccactgccgatgcctggcaatcccgcagactacaacgggctgtgtgtcggccctgagctgacagccctgggctcattctatctttattgcggacaggagggattacagtgcggaggatatagcccatgcccgatgctgccagaggggaaattatcaccggtggcagcaccacacgaagaaggactgcttctcgcgcctagctccgtccctagcggaaccccatttcagcaccctccatggggctcatctagatactgctcctctgaagacaccggtgtaaacggttactcaatctgtggcgtcctccccctttctgtgacccatgccggaacaacctgcgggggttgcccatacaagatgcctttcgctgccggatgcaggagtcttggacagctggaattccccttacccgaagctggacaccctgcctcaccagcccaccccttgctgggttgtccagtaccatctgtgccacctgcggctgagcctgttccccatctgcagaccccaactagcgagccacagacggtagccagagcgtgcccccagtcagccaagcctcctagtgggtccaagtcgggactgagaacgggaagttcttgccgacacaccgcgagatccaaggcagccagacgcccaagccaccctaagcaacctagagtccagaggccgaggcccaggcgcaggaggcgtcgacggaccaatggatgggttcccgtgggggcagcatgtgaaaaagcggtgtatgtgctggatgaacccgaacctgctatcagaaagtcctaccaagccgtggagaggcacggagaaaccattagggtgcgcgacaccgtgctattaaagtccggacctcggaaaacttctactccctacgtcgctaagattagtgcactgtgggagaatccagagtccggcgaattaatgatgagcttactgtggtattaccgcccagagcacctccagggcggtcgttctcctagcatgcatgaacctcttcagaacgaggtcttcgccagcaggcaccaggatcagaactcggtggcttgcatcgaggaaaaatgttacgtgctgacattcgctgaatactgtcggttttgcgccatggccaaaagacggggtgagggcctcccaagtcggaaaaccgcactggttccaccttctgccgactacagcacccctcctcacaggaccgtgccagaagacaccgacccagagcttgtttttctgtgtcggcatgtgtatgattttcggcatggtcgcatccttaaaaatcctcaatag

SEQ ID NO: 216167 - DNA, 4575 bp, synthetic construct
  misc_feature 1..4575: note = Description of Artificial Sequence: Synthetic coding sequence
  source 1..4575: mol_type = other DNA
atgcctcttctgcaccgtaaaccctttgtgagacagaagccacccgctgatctaaggccggatgaggaggtcttctactgcaaggtgacaaacgagatcttccgccattatgatgatttcttcgaacgcacaatcctgtgtaactctttggtttggagttgtgccgtcactgggcgtcccggactcacttaccaggaagctctcgagtctgaaaagaaggcacgtcaaaacctgcagtcctttcccgagccactgattattcctgttttgtacctgacgtccctgactcatcggtcccggttgcacgagatttgtgatgacatctttgcctacgtaaaagaccgctacttcgtggaggagacagttgaggtgattcggaataatggggcacgtctgcagtgtcgtatcctggaggtgttgccaccatcacaccagaatggattcgccaacggacatgtgaatagtgtggacggagagacgattataatatctgacagcgacgactccgagacgcagagctgttcatttcagaacgggaagaaaaaggacgcaatagacccactgttgtttaagtacaaagtgcagcccaccaagaaggagctgcacgaatccgccatcgtgaaagcaacccagatctctcgaagaaagcatctttttagcagggacaagttaaaactttttctcaagcaacactgcgaaccacaggatggagttatcaagattaaggcctcctccctgagtacttacaagatcgccgagcaagacttcagctacttttttcccgacgacccccctacatttattttcagcccagccaacaggaggcgagggaggccccctaaacgcatccacattagccaggaggacaacgttgcaaacaaacagaccctggccagttacagatcaaaagcaaccaaggagcgggacaagctcctgaaacaggaagagatgaagagcctagcattcgagaaggccaagctgaagagagagaaagctgacgccctggaagccaaaaagaaggagaaagaggataaggagaaaaagcgtgaggaacttaagaagatagtcgaggaggagcgactcaagaagaaagaagaaaaggaaaggctgaaggttgagagagagaaagaacgagagaaactgcgggaggagaaacggaagtatgtcgagtatctgaaacagtggtccaagcctcgggaagatatggaatgcgatgatctaaaggaattacccgagcccacccctgtgaaaacgagactgccgccagagatcttcggggatgctttgatggttcttgaatttctgaacgcttttggcgagctctttgatctgcaagatgagtttccggatggcgtaaccttggaggtgctggaggaggctctcgtcggcaatgattcagaaggccctctctgtgaactcctcttttttttcttaactgcaatcttccaggcaatcgccgaggaggaggaggaggtggccaaagagcaacttacagatgcagataccaaggggtgctccctcaaaagcctggatttggattcttgtacactgagcgaaatactaagactgcacattctggctagtggagctgacgtgacatcagcaaacgccaagtaccggtatcagaaacgaggtggcttcgatgctacggatgatgcatgcatggagttgcggctttccaacccttctctcgttaagaagctttcttctacaagcgtgtatgacttgactccaggagagaagatgaaaatcttgcacgccctgtgtggtaagctgcttacactggtctcaacccgcgatttcatagaggattatgtcgacatactgagacaggcaaagcaagagttcagagagttgaaagctgaacaacatagaaaagagagggaggaagctgcagcaagaatccgtaaacgcaaagaggagaaattgaaagaacaggagcagaagatgaaggaaaagcaggaaaagctcaaagaggatgagcaacgaaacagtaccgcagatatctcgatcggtgaagaggagagggaagacttcgataccagcattgaatccaaggacacggaacagaaggagctggaccaggacatggtaaccgaggatgaggacgatccaggatctcataagcggggtcgaagaggcaagcgcggacagaacggcttcaaagagtttacgaggcaagagcagataaactgtgtcactagagagcccctgacggccgacgaggaggaggcactgaaacaggaacatcagcgtaaggaaaaagaattgctggaaaagatccagagcgctattgcttgtactaacatatttccactggggagagaccgcatgtatcggaggtactggatcttcccatccataccgggtctctttatagaggaggactattctggccttactgaggatatgcttctgccgaggcctagctccttccaaaacaatgtacagagccaggatccccaggtgagcacaaagacaggggaaccgttaatgagcgagagtaccagtaacatagaccagggaccaagagatcattccgtgcaattgccaaagcccgtgcataagccaaatcgctggtgcttttactcttcgtgtgagcagctagatcagctgatcgaggcactcaattctagagggcacagagaatccgcccttaaagagacactgctacaagagaagtcgagaatctgcgcacagttagctcggttttccgaagagaagtttcacttctccgacaaaccccagcccgatagcaagccgacatactctcggggacgcagctccaatgcttacgatccaagtcagatgtgcgccgagaaacagttggaactgaggctgcgggatttcctgctggatatcgaagatagaatctatcagggcaccctgggagcgataaaagtcacagatagacacatttggagaagtgctctcgaatccggcagatacgagctgctatctgaggagaataaggagaacggtatcattaagacggtgaatgaagacgttgaagagatggagatagacgagcaaaccaaagtgattgtaaaggatcggctgctaggtattaagaccgagacaccttctacagttagcaccaatgcctcaacccctcagagtgtctcgagcgtagtgcattacctggccatggctctgtttcagatcgagcagggcatcgaaagacgcttcctgaaagctcctttggacgcctctgactccggtagatcttacaaaacagtgttggacaggtggagggaatcgttactgagctcggcaagcttatctcaagtttttctgcatctcagcaccctagacagatctgtcatatggtccaagtccattctgaatgcacgctgtaaaatatgccgcaaaaagggtgacgctgagaacatggtactgtgcgacggatgtgatcgtggccatcacacctactgtgtgcgacccaaactgaaaacagtgccagaaggggattggttctgccctgagtgcagaccaaagcagagatccaggcgcctctcctctaggcagcgaccatctcttgaatcggatgaagacgtagaagacagcatgggtggcgaggacgatgaggtggacggtgatgaggaggaagggcagtctgaggaagaggagtacgaggtcgagcaagatgaggatgactcccaggaggaggaggaagtttcactacccaaacgaggccgaccccaggtccgccttcctgtcaagaccaggggaaaactttccagctccttctcgtcgaggggtcaacagcaagagccgggtagatacccgtcccgtagtcagcagtccacaccaaagacgaccgtgtcttcaaagacggggcgtagccttcgcaaaattaattcagcccctccaacagagacaaaatcactcagaatagcctccaggagtaccagacactcacacgggcctctccaggctgatgtctttgtggaactcttgagtcctcggagaaagcgtagaggcaggaaaagcgcaaacaatactcctgagaactctccaaattttccgaactttcgtgtgatagcgacgaaatccagcgagcaatcccgctccgtaaatatcgcatcaaaattgtcgttgcaggagagcgaaagtaagcgtaggtgtcggaagcgacaaagccccgagccaagccctgttacattgggcagacggtcttccggcaggcagggaggggtccacgagctttcagccttcgaacaactggtggtcgaactggtacggcacgacgatagttggcctttccttaagctggtgtccaaaatccaggtgcccgattattacgacataataaaaaagcccatcgctcttaatatcattagggagaaggtcaataaatgcgaatacaaacttgcctccgaattcatcgatgatattgagcttatgttctccaattgcttcgaatataaccccagaaatacatccgaggctaaggccggtacacgactccaggcattctttcacattcaagctcagaagctgggcttacacgtgactccatcaaatgtagatcaggtttcgacgcccccagcagccaagaagtctcggatctag

SEQ ID NO: 216168 - DNA, 4671 bp, synthetic construct
  misc_feature 1..4671: note = Description of Artificial Sequence: Synthetic coding sequence
  source 1..4671: mol_type = other DNA
atgcctctcttgcatcgtaagcccttcgtgagacagaaacccccagccgacttgagacccgacgaggaggtcttctactgtaaagtgacaaacgaaatttttagacactacgacgactttttcgagcgtaccatcctttgcaacagcctggtttggtcctgcgcggtgaccgggcgacctggtctcacgtatcaggaggccctggagtctgagaagaaagctcgtcagaatctgcaatcctttcctgagcctctgattatccctgtgctctatctgacaagcctgactcaccgcagccggctccatgagatctgtgacgacattttcgcttatgtgaaagaccgctacttcgtggaggagacagtcgaagttatacggaataacggagccaggctacagtgcagaatattggaagtgctgccgccttcccatcagaacgggttcgccaacggacatgtgaatagtgttgacggtgaaactatcatcatttcagattctgacgatagcgagacccagagctgctcctttcagaatggtaagaagaaggatgctattgacccacttctttttaagtataaagtccaaccgactaaaaaggagctccacgaatccgccatcgtaaaagcaacccagattagtaggcgtaagcatctgttttctcgggataaacttaagctgtttctaaaacagcattgtgagccccaggatggggtgattaaaatcaaggctagtagcctgtccacatacaagatagccgagcaggatttctcctacttttttcctgacgatcctcccactttcatctttagccccgctaaccggagacgtggaaggccgccaaaacgaatacatatttctcaggaggacaatgtggctaacaagcaaactttagcaagctacaggtccaaagccacgaaggaacgcgacaagttacttaaacaggaagagatgaaatcgctagcctttgagaaagccaaactcaagagagagaaggccgacgccctggaggctaagaagaaggagaaggaggacaaggagaagaaaagggaggaattgaaaaagatcgtcgaggaagagcgtctgaagaaaaaagaggagaaagaaaggctgaaggttgaaagagagaaagagcgtgagaaacttagagaagagaagaggaagtacgtcgaatacctgaaacaatggagcaagcctagggaggacatggaatgtgatgatctgaaagaactgccagagccaacacctgttaagacacggctgcctcctgagattttcggggatgccctgatggtgctcgaattcctgaacgcgtttggcgaattattcgatcttcaggacgaattccctgacggggtcaccctggaggtgctcgaagaagctctggtaggcaacgacagcgagggccctctttgtgagctcttgttcttctttctcacagcgatcttccaggccattgcagaggaggaggaagaggtcgcaaaagaacagctgactgacgccgacactaaagacctcacggaagccttagacgaggatgctgatcccaccaagagtgcattatccgctgttgcgtcattggcagcagcatggccacaacttcaccaggggtgttcactgaagtcattggatctggacagctgcaccctttctgaaatcctcaggctgcacatcctcgcgtcaggcgctgatgtgacctccgccaatgcaaaataccggtatcaaaagaggggcggttttgacgccaccgacgatgcctgtatggaactgcggttatccaacccgagccttgtcaagaaactgagctccactagtgtctacgacctgacccccggagagaagatgaaaatcctgcatgcgttatgcggaaagctgctgaccctggtctccacaagagactttatagaagactatgtggacattctgcgtcaagcaaaacaggagtttcgggagctaaaagcagagcagcacaggaaggagagagaggaggcagcggctcggattagaaagcgcaaagaggaaaagttaaaagagcaggagcagaaaatgaaagaaaagcaggaaaagcttaaggaagacgaacagagaaactcgactgctgacatcagcattggcgaagaggagagggaggattttgacacctcgatcgaaagtaaggacacagaacagaaggaactggatcaggacatggtcacggaagacgaagatgaccctggtagccataagagaggacgacggggaaaacggggacaaaacgggttcaaagagtttaccaggcaggagcagattaattgtgtaacaagagagcccctaacagccgatgaggaagaggccctgaaacaggaacatcagcggaaagagaaagagctgttggagaaaatccagtccgcaatcgcgtgcacaaatattttcccactcggaagggataggatgtatcgcagatattggatctttccctccatcccaggattgttcattgaggaagattatagcggattaacagaggacatgctgctgcctcggccatcttctttccagaacaacgttcaatctcaagacccgcaggtgtctacaaagacgggtgaaccgctaatgtcagagtcgacttctaatattgatcagggccctagggaccacagtgtgcagctgcccaagccagtccataagcccaacaggtggtgcttctacagcagttgtgaacagttagaccaactgatcgaggcactcaactcccgagggcaccgtgagagcgcgttgaaggagactctgttgcaggagaaatctcggatctgcgcccagctggcacgcttctcagaagaaaagttccacttctctgacaagcctcagccggactccaagccaacctatagtcgcggacggtctagtaacgcctacgatccttcccagatgtgtgccgaaaagcagttagaactgcgacttcgggacttccttctagacatagaagatcgcatctaccagggaacactaggcgcaatcaaggtcacagatcggcacatttggaggtcagccctcgagtcgggtcgatatgagcttctaagtgaagagaacaaggaaaatgggattattaaaaccgtaaacgaggatgtcgaggagatggagatcgatgaacagacaaaggttatcgttaaggacaggctcctgggcattaaaaccgagacgccctcaactgtgtccaccaatgcctcgactccacagagcgtgtcttcagttgtccattacctggccatggctctctttcagatagagcaggggatcgaaaggcggttcctgaaagcgcctttagatgcctccgacagcgggagatcttacaagactgtgctcgaccgctggagagagagcctgctttctagtgcgagcctgagccaagtcttcctgcacttatccacgttggaccgcagtgtcatttggtccaaatcaattctcaacgcccgatgcaaaatctgccgcaaaaagggtgacgccgaaaatatggtgctgtgcgacggctgcgatcgagggcaccacacatattgtgtgaggcctaagttgaagactgtgcccgagggggactggttctgtccagaatgtaggccaaagcagcgctcccgacgcctgtcctctagacagcggccaagtttggagagcgacgaagacgtggaggacagtatgggaggcgaggacgacgaggtggatggggacgaagaagaggggcaaagtgaggaagaggaatatgaagtcgagcaagacgaggacgacagccaggaagaggaggaagtttcactcccaaagagagggagaccacaggttaggctccctgttaagaccaggggtaaactgagcagctccttttcctcgcgtgggcaacaacaggaacccggtcgataccccagtaggagtcaacagagcactcctaagaccactgtctcctcgaaaaccggtagaagccttaggaagataaactctgcgcctcccactgaaacaaagtcattgcgcatcgcgagtcgcagcactcggcactcccatgggcctctacaggctgacgttttcgtggagttgctgtccccaagaagaaagagaaggggtcgcaagagtgcaaataacactcctgagaactccccaaattttcctaactttagggtcatcgccaccaagtcgagtgaacaaagcagaagtgtgaatatcgcgagcaagctgagcctgcaggaatccgaaagcaaaaggagatgcagaaagcgccagtccccagagccatctcccgtcaccttgggaagacggtcatcagggaggcaaggtggagtacatgagctcagtgcctttgagcagctggtagtggagttagtgcgccatgacgattcatggcctttcctgaaattggtgtccaagatccaagttcccgactattatgatatcattaagaagcccattgccctgaacataattcgcgaaaaggtgaataaatgtgaatacaagctcgcctcagagttcattgacgacatcgaactcatgttctctaactgctttgagtacaacccgcgaaacacatctgaggccaaggccggaaccagactgcaggcctttttccacatccaggcacagaagttagggctccacgtcaccccttctaatgtcgatcaggtttcgacaccacccgcagccaaaaagtcacggatttag

SEQ ID NO: 216169 - DNA, 4671 bp, synthetic construct
  misc_feature 1..4671: note = Description of Artificial Sequence: Synthetic coding sequence
  source 1..4671: mol_type = other DNA
atgcccttgctgcatcgcaagcccttcgtccggcagaaacctccagcggacctgcgtcccgatgaggaagtcttctactgcaaggtcacaaacgaaatatttaggcactatgatgacttctttgaacggaccattctgtgtaacagccttgtctggagttgcgccgttacgggtcggcctggacttacttaccaagaggcgttggagtccgagaaaaaagctaggcagaatttgcagtcttttcccgagcctctcatcattccggtgttgtacttaacatctctcactcaccggagtcgtttacatgagatctgcgacgatattttcgcctatgttaaagaccgctactttgtggaggagaccgtggaggttataaggaataatggcgctcgcctccagtgccgcatcttagaggtcttgccacctagtcaccaaaacgggtttgctaacgggcacgtcaactcagttgacggcgagaccattatcattagcgatagtgacgattccgaaactcagtcctgcagctttcagaacggcaaaaagaaggatgccattgaccctctgctgttcaagtacaaagttcagccgactaaaaaggagcttcacgagtctgccatcgtgaaggcaacccagatctcacgtagaaagcacctgttttccagggataagctaaaattattcctgaaacagcattgtgagcctcaggacggtgttataaaaatcaaggccagctcacttagcacttataagatagccgagcaagattttagctacttttttcccgatgatcctcccacatttatcttcagtccagcgaatagaagaaggggaagaccaccaaagagaattcatatctctcaggaggacaacgtcgccaacaaacagacactggccagttatcggtcaaaggccacgaaggagcgcgacaagctcctgaaacaggaagagatgaagagcctggcttttgagaaggctaaactcaaacgagaaaaagctgatgcacttgaggccaagaaaaaggaaaaggaagataaggaaaagaaaagagaggagctgaaaaagattgtagaagaggagaggttgaaaaagaaggaggagaaggagaggctgaaggtcgaaagagagaaagaacgtgagaagctgagggaagagaaacggaagtacgtggagtacttgaagcagtggagtaagccccgagaagacatggaatgtgacgacctgaaggagctgcctgaaccaacaccagtcaaaactaggctgccgccagagatttttggcgatgccttgatggtactcgagtttttgaacgcttttggcgagttgtttgacctgcaggatgagtttccggatggagtgacactggaagtacttgaagaggccctcgtcggaaacgattccgaggggccactttgtgagctgctgtttttcttcctgaccgcgatttttcaggcaatcgcagaagaggaagaagaggtggccaaggaacaattaaccgatgccgatactaaggacctgactgaagccctggacgaagatgctgacccaactaaatccgcccttagtgcagtagcttccctggccgctgcttggcctcagctccatcagggatgtagcctgaaaagcctcgacctggattcatgcactctcagcgaaatcctcaggcttcacatcttggcatccggcgctgatgtcacctccgcgaacgcaaagtacaggtaccagaaaagaggaggcttcgatgccactgacgatgcttgcatggagctcagacttagcaacccttcacttgtgaaaaagctgtcaagtacctctgtgtatgaccttacccccggtgagaagatgaagatcttgcacgccctgtgcgggaagttactgaccttagtgtcaacccgcgatttcatcgaggattacgttgatattctgaggcaggccaagcaggagtttcgcgaattgaaggcagagcaacaccggaaggagagagaggaggcggctgctaggatccgcaagaggaaagaggagaagctgaaagagcaagaacagaaaatgaaagagaaacaagaaaaactgaaagaagacgagcagagaaacagtaccgccgatatatccattggcgaagaggagagagaagatttcgacacaagcattgagtccaaagacacggaacagaaggagctggatcaagatatggtgacagaggacgaggacgaccccggatcccacaaaagaggaagacggggaaaaaggggacagaatgggtttaaggagtttactagacaagaacagattaattgtgtcacccgggaaccgctcactgcggatgaggaagaggccctaaaacaagaacaccaacgcaaagaaaaagaactccttgagaagatccagtcagccatagcgtgcactaacatcttcccccttggcagggaccggatgtaccgcaggtactggattttcccaagcattcccggactgtttattgaagaagactacagcggtttgaccgaagatatgttgctgccacgtcctagctcttttcagaataatgtgcaatcacaggacccccaagttagtaccaagactggagaaccactgatgtccgagagtactagtaatatcgaccaggggccaagggaccactcagtacagctgcccaagcctgtacacaaacccaatcggtggtgcttctatagttcttgcgaacagctggaccaattgatcgaggcactgaattcgcggggacaccgggagtctgctcttaaagaaaccctcctgcaagaaaagtcgcgtatatgcgcccagctggcacgattctccgaggaaaagtttcacttttctgataaaccacaacccgactccaagccaacctactctcggggaaggtcctctaacgcttatgacccgagtcaaatgtgcgcagagaaacagctggagctgagactcagggacttcctgcttgatatcgaggaccgcatctaccaaggcactctcggcgctattaaagtcacggatcggcatatctggcgaagtgctcttgagtctggtcgatacgaacttctctccgaagaaaacaaagaaaacggaatcatcaaaacagtaaacgaggatgtcgaagaaatggaaattgatgagcagaccaaagtgatcgtgaaggacagactgttgggtataaagaccgagactccgtctacagtgagtacgaacgcaagcactccacagagcgtcagctccgtagttcattacctagcaatggccttgttccagattgagcagggaatcgagcgccgatttcttaaagccccactggatgctagtgacagtggacggagttataagactgtcctggatcgctggcgggagagcttgttatcctctgctagcctgagccaagtgttcctgcacctgtctacgctcgaccgctctgtcatctggtccaagagcattttgaacgccaggtgcaagatatgtcggaaaaaaggcgacgcagaaaacatggtgctgtgcgacggctgcgatcgaggtcaccatacgtactgtgttcggccaaaactgaaaactgtgccggagggcgattggttctgccccgaatgccggcctaaacagcgttctcggagactcagctcacggcagaggccctctctggaatctgatgaggacgtcgaggatagcatgggtggagaagatgatgaggtcgacggcgatgaagaggagggccagtctgaggaagaagagtacgaagttgagcaggacgaggatgattcccaggaagaggaggaagtcagtctgcctaaaagaggcaggccgcaagttcgattacctgttaagactcgcggaaagttgagcagctcttttagcagtcggggtcagcaacaggagccgggaaggtacccgagtcgttcccagcaatccactccgaagaccaccgtgagttctaaaaccggccgaagtctgcgtaaaataaattctgcccctccgaccgaaactaagtcattaaggatcgctagcagatctactcggcactcccatgggcctctgcaggccgacgtattcgtagaactgctgtcccccagaagaaaacgcaggggcaggaagtctgctaataataccccagagaactcccccaactttccgaattttagggtcatcgcaactaaatcctccgagcagagcaggtctgtcaatatcgcctccaagcttagccttcaagaaagcgagtcaaaacgaaggtgccgcaagagacagagtccagagccctccccagttacgctaggccgacgaagcagtggtcgacagggtggcgtgcatgaactttcggcttttgaacagcttgtggtggagctggtgcgccacgacgactcttggccattccttaagctggtgtccaaaattcaggtgcctgattactacgatatcatcaagaagccaatcgccctgaatataatccgagaaaaagtgaacaagtgcgagtataagctcgctagtgaattcatagatgacattgagttaatgttctctaattgcttcgagtacaatccccgaaacaccagtgaggctaaagcgggaactcggcttcaggctttttttcacatacaggcccaaaaactcggactacacgtaacacctagcaacgtcgatcaggtgagcaccccacctgccgctaagaagtcacggatatag

SEQ ID NO: 216170 - DNA, 3702 bp, synthetic construct
  misc_feature 1..3702: note = Description of Artificial Sequence: Synthetic coding sequence
  source 1..3702: mol_type = other DNA
atgaagagtttggctttcgaaaaggccaaacttaaacgggagaaagcagacgccctggaggccaaaaagaaggaaaaagaggataaggagaaaaagagggaggagctcaaaaaaatagtggaagaagaaagactgaaaaagaaagaggaaaaagagcgacttaaggtggagcgcgaaaaggaaagagagaagcttagagaggaaaagcgaaagtatgttgaatacttgaaacagtggtccaagcccagagaagacatggagtgtgacgacctgaaagagcttcccgaaccaacgccggttaaaacacgactccctcctgaaattttcggcgatgccctgatggtactcgaatttctcaacgcctttggcgagctgtttgacttacaagatgagttcccagacggcgtgacattggaggttctagaggaggcactggtgggcaacgacagcgaaggacctctttgcgagctcctcttctttttcctgacagccattttccaggctatagccgaagaagaagaggaagtggctaaagagcagctgactgatgccgataccaaaggctgttcgctcaaatcactcgatttagacagttgcaccctgtccgagattctgagactgcatatccttgcatccggtgccgatgtgaccagcgcaaatgctaaataccgatatcagaaacgaggaggattcgacgctacagacgatgcatgcatggagctccgcttatcaaacccctccctagtgaaaaagctcagtagcacgagcgtttacgatctcacccccggagagaaaatgaagatcttgcacgcattgtgcggcaaactgctgacactggtcagtacacgggacttcatcgaagattatgtcgatattctgcggcaggccaagcaggaattccgcgaactaaaagctgaacagcacaggaaggagcgcgaagaagctgcagcaagaattcgaaagaggaaagaggaaaaactcaaggagcaagaacaaaagatgaaggaaaagcaagagaaattaaaggaggatgagcagcgcaactccactgctgacattagcattggggaggaggaaagggaggacttcgacacttctatagaaagtaaagacacagaacagaaagagctcgatcaggatatggtgacggaggatgaggacgaccctggtagtcataagcgcggaaggaggggtaaaagggggcagaacgggttcaaagagtttacaagacaggaacagataaactgtgttactagggaaccactcactgccgacgaggaagaggcccttaaacaagaacatcagaggaaagagaaagaactgctcgagaagatccagagtgctattgcatgcaccaatatttttccattaggcagagatcggatgtaccgacgctactggatcttcccaagtattccagggctgttcatcgaggaagactatagcggactgacggaagacatgctgcttccgcgtccgagttcctttcagaacaacgtacagagtcaggacccccaggtgagcactaaaacgggcgagccactgatgagcgagagcaccagtaacatcgatcaaggtccgagggatcacagcgtgcagctgcccaagccagttcacaaacccaaccgttggtgtttctattcttcctgtgagcagctggatcagttaattgaagccttgaatagtcggggtcaccgggagtcagccctgaaggaaacactgcttcaagagaaaagccgcatctgtgcccaactcgctcggttctctgaggagaaattccatttttccgacaagccccagcctgactcaaagccaacatattctcgtggccgatcaagtaatgcctacgaccccagtcagatgtgtgccgagaagcagctcgaactccgtctgcgtgactttctgctcgacattgaagatcgcatctaccagggcacattgggtgccatcaaggtaactgatagacacatatggcgcagcgccttggagtcgggcaggtacgaactgctctccgaggagaataaagaaaacggcatcattaaaaccgtgaacgaggatgtagaggagatggaaatcgacgaacagacaaaggtcatcgtgaaagacaggttgctcggtataaagactgaaaccccttcaacggtctctaccaacgctagtacacctcagtctgtgtcatctgtcgtgcactacctcgcaatggcgctatttcagatcgaacaggggatcgaacgcagattccttaaggcaccacttgacgcctctgattcaggcaggagttacaagacggttctggatcggtggagagaaagcttactgtcgtcggctagcctctctcaggtgtttctccacttgtccactttagatagatccgtcatctggagcaagtcaatcttgaacgcgcgttgtaaaatctgtcgcaaaaagggcgacgcggagaatatggtgctttgcgacgggtgtgatcggggacaccatacatattgtgtccggcctaagctaaaaacagtgccagaaggagattggttttgtccagagtgcagaccaaagcagaggtcccggaggttgagttcccgacagaggccgtccctggaaagtgacgaggatgtggaggattccatgggaggtgaggacgatgaggtagatggagacgaggaggaaggacagtcagaggaggaagaatatgaagtagaacaagatgaggacgatagccaagaggaggaagaggtttccctccccaagaggggaaggccacaggttagactcccggtcaaaaccagaggcaaactgtcctccagcttctctagccgcggacagcagcaggaacccggaagatatccttcaagaagccagcaatctacaccaaagaccactgtgtcttccaagaccgggcgttcccttaggaaaatcaattccgctcctccaaccgagactaagagtctccggatcgcttctaggagcacgcgtcacagccacggtccactccaggcagacgtgttcgttgagttactgagccctcggaggaaaagaaggggtcggaagtcagcgaataatacccccgaaaattctcccaactttcctaattttagagtaatagcaacaaaaagcagtgaacagtcccggtccgtaaacattgcctcaaagctctctctgcaggagagtgagagtaaacgccgatgccgaaagagacagtcgcctgaaccatctcctgtaacactcggtcgaaggagctctgggcgtcagggcggtgttcacgagttgtctgcctttgaacagctggtggtggagctagtgaggcacgatgactcatggccttttctcaagctagtttccaaaattcaagtgcccgattactacgacataattaagaaacccatagccctcaacattatcagggagaaggtgaataagtgtgaatacaagctcgcatcggagttcatagacgatatcgaacttatgtttagcaactgcttcgagtacaacccacgtaatacgtcagaggcaaaggctggaacaaggctgcaggcgtttttcatcttcagactgaaatctctggactctactagccacccagtaatgtggaccaaattagcacatcataggttacggaagtcccatgaatctgactttgtgctcctgaaggacatttttgaggagaaacagattgtgcatgagaacggaactctgaatcatgctgtgtag

SEQ ID NO: 216171 - DNA, 4452 bp, synthetic construct
  misc_feature 1..4452: note = Description of Artificial Sequence: Synthetic coding sequence
  source 1..4452: mol_type = other DNA
atggcccctctcctgggcagaaagccctttcctctggttaaaccattacccggagaagagccactgttcacgatcccccatactcaggaggcatttagaaccagagaagagtacgaggctaggctggagcgatatagcgagcgaatttggacatgcaagtctacggggtcctcccagctgactcacaaagaggcttgggaggaggaacaggaagttgctgaactccttaaggaggagtttccagcatggtatgaaaagcttgtgctagagatggtgcaccacaacacagcctccctggaaaagctcgtggacacagcatggctggagattatgacaaagtacgccgtcggagaagaatgcgacttcgaggttggcaaggagaagatgctgaaggtgaagatcgtgaagattcatcctcttgagaaggttgatgaggaggccacggagaaaaaatcagacggggcttgtgattcgccctcaagtgataaggagaacagctcacagatagcccaggatcaccaaaagaaggaaaccgtcgtgaaagaggacgaggggaggcgggaatctataaacgatagggcgcgtcgatccccccgaaagctgcccacgtcactcaagaagggtgagcgtaaatgggcccctcccaagttcctgcctcataagtatgacgtcaagctacagaacgaagacaagatcattagtaatgttccggcagattctttgatccggacggaacgccctcccaacaaagaaattgtccgctactttatcaggcacaatgcactccgcgcaggaacgggggaaaatgccccttgggtcgtagaggacgaactagtcaaaaagtacagtcttccctccaagttttcagattttctcctggacccgtataagtatatgacactcaatcccagcacaaaacggaaaaataccggcagccccgatcggaagccttcaaagaagtcaaagactgacaattcaagcctgtcttccccgctcaatccaaaactttggtgtcacgttcatttgaagaagtcgctcagcggctctccactcaaggttaaaaatagcaagaacagcaagagtcccgaggaacacctcgaggaaatgatgaaaatgatgagccctaacaaactacacactaattttcatatcccgaagaagggcccacctgcaaaaaagcccggtaagcattctgacaagccactgaaggccaaaggacggtcaaagggcatactgaacggccaaaaaagcacgggcaacagcaagagccccaaaaagggcctgaagaccccaaagacgaaaatgaagcagatgacactgctggatatggcgaagggaacacagaaaatgactcgcgcaccacgtaattcaggtggaactccacgtacgagcagtaaacctcacaagcacttacccccagccgcactgcacttaatcgcctattacaaggagaataaagaccgggaagacaagcggagcgccctgagctgcgtgatttccaagactgccaggttactttcttctgaggatcgggcacgcctccccgaagagctgagaagccttgtccagaagagatatgaactcctggagcataagaaaaggtgggcctcaatgtcagaagagcagcggaaggagtacctaaagaagaaacgggaagaactcaaaaagaagctgaaggaaaaagccaaggagcggagggaaaaggagatgctcgaaaggcttgaaaagcaaaagcgctatgaggatcaggagctgaccggtaagaatctgcccgcttttcggctggtggatacaccagagggactgcctaatacactgttcggagacgtcgcgatggtcgtagaatttttgtcgtgttacagcggcctactgctgcctgatgctcagtaccccattaccgctgtctccctgatggaggccctttctgcagacaagggcggatttctgtatctgaaccgagttctcgtgattttgctacagaccttgttacaagatgagatcgccgaggattatggtgaactagggatgaagctgagcgagatcccccttaccttgcatagcgtgagcgaactggttcgactgtgcttgagacgatcagacgtacaggaggagagcgagggttccgatacggatgataacaaagacagcgccgcttttgaagacaacgaagtccaagatgaatttctcgaaaagctggaaacaagcgagttctttgagctgacatccgaggagaagcttcaaatccttacagctctctgtcaccgcattttaatgacctactcagtacaggaccacatggagactagacagcagatgagcgccgaactgtggaaagaacgcctggcagtgttgaaggaagagaacgacaaaaaacgggctgagaaacagaaaaggaaagagatggaagcaaaaaacaaggaaaatgggaaggtggagaacggacttgggaagactgacaggaagaaagaaattgtgaaattcgaaccccaagttgacaccgaggcggaggacatgatctctgccgtgaagagccggagactgctagccatccaagctaaaaaggagagggaaatacaggagcgcgagatgaaggtaaaactggaaagacaggcggaagaagaacgtatccggaagcataaggccgcagccgagaaagcatttcaagaaggcattgcaaaagcgaaactggtcatgcgcagaaccccgatcgggaccgatcgaaatcacaaccgatactggctcttttccgacgaagtacctggacttttcatagaaaaaggctgggtgcacgactccattgactacagattcaaccatcattgtaaagaccacactgtatccggtgacgaggactattgcccaaggagcaaaaaggctaatcttgggaagaacgccagtatgaatacccagcacgggactgctaccgaggtggccgtcgaaactacaacgcccaagcagggccagaacctctggttcctctgcgattcacagaaggaattagacgaactattgaattgtttgcatcctcagggcattcgtgagtcacagcttaaggaacgtttggagaagcggtaccaggacattatccacagcattcatttggctagaaagcccaatctcggcctcaaatcatgcgatggtaaccaggagctcctgaactttttgcgaagtgacctcatcgaggttgccactcggctgcagaaggggggactgggctatgtagaagaaacaagtgaatttgaagcaagagtgataagtctggaaaaactgaaagacttcggggaatgtgtcattgctttacaggcatctgtgataaagaagtttctgcaagggtttatggcaccaaaacaaaagcgacgtaagctccagtcagaagatagtgccaagactgaggaagtcgatgaagagaaaaaaatggtggaagaagcaaaagtcgcatctgcgttggagaaatggaaaacagctattagggaggcccagacattctctaggatgcacgtgttgttgggaatgctggacgcatgcataaagtgggatatgagcgcagagaatgctagatgtaaggtttgtaggaagaagggtgaggatgacaagctgatcctgtgcgacgaatgcaacaaggctttccatctgttttgcctccgtcctgcgctatatgaagttcccgatggggagtggcaatgccctgcttgccaacccgctactgctagaaggaattctaggggcagaaattacactgaggaatcagcttcagaagacagcgaggacgacgagtctgatgaggaagaggaagaggaggaagaagaggaggaggaagaggactacgaggtggccggattgcgtctgcgtccgagaaagaccatccgtggaaaacacagcgtgatacccccagcggctcgctcggggagacgcccaggaaagaagcctcactccacccgtagatcccagcccaaagccccacccgtggacgatgccgaagtggacgaactcgtactgcagacgaagcggtcctcacgcaggcagtcactcgaactccagaaatgcgaggaaattttgcacaaaattgtcaagtacagattttcatggccatttagggaaccggtgacgcgcgacgaagcggaggactactacgacgttatcacccaccctatggatttccagactgtgcagaataagtgcagttgcggttcatacaggtccgtgcaggaattcttaaccgacatgaagcaagtcttcacaaacgcagaagtttataattgcagggggtctcatgttctctcttgtatggtaaaaacggagcagtgtctagtggccctattgcacaagcatcttcctgggcacccttacgtgagaaggaagcggaaaaaatttcctgatcggttggctgaagatgaaggcgattccgaacctgaggcagtaggacagagtcgaggaagacggcagaagaaatag

SEQ ID NO: 216172 - DNA, 4452 bp, synthetic construct
  misc_feature 1..4452: note = Description of Artificial Sequence: Synthetic coding sequence
  source 1..4452: mol_type = other DNA
atggcaccgctgctcgggagaaaaccttttcctctagtgaaacccctcccgggtgaagagcccttgtttacaatcccgcatactcaggaggccttcagaacccgcgaggaatacgaggctcgcctggaaagatatagcgaacgcatctggacctgtaagtcgacaggctcgtcacaacttacacacaaggaagcctgggaagaagagcaagaggttgccgaacttcttaaggaggagtttccagcctggtacgagaaattggttttagagatggtgcaccacaacactgcctctctcgagaaactggtggatacagcctggcttgagatcatgaccaagtatgctgtaggggaggagtgtgacttcgaggtcggcaaggaaaaaatgctaaaggtcaagatagtgaaaatacaccccttagaaaaggtagatgaagaggcaactgagaaaaagtctgatggtgcctgtgatagtccaagttctgataaggagaactcttcgcaaattgcacaggaccaccaaaagaaggagacagtggttaaggaagacgaggggcgacgcgagtccatcaacgacagggccagacgctctcctagaaagctgcccacgtctctgaagaagggcgaacgaaagtgggcccctcccaaattcctgcctcacaaatatgacgttaaactgcagaatgaagataaaattatcagtaatgtgcccgctgattctctgattcgaacagagcgccctcctaacaaagagatagtccgatattttattcgacataatgccttgcgcgctggcactggagagaatgccccatgggtggtcgaggacgagctagttaagaagtacagtctaccttctaagttctcggactttttgcttgatccgtacaaatatatgaccttaaatccctctaccaaaaggaagaataccggttcacctgaccggaagccttccaaaaagtcaaagaccgacaacagctctctgagtagtcccttgaatcccaaactatggtgccacgttcatttgaaaaaatcgctctctggctctccattaaaggtgaaaaacagcaagaactccaagtcccctgaagagcatttggaggagatgatgaaaatgatgtctcccaacaaattgcacactaactttcacatccctaagaagggtcccccagccaagaaacccggtaagcatagtgataagccattaaaggccaagggacgcagcaaagggattttgaacggacagaagtccactggcaactcaaaatcacctaagaaagggctcaaaaccccgaaaactaaaatgaagcagatgaccctattggacatggctaaggggactcaaaaaatgacccgagctcctcgcaattcaggcggaactcctcgcacatcctctaaaccacataagcacctgcctccagccgctctgcatcttatcgcatattacaaagaaaacaaggaccgggaagacaagcgtagcgccctctcttgtgtgatctctaaaaccgccaggctactatcatcggaagaccgggctcgactacccgaggagctgcgcagcctagtgcagaagcggtatgagctgcttgagcacaaaaaaaggtgggcaagtatgtccgaggaacaacgcaaagagtacctcaaaaagaagcgggaggagctgaaaaaaaagctgaaggagaaagcaaaggagaggcgagagaaggaaatgcttgaacggctcgaaaaacagaagagatatgaagaccaagagctgactggcaaaaacctgcccgcattccgactcgtagatacacccgagggtcttcccaacacactgtttggggacgtcgcgatggtggtggagttcctgagctgctatagcggtctactgctaccagatgcccaataccctattacagccgtctcactcatggaggccctatctgccgacaagggcggatttctgtacctcaacagggtgcttgtgatcctgcttcagactctgcttcaggacgaaattgcagaagactatggggagctgggcatgaagctcagtgagatcccactcacccttcattccgtcagcgaactcgtacgactgtgtcttcgacgaagtgatgtgcaggaggagtccgagggaagtgataccgatgacaacaaggactctgccgctttcgaagataatgaggtccaggacgaatttcttgaaaaattggagaccagtgaatttttcgagctgaccagtgaggagaagctacaaatccttacagcactgtgtcacaggatcttgatgacatattccgtccaggaccacatggaaaccaggcagcaaatgagcgctgaactctggaaggaaagactagctgtcctcaaggaagaaaacgacaagaaacgagctgagaaacaaaaacggaaagaaatggaggccaagaacaaggagaacgggaaagtagaaaacgggctcggtaagacagataggaagaaggaaatcgtgaaatttgaaccgcaggtcgacacagaggcggaggacatgatcagcgctgtgaaatcacggaggctgctcgcaatccaggcaaaaaaggaaagagagattcaggagcgcgaaatgaaagtaaaactcgagcggcaagcagaagaggagcgaattcggaagcacaaagccgcagctgagaaagcgtttcaagagggcatcgccaaagcgaagctggttatgcgacgcaccccaatcgggaccgaccgcaatcacaataggtactggctcttcagtgatgaagttcctggcctgtttatcgagaagggctgggtccacgacagcattgattatagatttaatcaccattgcaaggatcacactgtgagtggggacgaggattactgtcccagatcgaagaaggccaatctaggaaagaatgcctccatgaacacacagcacggaacagctacagaagtggccgtggagacaactacacctaagcagggacagaacttgtggttcctctgcgatagccagaaggagctcgatgaactgctcaattgcctacacccccaaggtatacgtgaatctcagctgaaggagcgcctcgagaagcggtatcaagatataatccattcaatccatctagcaaggaagccgaacctggggcttaagtcatgcgatggtaaccaggaactgctgaattttctgaggagcgatctgatcgaagttgccaccagactgcagaagggaggtctcggctacgtagaggagacttctgagtttgaggctagagtgatatcccttgagaaactcaaagattttggggaatgcgtgatcgcgctccaggccagtgtgatcaagaaattcctgcaggggttcatggcccctaaacagaagagaagaaagcttcagtctgaagatagcgccaaaaccgaggaggtggacgaagaaaagaagatggtggaagaggctaaagtcgcgtccgctttagagaaatggaaaaccgcgataagagaggcccagactttcagcaggatgcacgtccttctgggaatgcttgatgcctgtattaagtgggatatgtcagccgagaatgccaggtgcaaagtctgccgtaagaaaggcgaggacgataaactgattttgtgtgatgaatgtaataaagcctttcatctcttctgcctgcgacccgcactgtacgaagttcctgacggcgaatggcaatgtccagcctgtcagcccgctactgctcggagaaactctcggggaagaaattacacagaggaaagcgcaagcgaggatagtgaggacgacgaatctgacgaagaggaagaggaggaggaggaagaggaggaggaagaggactacgaagtggcaggactcaggctgcgacccagaaaaactatacggggtaagcacagtgtgattccccctgccgctaggtccggcaggaggcccggaaaaaagccacattccacgagaagatctcagcctaaggccccaccggtggacgatgctgaagtcgatgagctcgttctgcagaccaagcgatcttcgagacgtcagagcctggaactgcagaagtgcgaagaaatcttgcacaagatcgtgaagtatcgtttttcgtggccctttcgggaaccagtaacgcgggatgaagcagaggactattatgatgtcataactcatcccatggactttcagactgttcagaacaagtgttcgtgcggatcgtaccggagtgtgcaggagttcctgactgacatgaagcaggtgttcactaacgccgaggtgtacaattgccggggttcccatgtactgagttgcatggtcaaaaccgaacagtgcctggtggctctgctccataagcatctgcctgggcatccttatgtgcgtcgcaaacgtaaaaagtttccagaccgcctcgcagaagatgagggcgactctgaacccgaggccgtagggcaatctaggggcagacggcagaagaagtag

SEQ ID NO: 216173 - DNA, 5622 bp, synthetic construct
  misc_feature 1..5622: note = Description of Artificial Sequence: Synthetic coding sequence
  source 1..5622: mol_type = other DNA
atggaagccaacgaccactttaatttcaccgggcttcccccagcccctgcggcaagcggactgaagccgtcccctagtagcggagagggtttgtatacgaatggtagtcccatgaatttcccacagcagggcaagtccctgaacggggacgtcaatgtgaacggactctcgaccgtgtcacacactacaaccagcggtattctcaacagcgcgcctcactccagcagcacctcccatctgcatcacccctccgtggcctatgactgcctttggaattattcacagtacccctccgccaaccccggtagcaatctaaaagacccacctctgctgtctcaatttagtgggggacagtatcctctaaacggaatcctcggcggatcccgccagccgtcttcaccatctcacaacacaaacctgagggctggatctcaggagttttgggcaaatggcacacagtcgcccatggggctcaattttgactcacaggaactttatgattctttccccgatcagaacttcgaggaagtggggtccggaatccaccccgatgaggcggctgaaaaggaaatgactagcgtggtggctgaaaatggaaccgggttagtcggcagcttggagttggaggaggaacagcccgaacttaaaatgtgcgggtataatggatccgtgccaagtgtcgagtccttgcatcaggaagtgtcagtgctagttcctgatccaactgtctcttgtttggatgatccttcacacttgccggaccagcttgaggatacacctattctgagcgaggactcactcgagcctttcaacagtctggcccctgagcccgtgtcaggcggactatatgggattgacgacactgaattgatgggtgctgaggataagcttccattagaagactctccagtgatcagtgccctcgactgtccctcactgaataacgccactgccttctctctattagcagacgacagccaaacaagtacgtctatcttcgcaagtcccacgtcacccccagtcctgggtgagagcgtgcttcaggacaattccttcgacttgaataatgggagtgacgctgaacaggaagagatggagactcagtctagcgacttcccacccagcctgactcagccggctccggaccagtcctctaccatccagctacatccagcaacttcacccgctgtttccccaacaacatctcccgctgtgagtctggtggtcagcccggctgcttcgccggagatatcaccggaagtctgcccggctgctagtactgttgtttcgcctgcagtttttagcgttgtgtcacctgcatctagcgccgttcttcccgcagtgtctctcgaggtgcctctgactgcaagcgtaacctcccctaaagctagcccggtcacttcccccgctgccgcattcccaacagctagccctgcgaataaagatgtgtcatcctttctggagactacagccgacgtggaggagatcaccggcgaaggtctcacggcatccggttcaggtgatgtaatgcgtcgtagaatcgccacccctgaggaggtccggctgcctctccagcatgggtggcgcagagaggtgagaattaagaagggcagtcaccggtggcaaggcgagacctggtattacggcccatgtggaaaacgcatgaaacagtttcctgaggtgattaagtacttgtctagaaacgtggttcacagcgttaggagggaacacttcagcttttcccccagaatgcccgtgggtgacttcttcgaggagagagacacgccggaagggcttcaatgggttcagctcagtgcagaagaaatccccagccgcatacaggcaatcactggcaagaggggccgaccaaggaatactgaaaaagctaaaaccaaagaggtgcccaaagttaagagaggccgaggcaggccccctaaggtaaagattaccgagttgctgaacaaaactgacaaccgaccactgaagaagctggaggctcaggagaccctcaatgaggaggacaaagccaagatcgctaagtctaagaagaagatgcggcagaaggttcaaaggggcgagtgccagacaaccatccaggggcaagctcggaataagaggaagcaggagacaaagtcactgaaacagaaagaagcaaaaaaaaagagtaaagctgagaaagagaagggaaagaccaaacaggaaaaacttaaagagaaggtaaaacgcgagaagaaggagaaggtcaaaatgaaggaaaaagaggaggtgactaaggctaaacccgcttgcaaggctgacaagacactggccacccagcggaggcttgaagagaggcagaggcagcagatgattttggaggaaatgaaaaaaccaaccgaggacatgtgtcttaccgatcaccaaccgctgccggatttcagcagggtgcctgggctgactctgccttccggagcgttctcagattgccttaccatcgtcgagttcctccattcattcggcaaggtcctgggattcgatccagccaaagatgtgccctcccttggagtgctgcaggagggactactgtgccaaggggactcactgggagaggtccaggacctgctggtgcgcctgctgaaggcagccctgcatgatcccggttttcctagttattgtcagtcattgaagatcctgggggaaaaagtgagtgaaattcccctcaccagagataatgtatcagagatacttagatgcttccttatggcttacggtgttgaacctgctctgtgtgataggcttcggactcagcctttccaagcgcagccccctcaacaaaaagctgccgtcttggctttcttagttcatgaactgaacggatccactctgattatcaacgaaattgataaaaccctcgaatcaatgtcctcatacagaaaaaacaagtggattgtggaaggaaggttgcgcagattaaagactgtgttggcaaagcgcacgggccgttctgaagtggaaatggaaggacccgaagaatgtctgggtaggagacgctccagcagaataatggaagaaacctcgggaatggaagaggaagaagaggaagagtctatagcggctgtcccagggcgtaggggcaggagggatggagaggttgatgcaaccgctagcagtatccctgagctggagcggcaaattgaaaaattgagtaaacggcagctcttttttagaaaaaaattgctgcactcatctcaaatgctgcgagcagtgtctctggggcaggataggtatcgcagacgatattgggttctaccctacttggccggaatattcgtcgagggcactgaggggaatcttgtgccggaagaggtgattaagaaggaaaccgactccctgaaagtggccgcacatgcttcactcaaccctgccctattttctatgaagatggagctggccggatctaatactactgcgagtagccctgcacgggcacgcggaaggccacgtaagaccaaaccaggcagtatgcaaccgaggcatttgaaatctccggtgcgcggacaggatagcgagcaaccccaggctcagctgcagccagaggctcagctgcacgccccagcccagccccagccccaactgcagttacagttacagagccacaagggatttctggaacaggaggggtctcccctgtctctgggccagtcccagcatgatctgagtcaaagtgcattcctaagttggctgagtcagactcagtcgcattccagcctactgtcctccagcgtcctaacacctgatagtagccccggaaaattggaccctgctccttcccagccacctgaagagcctgaacctgatgaggccgagtccagccccgaccctcaagccctctggttcaacatttcagcccaaatgccctgcaatgccgcaccaacccctcctccagcggtatctgaagaccagccaacgcccagcccccagcagttggctagttcaaaacctatgaatcgtccgagtgcagcaaatccctgttctccagttcagttcagctccaccccattggctggtctggctccaaagaggcgggcaggcgacccgggtgagatgccccaaagccctactgggctgggccagcctaaaaggagggggaggccaccttcaaaattttttaaacaaatggaacaacgatatttaacccagctaacagcgcaacctgtaccgccagaaatgtgctcaggctggtggtggattagagatcccgaaatgctggatgcgatgctgaaagccctccaccccaggggcattagagagaaagcactgcacaaacatttgaataagcaccgtgatttccttcaagaagtctgtctgcggccatccgccgaccctatcttcgagccaagacagctgcctgcttttcaagaagggatcatgtcttggtcacccaaggagaagacctatgagacagacttagccgttttgcagtgggtggaggagctcgagcagagggtcatcatgagcgacttacagatcagaggttggacatgcccgtcgccagactccactcgagaagatttggcctactgcgagcacctgagtgatagccaggaggatattacttggcgcggtcgaggacgggagggattagctccacagcgaaagaccaccaacccactggatctggctgtgatgcggctggcagctctagaacaaaacgtagagaggcgctatcttagggagcccttatggcccacacatgaggtggtgctcgaaaaggctctgctgtcaacaccgaatggcgctccggagggtactaccacagaaatttcttatgagatcacacctcggattcgggtatggaggcagaccttggagagatgcagaagcgctgcccaagtgtgcctctgcctgggacagctcgagcgctctatcgcctgggaaaagtctgtcaataaggttacttgtctcgtctgcagaaaaggggacaatgacgagttcctactcctatgcgatggatgtgatcggggatgtcacatatattgtcatcgtccaaaaatggaggccgttcccgaaggtgattggttttgtaccgtatgtctggctcagcaagttgaaggagaatttacacagaagcccggatttcctaagagggggcagaagcggaaatctggatactctctgaacttttccgagggagacgggaggagacgacgagtgctgttacggggaagggaatccccagcggcagggccacgctactctgaagaaggcctctctccttctaaaagaaggagactttccatgcggaatcatcatagcgacctaaccttctgcgagataatacttatggagatggagagccatgacgctgcatggcctttcctggagcctgtaaatcctcgtctagttagcggatatcggagaattatcaagaaccccatggatttttccaccatgcgggagcggctgctgcgtggcggatacacatcatctgaagagttcgccgctgatgccttactggtgttcgacaattgccagacctttaacgaagacgactcagaagtgggaaaagctgggcatataatgaggcgattcttcgagtcgcgatgggaggagttttatcaaggtaaacaggcaaatctctaa

SEQ ID NO: 216174 - DNA, 2514 bp, synthetic construct
  misc_feature 1..2514: note = Description of Artificial Sequence: Synthetic coding sequence
  source 1..2514: mol_type = other DNA
gtccctggccgacgaggccgaagggatggcgaagtggacgcgacagcaagtagcattccggagttggaaagacagatcgaaaagctgtccaaacggcagctgttctttcgaaagaagctgcttcactcaagtcaaatgctccgcgctgtctccctggggcaggataggtataggcgacgatactgggtgctgccatacctcgccggtatatttgtggagggaacggagggaaacttagtcccagaagaagtgatcaaaaaggagacagactcactgaaggtcgcggcacatgcgagcctgaaccctgcactgttttccatgaagatggagctggctggctctaacactacagcttcaagtccagcccgagccaggggacggcctaggaagaccaagcccggaagcatgcagcccaggcaccttaagtccccagtgcggggacaggactcggaacagcctcaggcccagttacagccggaagcccagttacatgcgcctgcgcaaccacagcctcagctgcagcttcagctgcaaagccataaagggtttcttgagcaggagggcagcccgctgagcctagggcagtcgcaacacgacttatctcagtccgcatttctcagttggctcagccagacccaatcccattcttcccttttgagcagttccgtgcttacacccgacagctcccctgggaaacttgatcctgctccgtcacagcccccagaagaaccagaaccagatgaggctgagtcaagcccggatccccaagcactgtggttcaatataagcgctcagatgccatgtaatgccgcacccactccacctccggctgtgagtgaggaccagccaaccccgtccccccagcagctggcgtcatctaaacctatgaacagacctagcgctgccaatccatgttcccctgtgcagttctcttctacacctctggctggcttagctccaaaacggagagccggtgaccccggtgaaatgcctcagagccccactgggcttggtcagcctaaaagacggggacgtcctccttccaagttcttcaagcagatggagcaacgatacttgacccagttgacagcacagcctgtgcctcccggatggtggtggatccgggatccagagatgctagacgcaatgctgaaagccctgcaccccagaggaattcgggagaaagccctgcacaaacacctgaacaagcacagagacttcctacaagaggtgtgcctgcgccctagtgccgatcccatctttgagcctaggcagctgcccgcttttcaggaagggatcatgtcttggagcccaaaggagaaaacgtacgaaacagatctggcagttttacaatgggtggaggagctggagcagagggtgattatgtctgatctccagatccgcggatggacctgcccctctcccgattcaactcgcgaagatctggcatactgcgaacacctttctgacagtcaggaagatatcacttggcgaggccgagggagagagggcctagcacctcaaagaaagacaaccaatcctttggacttggcggttatgcgcctcgccgctttagagcaaaacgtggagcgccgatatctgagagagcccctctggcccactcatgaggtggtgttagaaaaggctttgctgagtacacctaatggggcacccgaagggacaacgacagaaatctcgtacgaaatcaccccgaggattcgagtgtggcggcaaacactggagcggtgccggtccgctgcgcaggtgtgcttgtgcctcggccagctggagaggtcgatcgcctgggaaaaatccgttaacaaggtcacgtgcctcgtgtgtaggaagggcgataacgacgagttcttgctgctttgtgacggatgcgatcgaggctgtcatatatattgccaccgcccaaagatggaggctgtgcccgagggcgactggttttgcacagtgtgtctggcacaacaggttgagggcgaatttactcagaagccgggattcccgaaacgaggtcagaaacgcaaaagcggctattcgctgaatttctccgaaggcgatggccgacgtcgaagggtactactgagaggcagggaatcccctgccgctggaccaagatacagtgaggaaggcctctcacctagcaagagacggaggctgagcatgaggaaccatcacagcgatctcacattttgtgagatcattctgatggaaatggagtcacatgacgccgcttggccctttttagagcctgtcaatcctagactggtgtcgggatacaggagaatcatcaagaatcctatggattttagtactatgcgagagcggctgctccgagggggttacacgtcttctgaggagttcgccgcagacgcactgctagtgtttgataactgccagactttcaatgaggatgacagtgaggttggcaaagccggacatattatgcgtcgattcttcgaatcgaggtgggaggagttttaccagggaaaacaggccaacttatag

SEQ ID NO: 216175 - DNA, 5717 bp, synthetic construct
  misc_feature 1..5717: note = Description of Artificial Sequence: Synthetic coding sequence
  source 1..5717: mol_type = other DNA
atggaaatggaggcaaatgaccactttaatttcaccggcctgccacccgctcccgctgcgtctggcctgaagccgtcaccatcctctggggaaggattgtacactaacggaagtcctatgaatttccctcagcaggggaagtcattaaacggcgacgttaatgtgaacggtttaagtacagtctcgcatactacaacaagtggcattctgaacagcgcgccacatagctcttctacctcccacctgcatcatccaagcgttgcctatgactgcctgtggaactacagtcagtacccctccgccaaccccggaagcaatttaaaggatcctccattgctgagtcaattcagcgggggacagtatcctctgaacggcattttaggcggaagccgccagccctcgagcccaagccacaacacaaaccttagagcgggatctcaggagttctgggctaacggaacacagagcccaatgggcctcaactttgacagccaggaactgtacgatagctttcctgaccagaacttcgaagttatgcctaacggccctccaagttttttcacttcgcctcagacctcccctatgctgggatcctcgatccaaacgtttgcacctagtcaggaagtgggatctgggatacatccggatgaagccgcagaaaaagaaatgacctctgtggtggccgaaaacgggaccggactggtcggctcactcgaattggaagaggagcagcccgagttgaaaatgtgcggttacaatggctcggtgccgtctgtagaatcactgcatcaggaggtatctgtgcttgtcccagacccgactgtctcttgcttggatgatcccagccaccttcccgatcagctcgaagacacccccatcctgtcagaagattcacttgaaccatttaattcgttagcacctgaaccagtgtctggcggactgtatggaattgatgacacagagctgatgggggcagaagataaattaccccttgaagactcgcccgtaattagtgccttggattgtccgagtctcaacaacgctactgccttctcccttctggctgacgacagccagacctccactagtatttttgcgagtcccactagccccccagtccttggagaatccgtgcttcaagataactcatttgacctcaacaatgggagcgacgcggaacaggaggagatggaaacacagagctctgatttcccaccttccctcacacaacccgcacctgatcagagctcaacaatccagctgcacccggcaacaagtcctgccgtgagtcccaccaccagtcccgctgtctctctggttgtatcccccgcagcgagtcccgagatttcgccagaggtgtgccctgccgctagtaccgtcgtaagcccagcagtgttctccgtggtgagcccagcctcttcagctgtgttacctgccgtcagcctcgaagttccattaacagcctcagtgactagtcctaaggcctctcccgtaacgagccctgccgctgcatttcctactgcctcaccggcaaacaaggatgtcagctcatttcttgagacgaccgccgacgtagaggaaatcaccggcgaggggctgactgccagtggctcaggagacgtgatgcgcagacgcattgcaacccctgaagaagtccggctgcccctgcagcacggctggcgtcgagaggtgaggataaaaaaaggtagccatagatggcagggagaaacctggtattatggcccatgtggcaaacgcatgaagcagttccccgaggtgattaagtatctgtcacgcaatgtagtacattccgtgcgcagggagcatttctccttctctccccgaatgccagtgggtgacttcttcgaggagagagatacacctgagggattgcagtgggtccagttatccgcggaagagatcccttcaaggatacaggcgatcactgggaagcgtggccgacctagaaataccgagaaagccaaaactaaggaagtaccaaaggtaaagagggggagggggcgtcccccaaaggtgaaaattaccgagctgctgaataaaacggacaaccggccactcaagaagctggaagctcaggagaccctcaacgaggaagacaaagccaagatcgctaagtctaagaaaaaaatgcgacagaaggtgcaacgcggagaatgccagactaccattcagggccaggcgaggaataaaaggaaacaagaaacaaagtccctaaaacagaaggaggctaagaaaaagtccaaagccgagaaggaaaaggggaagaccaagcaggaaaagctgaaagaaaaagttaaacgagagaagaaggagaaggtcaagatgaaggagaaagaggaggtgacgaaggcaaaaccagcttgcaaagccgacaaaacactggcaacacagagaaggctggaagagcgacagaggcagcagatgatcctggaggagatgaagaagccaaccgaggacatgtgcctgacagaccaccagccactcccagatttttctagggttccaggtctcactctgcctagtggggcattttcagattgcctcacaatcgtagagtttttacacagctttgggaaggtgcttggcttcgaccccgcaaaagatgtgcccagcctgggcgttctgcaggaaggactcctctgccagggcgactctctaggtgaagtgcaagacctactcgtgcgattgcttaaagcagctctccatgatcctgggtttcccagttactgtcagtcactcaaaatccttggggagaaggtatcggaaattccgttaacccgtgacaacgtatccgaaattctgaggtgttttctcatggcctacggggtagagccagctctatgtgatcgcttgcgcacacagccatttcaagcacagccgcctcagcagaaagcagccgtgctggcgttccttgtccatgagttgaatggtagcactctgatcatcaacgaaatagataagaccctcgaatctatgtcctcttacagaaaaaacaaatggatcgtggaaggtcgtctgagaaggctgaaaacagtgctggcaaagaggaccggccgtagcgaagtagaaatggaagggccagaagagtgcctgggcagacgacgcagcagtcggatcatggaggagacttcgggcatggaggaggaagaagaagaggagtcaattgctgcagtgcctggacgtcgcggtagacgcgacggggaggtggatgccacggcctcctccatcccagaactcgaaaggcaaatcgaaaagctctcaaagaggcaactgttctttaggaagaaactgctgcactccagtcagatgctgcgcgctgtttcgctaggtcaggatcgctacaggcgtaggtattgggtgctgccttacctggccggtatctttgtcgaaggtaccgaaggtaacctggtacctgaggaggtgattaaaaaagagacggattccctcaaggtcgcagctcatgcgtctctcaacccagctctgttctctatgaaaatggaacttgccggaagcaacactaccgcatcaagcccggcacgagcgagaggccgtccaagaaagactaagcctggctctatgcagcccagacatctaaagagccccgtgcggggacaggattccgagcagccgcaggctcagttgcagcccgaggcccagttacacgctccggcacaaccgcagccccagcttcagctgcaactgcaaagccacaagggctttctcgagcaagaaggatcaccactgagcctgggccagtcccaacatgacctgtcacagtccgccttcctcagctggctgagtcagacccagagtcactctagtctcttgtctagctctgtgctgacccccgattccagcccgggtaagctggaccctgctccttcccagcccccagaagaacctgaacctgacgaggctgaaagtagcccggacccccaggccctgtggtttaacatttctgcacagatgccctgtaacgccgctcccactccccctcctgctgtgtcagaggaccagcctaccccgtcaccacagcaacttgcttctagtaagccaatgaacaggccaagtgccgcaaatccatgcagtccagtccagttcagctcaactccactggctggtctggcccctaagaggagggccggagatccaggcgagatgcctcagagcccaacaggtttgggacagccaaagaggcggggtaggcccccttccaagtttttcaagcagatggaacagcgctatctaacccagttaacagcacagcctgtgccccctgaaatgtgttcaggctggtggtggatcagagacccagaaatgctggacgccatgctgaaggccttgcacccccgagggatcagggaaaaggcacttcataaacacctcaacaagcatcgcgatttcctccaagaggtttgcctgaggcccagtgcagaccccatctttgaacccagacagcttcccgctttccaggaggggatcatgtcttggtcccctaaggaaaagacatacgaaaccgacctggccgtgctacagtgggtcgaggagctcgagcagcgcgttattatgtccgacttgcagattcgcggatggacatgtccttcccctgatagcacaagggaggacttggcatattgcgagcacctgtctgatagtcaggaagacatcacatggcgtgggcgtggtagagaggggctggcaccccagaggaagactaccaaccccctggatctggcagtcatgcggctggccgctttggagcagaatgtggagcgacggtatctcagagaacctctctggcctacccacgaggtggtgctggagaaggcgttgctgtccacgccgaacggcgctccggaagggacgaccaccgaaatttcctatgaaatcacacctcgcatcagagtgtggcgacagacactggagcggtgccgcagcgccgcacaagtgtgcttatgcctggggcagctcgagagatccatagcctgggagaagtctgtgaacaaagtgacttgtctcgtgtgtcgaaagggagacaatgatgagttcctcctcctgtgtgatggctgtgaccggggatgccacatttactgccaccgacccaaaatggaagcagtacctgagggggactggttctgtaccgtgtgtctggcacaacaggtggaaggcgagtttacccaaaaaccaggtttcccaaagcgcggacaaaagcgaaaatccggttactccttgaacttctctgagggggatgggagacgcagacgggtcctcctgcgcggaagggaaagccctgcagctggtccccgatattcagaagagggtctgagcccctcaaagagaagaaggctcagtatgaggaatcaccacagcgacttgacgttttgtgagattatcttgatggagatggagtcccacgacgcggcttggcctttcctcgaacccgttaacccccgtctggtatcgggctatcgccgaatcatcaagaaccccatggactttagtaccatgcgagaacggctcctgcggggtggatatactagttctgaggagtttgctgccgacgcactgcttgtgtttgacaactgccagaccttcaatgaggatgattctgaggtgggcaaggcaggtcacattatgagacgattcttcgaatcacgctgggaagaattttatcaaggaaaacaggcaaatctgta

SEQ ID NO: 216176 - DNA, 6206 bp, synthetic construct
  misc_feature 1..6206: note = Description of Artificial Sequence: Synthetic coding sequence
  source 1..6206: mol_type = other DNA
atggaatcaggtgaaagactgccgtcaagcgccgcatcctccaccactccaacgtctagctcaactccctccgtggctagcgtggtctcaaaaggcggtctgtctaccggagtggcttctctgagctctaccataaatccatgtgggcacttatttaggactgcaggagaccagccctttaacctcagtaccgtcagctccgcctttccaatggttagccatcctgtgttcggtctgcactccgctagctcaggccatagtgaatttggcggactgggtactctgggcacaccaacagccctggctgcacacccccagctagcttcattccctgaatggtggaggaccacagacgcacacacacgaactggagccacgttcttcccacccctgctgggcattcccccattattcgcacccccagcccaaaaccacgacagtagctcattccactctaggacctcaggtaagtctaatagaaacggtcccgagaagggtgtcaacgggtcaattaatggttcaaacacgagctctgttatcggtatcaatacctccgtactgtccaccactgcttcctcttctatgggccaaaccaagtcaacatcttcggggggaggaaatcgcaagtgtaaccaggagcaatccaaaaaccagccactggacgcacgggtagacaaaatcaaggataagaagcctcgcaagaaggcaatggagagctcatcaaattctgattctgacagcggcacttccagcgacacctcaagcgagggaattagctcctccgattctgatgacctggaggaagacgaagaggaagaggatcagtccatcgaggaatccgaggatgacgattcagacagtgaaagtgaggcccagcataaaagcaacaaccaggtcctacttcatggaatctcagatcccaaggctgatggacagaaggccaccgaaaaagcacaagaaaaacgaatccaccagcctctgccactagccagtgagtcacagacccattctttccagtctcagcagaagcagccccaggtgctctcacaacagctgccattcatcttccagtcaagccaggccaaggaggagtccgtcaataagcatacgtcggtgattcagtccacggggctggtgagtaatgtgaagcccctttcgttggtgaaccaggctaaaaaggaaacctatatgaaactcattgtgccctcccctgacgttctgaaagctggcaacaagaacactagcgaagagagttctttgctgacctcagagctgagatccaaacgggagcagtataaacaggccttcccatcgcagctcaaaaagcaggagtccagcaagtccctgaaaaaagtgatcgcagccctgagcaaccctaaggcaacttccagctcacctgcccaccccaagcagacactcgagaataatcatccaaatccgtttcttacaaacgccctattaggaaaccaccagcccaatggagtgatacagagcgttatccaggaggctccgttggccctgaccacgaaaaccaagatgcaaagtaagataaacgagaacattgctgctgcgtcctccaccccattttctagtcccgtcaacctcagcaccagcgggaggaggacccctgggaaccagacacccgtgatgcctagcgcttcccccatcctgcactctcagggcaaagagaaggccgtgtcaaataatgtaaaccccgtgaagacccagcatcattcccatcctgccaaatccctagtcgagcagttcaggggaaccgattccgacatcccttcctctaaggattcggaggactccaacgaagatgaagaggaggatgatgaggaggaagatgaggaggatgacgaggatgatgagtccgatgactcccagtccgggacgtcaaagaggcgacgggtcactgatgaaagagagttgcggatccccctcgagtatggctggcagagagagactcgaatcaggaactttggtgggagactgcaaggagaggttgcctactatgctccttgcgggaagaagctgcggcagtatcccgaggttatcaagtacttgagcagaaatggaattatggacatttcacgggataacttcagcttttcagccaagatacgcgttggggacttttatgaagctagagatggaccccagggcatgcagtggtgcctgcttaaggaagaagatgtgataccacgcatcagggccatggagggcaggagagggcgtccaccgaaccctgatcgccagcgagctcgtgaggagtcaaggatgcggcgtagaaagggcaggcctccgaacgtgggcaacgccgaattcctcgataacgctgacgctaagctgctgcggaagcttcaggcacaagagatcgcccgacaagccgctcaaattaagcttctgcgtaagctgcagaagcaggagcaggcccgagtagcaaaagaggcaaaaaagcagcaagctataatggccgctgaggaaaaaaggaaacagaaggaacagatcaagataatgaaacagcaggaaaagatcaagagaatccaacagatcaggatggagaaagaattgcgggcacagcagatactggaggccaagaagaagaaaaaggaagaggccgcaaacgccaagctactggaggcagagaaaagaatcaaagaaaaggagatgagacgacagcaagctgtcctgctgaaacaccaagaacgagagcgcagacgccagcatatgatgttgatgaaagcaatggaagctaggaagaaggcagaggagaaggagcgcctcaagcaggagaaacgagatgaaaaaaggctaaataaagaacgcaagctggaacagaggagactggagttggagatggccaaggaactgaaaaagccaaatgaggacatgtgtctagcagatcagaagcccctccccgagctgcctaggattccgggattagtcctgtccggcagcaccttctccgactgcctgatggtggtccagtttctgaggaacttcggtaaagtgctcggattcgatgtgaatattgatgtcccaaatctgtccgtactgcaggaaggacttctgaacattggggacagtatgggggaggttcaagacctattggtgcgactcttgagtgcagcggtctgtgaccctggattgattactgggtataaggctaaaacggctctgggcgaacatttgctaaacgttggagtgaatcgggacaatgtctcggagattctgcagatatttatggaggcacactgcggccagactgagttgacagaaagtctcaaaactaaagcctttcaggcacacacgccagcccaaaaggcctccgtgctggctttcttgattaatgagctcgcctgcagcaaaagcgtcgtcagcgagatcgataagaatattgattatatgtcaaacctccgtagggacaagtgggtcgttgagggcaaactgagaaaacttcgtattatacatgcaaaaaagactggtaagagggatacctctggcggtatcgacttgggtgaagaacagcaccccctgggaaccccaactcccggacgcaagagaaggcgcaagggcggagacagcgattacgatgatgacgacgacgatgacagtgatgatcagggggacgaggatgatgaggatgaagaggataaggaggataagaaaggcaagaaaaccgatatctgcgaggatgaggacgaaggcgatcaggccgcaagcgtcgaggagctggagaaacagattgagaagttgagcaagcagcaatctcagtataggagaaaactcttcgatgctagtcactcgctgaggagcgttatgtttgggcaggatagatatcgccgtagatattggattcttccacagtgtggcggtatcttcgtggaaggtatggagtccggggagggtctcgaggagatcgctaaggagcgcgagaagttgaaaaaagccgagtctgtgcagataaaggaagagatgttcgagaccagtggtgatagcctgaactgctcaaacacagaccactgcgagcagaaggaagatcttaaagagaaagataacaccaacctgtttcttcagaagcctggatcgttcagcaagctctctaaacttttggaggtagctaagatgcccccagagagtgaggtgatgactcctaaaccaaatgcgggtgctaatggctgcacattgagttatcagaactcaggaaagcattcactggggtcagttcaaagcactgctacccaatcgaacgtggagaaggctgattccaataacttgttcaatacggggtccagcggccctggtaagttctactcacctcttcctaacgaccagctgctcaagacattaactgaaaagaataggcagtggttttcacttctgcctcgcacaccatgtgacgacacatctctcacacacgctgatatgtccaccgcctcactggttacaccacaaagtcaacctccatcaaaatccccctctcccacccctgcaccccttggatcatccgcccagaacccagtgggcctgaacccattcgcgttatcccctcttcaggtgaaaggaggtgtatccatgatgggcctacagttctgtgggtggcccacaggcgtggttacttccaatattccgttcaccagctcagtgcctagcctgggctctggtctcggcctcagtgagggaaacggaaactctttccttacttccaacgtggccagctccaaaagcgaatctcctgtgccacagaacgagaaagccacttcagctcagccggcagctgttgaggtggcgaaacccgtggattttccttcccccaaacccattccagaggagatgcagttcggttggtggaggataattgatcctgaagatctgaaagccctgttaaaagtgctgcatttgagaggtatccgggagaaggccctgcagaagcagattcagaagcacttagactatatcacacaagcctgcctcaaaaataaggacgtcgctattattgagctgaacgagaacgaggaaaaccaggtgacaagagacattgttgagaattggtccgttgaagagcaggctatggagatggacctttctgtgcttcagcaggtggaagatctggagcgacgggtcgcatctgctagcctgcaggtaaaagggtggatgtgcccagaaccagctagcgaaagagaggatctcgtatatttcgagcacaagagcttcactaagctttgcaaggagcacgacggagagttcactggtgaagatgaatcatctgcccatgctctcgagcgcaaaagcgataatcctctggacatcgctgttacaagactcgccgacctggagcggaacattgagaggagaattgaggaggacatagcccctgggctcagggtttggaggagagctctcagcgaggcgagaagcgccgctcaggtggctctgtgtattcaacaactgcaaaagtctattgcatgggagaagagcatcatgaaagtgtattgtcaaatatgcagaaaaggggataacgaggaactcctcttgctatgcgacggatgtgataagggctgtcacacctattgccatagaccgaagatcactaccatcccagatggagattggttttgccctgcatgtatcgcgaaggcttccggccagaccctcaaaatcaaaaagctacatgttaaaggcaaaaaaacaaacgagtccaagaagggtaagaaagtcaccctgaccggtgatactgaagatgaagattctgcctccacttctagctccctgaaaaggggaaacaaggatctcaagaagaggaagatggaggagaatacgtctatcaacttgtccaaacaggaatcttttacctccgtgaaaaaaccaaaaagggacgattccaaagacctcgctctctgctctatgatactgaccgaaatggaaactcacgaggatgcctggccgtttctactgcctgtgaacctgaaattggtgccgggttacaaaaaagtaatcaaaaaaccgatggatttctctacaatccgcgaaaagctgtcatcagggcagtacccaaatctggaaacattcgcgctggatgtcaggctggttttcgataactgcgaaacattcaacgaagacgacagtgacatcggaagagccggacacaatatgcgcaagtactttgaaaaaaagtggacagacacttttaaagtatctta

SEQ ID NO: 216177 - DNA, 6404 bp, synthetic construct
  misc_feature 1..6404: note = Description of Artificial Sequence: Synthetic coding sequence
  source 1..6404: mol_type = other DNA
atggagtcgggagagcgcctgccttccagtgcagccagttcgaccactccgacatcttcctcaaccccctccgttgcgagcgttgtgtcaaagggaggtttatccaccggtgtcgcctccctgagtagcacaatcaacccttgtggccacctcttccggactgcaggggaccagccttttaacttgtctacggtatcatctgcattcccaatggtctctcaccctgtttttggtcttcattcggcaagtagcgggcactctgagttcggcggtctaggcactctagggactccaactgcactggccgcacacccccagctggccagcttccctggagctgaatggtggaggacgacagacgcacatacccgcaccggcgcaactttcttccctcccctgcttggcatccccccactgtttgcaccacctgcccagaatcacgacagctcttccttccactcccgcacatcaggaaaatccaatagaaatggcccagaaaagggcgtaaacggatccatcaacggatctaatactagttcagtgatcggaatcaatacatctgttctcagcacaactgcaagttcttcaatggggcaaacgaagtccacaagttctggtggcggaaatcgaaaatgtaatcaagagcagtctaagaaccagccactggacgcacgagtagacaaaatcaaggataagaagcctcgaaagaaggctatggagagctcgtccaatagcgatagtgactcaggtacaagtagcgatacgtccagcgagggaattagctctagtgattctgatgacctggaagaagatgaggaggaagaggatcagagcattgaagagagcgaggacgacgattccgacagtgaatcagaggcccagcacaagtctaataatcaggttttacttcatggcataagcgacccgaaggcagacggccagaaagcaacagagaaagctcaggagaaacgaattcaccagccgctgccgctggcgtctgagagccagactcattctttccagagccaacaaaagcagccacaggtcctgagccagcaactcccatttatttttcagagttctcaggctaaggaagaaagtgtgaacaaacatactagcgtgattcaatcaaccgggttggtttcgaacgtaaagcccttgtccctagtgaaccaagcaaaaaaagaaacatacatgaagctgatagttccatcccccgacgtgctaaaggccggtaacaagaatactagtgaagaaagctcattgctgacctcagagctgcgtagtaagagggaacagtacaagcaagcttttcctagccagctaaagaaacaggagagctccaagtccctcaaaaaagtaattgccgctctgtcaaatcctaaggcaactagctccagtcctgcgcaccctaagcagacactggaaaacaaccacccaaatccattcctgacaaacgctttgttggggaaccaccaacccaatggcgtgatacagtctgtgatccaagaggcccctctggcccttaccaccaagactaaaatgcagtcaaaaataaatgaaaacatcgcagcagcgtcaagcacgcctttttccagcccggttaacttgagcacctccggacggcgtacccccggaaatcaaaccccagtgatgccatctgcttccccaatcctccacagtcagggtaaggagaaggccgtctcaaataacgtaaatccagtcaaaacccaacatcactcacaccctgctaaatctcttgtcgaacagtttagaggcaccgattcagacattccctcatcaaaggactccgaagactcgaatgaagacgaggaagaagacgacgaagaagaagatgaggaagacgacgaggacgacgaatccgacgattctcaaagtgagtccgactcaaattcagaatccgacaccgagggctctgaagaggaggacgatgacgacaaagatcaggacgagagtgactccgacacagagggggagaagacttctatgaaactgaataagactacgagttctgtcaagagcccttctatgagtctgaccgggcatagcacccctaggaatctccatatcgccaaagccccaggctcagccccagcagccctgtgttcggaaagccagtctccggctttcctcgggacctcctcaagcacattaacgtcatcccctcatagcgggacaagcaagaggcggagagtgacagacgagagggagcttaggattccattggagtacggatggcagcgagaaacacgcatccggaacttcggaggcaggctgcaaggggaggttgcttattacgccccttgtggaaagaagctcaggcagtaccccgaggtgattaagggaatgcagtggtgtctgctgaaggaggaggacgtgatcccgagaattcgcgctatggagggtcggaggggcaggccaccaaatcctgataggcagagggcccgagaagaatcgcgcatgaggcgacgtaaaggcaggcctccaaatgtcggcaacgccgaatttctagataacgccgacgccaaactgctgcgaaagttacaggcccaggagattgcccgacaggccgcacagatcaagcttttgaggaaactccaaaaacaggaacaggcaagggttgccaaagaggccaagaaacagcaggccataatggctgccgaggaaaagagaaagcagaaggaacagatcaagatcatgaagcagcaggaaaaaattaaacggattcagcagatccggatggagaaagagctgcgggctcaacagatcttggaagcaaagaagaaaaagaaagaggaggccgctaacgccaagctgcttgaagccgaaaaaaggatcaaggaaaaggaaatgaggcggcaacaggcagtcctactgaagcatcaggagcgagaacgtaggcgccaacacatgatgttaatgaaggcaatggaagccagaaagaaggctgaagagaaagaacgcttgaaacaggagaaaagggacgagaagcggctcaacaaggaaagaaaactggagcaaagaaggctggaactggagatggctaaggaactcaagaagccgaacgaggacatgtgtcttgccgatcagaagcccctgcccgaactccccaggattcccggattagtgttgtccggctctacgtttagcgactgcttaatggttgtacagtttctgcgtaacttcggcaaggttttgggtttcgatgtaaacatagatgtgccaaatctctctgtgctgcaggaggggctgctgaacataggtgactctatgggagaggttcaagatttgttggtgaggctactgagcgcagctgtatgtgatccaggccttattacaggctataaggccaaaactgcattgggtgagcacttgctgaatgtgggcgtcaatcgggataacgtaagtgaaatcctgcagatcttcatggaggcacactgcggtcagacagagcttactgaaagtctgaagacaaaagccttccaggcacacacaccagcccagaaggcaagcgtgttagcatttctcattaatgagctggcctgcagcaagagtgtggtgtctgagatagataaaaacatcgactatatgagtaatctgcggagggataagtgggtggtcgagggaaagctccgaaaactcaggataattcacgccaagaagacgggcaagcgcgatacctcaggaggcatcgacctgggggaggagcagcatccattgggtacccccactcccggaagaaaaagacgtcgcaagggcggagattcggactatgatgatgacgatgatgatgactcggacgatcagggggatgaagacgacgaagacgaggaagataaggaggacaaaaaaggtaagaaaacagatatctgtgaggacgaggacgaaggcgaccaagccgcttcagtcgaagagctggagaagcaaatagagaaattgtcaaagcaacagagccagtataggagaaaactttttgacgcatctcactctctgagatcagtgatgtttggccaagaccgatacaggagacggtactggattctgccacaatgcggcggtatcttcgtcgaaggcatggaaagtggggagggccttgaagagatcgccaaagagagggagaagctgaagaaggcagagtccgtgcaaataaaggaagagatgttcgaaacctctggagattccctgaactgttctaacaccgatcactgtgagcagaaagaggatcttaaggagaaagataacactaacctgttcctgcagaagcccggaagcttttcaaagttgtcgaagctgctggaggttgccaaaatgcccccagaatccgaagtgatgacacccaaaccaaatgctggcgctaatgggtgcaccctgtcctaccaaaattctggaaaacatagtctgggctccgtgcagtctactgccactcaaagcaatgtggaaaaggccgattcaaacaatctttttaacactggaagcagtggtcccggtaagttctacagcccactgcctaatgatcagctgttgaagaccctcaccgaaaagaacaggcagtggttttccttgctgcctcgcaccccatgtgacgatacctccctgacacacgcggatatgagtactgcttccctggttactcctcagagccaacccccttctaagtctccaagccctaccccagctcctttaggatccagcgcccagaacccggtgggtctgaacccattcgctttgagccccttgcaggtcaaaggaggagtatctatgatggggctgcagttctgtggctggcccaccggggtggttacaagtaacattccatttacctcaagcgtgccctccttgggcagtggcctgggattgagcgaaggcaacggaaacagctttctgacttcaaacgtagcctcgtccaaatccgaatcgcccgtcccccaaaacgaaaaagcaacgagcgcccagccggctgccgtagaggtagctaaaccagtagacttcccctcccccaaacccatcccggaggagatgcagtttggctggtggcgaatcatcgacccggaggatctgaaagcccttcttaaggttctgcacctaagaggcataagggaaaaggccctgcagaaacagattcaaaaacacctggattacatcactcaggcatgcctgaaaaacaaggatgtcgccattattgaacttaacgagaatgaagagaaccaggtgacacgtgacatagtcgagaattggagcgtcgaagaacaggctatggaaatggacctcagtgttctgcagcaggtagaagaccttgaacgtcgtgtcgcttctgcctcactgcaagtgaaagggtggatgtgtccagagcccgcatccgagcgggaggatcttgtctattttgagcataagtccttcactaagttgtgcaaagagcacgatggagagttcacaggcgaagacgaatccagcgctcacgcactggagaggaaatcagataatcctcttgacatcgctgtgacgaggctggctgacctggagcgcaatatcgaaaggagaattgaagaagatattgccccaggcctgagggtgtggagacgggcactgtctgaggccagaagtgcagcacaagtggcactgtgcatccaacagctgcagaagagcatcgcctgggagaagtctattatgaaggtgtattgtcaaatctgtagaaagggcgataacgaggagctcctcctgttgtgtgacggctgcgacaaaggttgtcacacgtattgccaccgccctaaaattaccaccattcctgacggcgactggttctgccctgcttgcattgccaaagcatccgggcagaccctgaaaatcaagaaactgcacgtgaagggcaagaagaccaatgagtcaaagaaggggaagaaagtcacacttaccggagatactgaagatgaggacagtgcctccacaagttcctcccttaagcgtggaaataaagacctaaagaagcgaaaaatggaggagaatacctccattaatctctctaagcaggaaagtttcacttccgttaaaaagcccaagagagacgatagtaaggaccttgcattatgttcaatgattctcacggaaatggagactcatgaggacgcgtggccatttttgttgccggtaaacctcaaactggttccaggctataaaaaagtaattaagaagcccatggactttagtacaatacgcgagaagttaagttcaggtcaatatcctaacctggaaacttttgccctcgatgtgagactggtgtttgacaactgtgagacctttaacgaagacgactcggacatcggacgtgcaggccataacatgcggaaatactttgaaaaaaagtggaccgacacctttaaagtctccta

SEQ ID NO: 216178 - DNA, 6398 bp, synthetic construct
  misc_feature 1..6398: note = Description of Artificial Sequence: Synthetic coding sequence
  source 1..6398: mol_type = other DNA
atggaaagtggtgaaagacttccctcctctgcagcctccagtaccacccccacaagtagcagcacaccatcagttgcgtctgtggtgtccaaagggggattgtccactggggttgcatccctgagtagtacaattaacccttgcgggcatctttttcgcaccgccggagatcagccattcaacctgtcaaccgtatcttcagctttcccaatggtctctcacccagtttttgggctgcacagcgcctcctcgggtcacagtgaatttgggggactgggtacgctgggcacccccactgccctcgctgcccatccccagctggcttcctttcccgagtggtggcggactacagatgctcacaccaggaccggcgcaacttttttcccgccactgctcggcattcccccactgttcgcccctcctgcccagaatcatgattcttcctcctttcactctcgaaccagtggaaaatctaatcgcaatgggcctgaaaagggagtcaatggtagtatcaacggcagtaatacatctagtgttatcggaataaacacgtcagtgttgtctaccaccgcctcctctagcatggggcagaccaagtctacctcatcaggagggggaaatcggaaatgtaatcaggaacagtcaaaaaaccagcctcttgacgctagggtggataagattaaggacaaaaagcctaggaagaaggctatggagagctctagcaactcagactcagattccggcaccagttccgataccagcagcgaaggaatctcatcaagcgactccgacgatctagaggaggatgaggaagaggaggatcaaagcattgaggagtctgaagatgatgactccgactccgagagtgaggcgcaacataaaagtaataaccaagtgcttttgcacggcatctccgacccaaaggcggacgggcaaaaggccaccgagaaagcccaggagaaaaggatacatcagccccttcccctcgcctccgagtcccagacgcattcgtttcagagtcagcagaagcagcctcaggtgttgtcccaacagcttcctttcatctttcaaagtagtcaagccaaggaggaatcagtgaataaacataccagcgtgatacaaagcacaggcctcgtcagcaatgtaaaacccttgtcactggttaatcaggccaagaaggaaacctacatgaagcttattgtgccttcccccgatgttctgaaggcaggcaataagaatacctccgaggaatcctctttgctgacttcagagctgcgcagcaaaagggaacaatataagcaggccttcccctcacagctgaagaagcaggaaagctcaaagagtcttaagaaagtgattgctgcgctgtctaaccccaaggccacttcatcttcacctgcccacccaaagcaaaccctggagaataatcatcccaatccgtttttaaccaacgcccttctcggcaaccaccagccaaatggtgtaattcagtccgtgattcaggaggcccctctggccctgacgacgaagacaaagatgcagagcaaaatcaacgagaacattgctgcagcctcttcaacacccttcagctctcctgttaatctgtcgacatccggacggagaactccgggaaatcagacacctgttatgccatcggcttcccccatcttacatagtcagggaaaggaaaaggccgtttccaataacgttaacccagttaagacacagcaccattcgcaccccgcaaagtctctggttgagcagtttcggggtacagattcagacattccctcttcgaaagacagtgaggacagcaatgaggatgaggaagaagacgacgaagaagaagacgaagaagatgacgaggacgacgagagcgatgattcccagagcgagtccgactctaactcagagtccgacacagaggggagtgaagaagaagacgacgatgacaaagatcaggatgagtcagacagcgatactgagggcgaaaaaacctcaatgaaactaaataagactacctcttcagtgaagtccccttcaatgtcactgaccggccacagcacacccagaaatttgcacatcgccaaggcaccaggctccgctccagcggctctctgcagcgagagtcaaagtccagcatttctagggacatcttcttcaactcttacatcttcaccacactccggcacctctaagcgccgtcgcgtgactgatgaacgcgagttacggattcccttggagtatggttggcaaagggaaacaaggatacgtaatttcggcggacgactgcagggagaggtggcctactacgccccatgcggtaagaaactgagacagtatccagaagttataaagggtatgcagtggtgcctcctgaaggaggaggacgtcatacccaggattagagctatggagggtagacggggaaggcccccaaaccccgataggcagagagcaagggaagagtcccggatgcgcaggagaaagggcaggccccctaatgtggggaacgccgaattcctggataacgctgacgcaaaactactccgaaaactacaggcgcaggagattgctcggcaggcagcccaaattaagctcttgcgaaaattacaaaagcaggagcaggctagggttgcaaaggaggcaaaaaagcagcaggccattatggctgccgaagagaagcggaagcaaaaggagcagatcaaaataatgaagcagcaagagaagattaaacgcatacagcagatccgtatggagaaagagctgcgcgctcagcagattttagaagcaaaaaagaagaagaaggaggaagcagcgaatgccaaactgcttgaagcagaaaaacggatcaaggaaaaggagatgcgcaggcagcaggccgtcctgctgaagcaccaggagcgcgaacgccgtcgccagcatatgatgttaatgaaggctatggaagcgcgtaaaaaggcggaagagaaagaacgcctgaaacaggagaaacgggatgaaaagcgtttaaacaaggagcggaaacttgagcaacggagactggagctggaaatggccaaagagctgaaaaagccgaatgaagatatgtgtctcgccgatcagaagccgctccccgaactaccgaggattccaggcctggtgctttctgggtcaactttctccgattgcctgatggtggttcagttcctgaggaactttggaaaggtcctgggctttgatgtcaacatcgatgtgcccaaccttagtgttctgcaggaaggtctcctgaatatcggagattctatgggcgaggtgcaagacctcctggtccgcttactgtcagctgcggtgtgcgatcccggattgatcaccggatacaaggccaaaaccgcactgggcgaacacctgcttaacgttggggtgaatcgagataatgtcagtgagatccttcagatcttcatggaagcccattgtggccagactgaactgaccgaaagcctgaaaacaaaggcctttcaggcacacacccccgctcagaaggctagcgttctggcctttcttatcaatgagctagcgtgcagtaaatccgtcgtctccgagatcgataagaacattgactacatgagcaacttgagacgggataaatgggtcgtggagggcaaactgcgtaaactgagaattatccacgctaagaagacaggaaaaagggatacctctgggggtattgatcttggggaagagcagcacccacttgggacaccaacacccggacgcaagaggcgcaggaagggcggtgactcagactacgatgatgacgacgatgacgatagcgatgaccagggagacgaagacgatgaagacgaggaagataaggaagataagaaaggtaagaaaactgatatttgtgaagacgaagatgagggtgatcaggccgctagtgttgaggagttagaaaagcagatcgaaaagctgagcaagcagcaaagtcagtacaggcgtaagctgttcgatgctagccattccctgaggagcgtcatgttcggtcaagacagatatagaaggcgatactggatcctgccacagtgtggcggaatttttgttgagggaatggaatccggagagggactcgaagagatcgcaaaagagcgcgaaaagttgaaaaaagccgagagtgtgcaaatcaaggaagaaatgttcgagacctcaggtgatagtctgaactgctcaaacactgaccactgtgaacagaaagaagatctgaaagaaaaagacaacacaaacctttttcttcagaagcctgggtccttctcaaagctctctaaactgctcgaggtggctaaaatgccaccagagagtgaagtgatgaccccaaagccaaacgctggagccaatggatgcaccctgtcctaccagaattctggaaagcactccctcggctctgtgcagtcgacagccactcagtcaaacgttgagaaggcagattccaataacctctttaacaccggctctagcggcccagggaaattctactcacccttaccaaacgatcagctgcttaagacccttacagagaagaaccggcagtggttcagcctgttgcccagaacaccatgcgatgataccagtctgactcacgcggatatgagtacagcgagcctggtgacacctcagtcccagccaccatcaaaaagcccctcgccgaccccagcccctctggggtccagcgcccagaatccagtgggtcttaaccccttcgccctctctcccctccaggtgaagggaggtgttagcatgatgggattacaattttgcgggtggcctacaggggttgtcacttcaaatatcccatttacctcaagtgttccgagcctgggttcaggcttgggtctcagtgagggaaacggtaattctttcctgacctcaaatgtggcaagctccaagtctgaatccccagtgccccaaaacgaaaaggccacatccgcacagcccgctgccgttgaggtggccaagccagtcgatttcccaagccctaaaccaattccagaggagatgcagtttggatggtggcgaattatcgacccagaggacctgaaggccctgctgaaagtcctacacctgcgcggtatccgagagaaggccctgcagaaacaaattcagaaacacctggactatatcactcaggcctgccttaagaacaaagatgtagcgataatcgaattgaatgaaaacgaagaaaatcaagtgactagggacattgtggagaactggtctgtggaggaacaggcaatggagatggacctttctgttctccaacaggtggaagatcttgagcgtcgggtggctagcgccagcctccaagtgaaggggtggatgtgccctgagcctgcttcagaacgcgaggatctggtgtatttcgagcacaaatcttttacgaaactgtgcaaagaacatgacggagaatttactggggaggacgagagttccgctcacgccctcgagaggaaatccgataacccactggacatagctgtgaccagactcgcagatctggagcggaacatcgaaaggagaatagaggaggatatcgctcccggactgcgggtttggagaagagcattgagtgaggcacgttctgcagctcaggttgctctgtgcattcagcagctgcagaagtccatcgcgtgggaaaagagcatcatgaaagtctactgccagatctgtagaaaaggcgataacgaagagctgctcctgttgtgtgacggttgtgataaggggtgccacacctactgccatcgacctaagatcacgacgatccctgatggcgactggttttgccctgcctgtatcgctaaagccagcggccagacactcaagataaagaagctgcacgtcaaaggcaagaaaacaaacgaatctaaaaagggaaaaaaagtgacactgactggcgataccgaagacgaggacagtgcaagtacctccagctcgctcaaacgcggaaataaagatctcaagaagcgtaaaatggaggaaaatacctcgatcaatctcagtaagcaagaatcatttacctctgtaaagaaacccaagcgcgacgatagcaaggatctggccctgtgttccatgatcctaactgagatggagacacacgaggacgcttggccatttcttctgcctgtaaaccttaagttagttccagggtataagaaggtgattaaaaaacccatggattttagtactattcgcgagaagctgtcatccggtcagtaccccaatctcgagacattcgcactagatgtgcggttggttttcgataattgcgaaactttcaatgaggatgatagtgatatcggtagagccggtcataatatgagaaaatactttgagaaaaaatggaccgacactttcaaggtgtccta

SEQ ID NO: 216179 - DNA, 6506 bp, synthetic construct
  misc_feature 1..6506: note = Description of Artificial Sequence: Synthetic coding sequence
  source 1..6506: mol_type = other DNA
atggagtcaggcgaacgcctgccatcgtccgccgcttccagcacgactccaacgtcttcttcaaccccaagtgtagcgagcgttgttagcaaaggcggtctaagcacgggggtggcctcactgtcctcaaccatcaatccttgtggccacctattcaggacagccggagatcaaccctttaatttgagcaccgtctcgtcggcatttcccatggtgagccaccccgtctttggtctgcattccgccagctccggtcactccgaatttggcggtctcggcaccctaggcacccccaccgccctcgctgcccacccacagttggcctcgttccccggagccgaatggtggcgaaccacagacgctcatacaagaaccggggctactttctttccccctctgctgggcattccccctctgttcgcaccccctgctcagaaccacgattccagctcctttcatagccgaacgtccgggaagagcaaccggaatggcccagaaaaaggcgtcaacggatccattaatgggtccaacacctccagcgtgatcgggattaacactagtgtgctctctactaccgcctcatcttcaatggggcagacaaagagtacctcgagcgggggtggaaaccggaagtgcaaccaggaacagagcaaaaaccagcccttagatgccagggttgataagataaaagacaaaaaaccgagaaagaaggccatggaaagcagcagcaactcagattcagattcagggacatccagtgatacttctagtgagggcatatccagtagcgactcagacgatttagaagaggacgaggaggaagaagaccagtcgatcgaagagtcagaggacgacgattcagatagtgagtctgaagcccagcataagagtaataatcaggtcctgttgcacggaattagcgacccgaaggccgatgggcagaaggccactgagaaggcacaggaaaagcgtatccatcagcctctgccgttagcatccgagtcacagactcacagcttccaatcacagcagaagcagcctcaggtcctgtcccagcagctgccatttatcttccagagcagccaagcaaaggaagagtccgttaataagcacactagcgtcatacagtcaacgggtctagttagtaacgtcaagcctctgtctcttgtgaatcaggcaaaaaaggaaacttacatgaagttaattgtcccatctcctgatgtgctcaaagcaggcaacaagaacacctccgaagagagctccctactgacttcagagctccgaagcaaaagagaacagtacaagcaggcttttccaagccagctcaagaagcaggaaagttcaaaatctctcaagaaagtcatcgcagcgctgagtaatccgaaggcaacctcctctagtccggctcaccctaagcagactctcgagaacaaccatccaaaccctttcttgacaaatgcccttctaggcaaccatcagcccaatggggttatacaaagcgttatccaggaggctcccttagccctcactactaaaacgaaaatgcagagcaagatcaacgagaacatcgcagccgcttcgtcgactcccttttccagcccagtcaacctgagcacgagcgggaggaggaccccaggtaaccagacgcctgtgatgccctcagcatctcccattctgcacagccaggggaaggagaaggctgtgtcaaataatgtgaatcccgtgaagacgcagcatcacagtcacccagcgaagagcttggtagagcagtttcgtgggaccgactcagacattcctagctcaaaagactcagaggactccaacgaggatgaagaagaggatgacgaggaagaggatgaggaagatgacgaagatgatgagtcagacgattcccaatcagagtccgactctaattctgaaagcgataccgaggggtctgaggaagaagacgatgatgataaggaccaagacgaatcggactctgataccgaaggcgagaaaacatctatgaaactgaataaaactacatcctccgtcaagtcgccatccatgtctctgacaggtcactccactccaagaaacttgcatattgccaaagctcctggctctgccccagcagcgttgtgctcagagagtcagtctccagccttcctcggaaccagctcgtccacgctaacgtcatccccgcattcaggcacctctaaaaggaggagagtgaccgatgagagagagctgcgtatccctctcgaatatggctggcagcgcgaaactaggatccgtaactttgggggacggttacaaggcgaggtggcgtactacgcgccttgcggcaaaaaactacggcagtaccccgaggtaatcaagtatttatcccgaaacgggatcatggatatctcacgggacaatttctcgtttagtgccaaaatcagagtgggagacttctacgaggccagggatgggcctcaggggatgcagtggtgcctcctgaaagaggaggatgtgatccccaggatccgcgctatggagggacgacgaggtaggccccctaatccggacagacaacgagcgcgtgaagaaagccgtatgcgcaggagaaagggaagacctcccaacgttggcaatgcagagtttctggataacgccgatgctaaactcctccgaaagctccaggcccaggagatcgctcggcaggcagctcagatcaaactcctccgcaagctccagaagcaggagcaggcacgagtagctaaggaggccaaaaaacagcaggccataatggccgcagaagagaaacggaagcaaaaggaacagatcaaaattatgaagcagcaggaaaagataaagaggatccagcagatccgtatggagaaggagctgcgggctcagcaaattcttgaagccaaaaaaaagaaaaaggaagaggccgcaaacgcaaaactccttgaagcagagaagcggattaaagaaaaggaaatgcgtcgccaacaggcggtgctcctcaagcaccaggaacgtgaaagaaggaggcaacatatgatgttgatgaaagcaatggaagcaaggaaaaaagcggaggaaaaggaacgactgaagcaggagaagagggatgagaagagactcaacaaggagcgaaaactcgagcagcggcgtctggagttagagatggcaaaagagctgaagaaacccaatgaagatatgtgtctcgctgatcaaaagcctctgcctgagctcccaaggatcccaggcttggtcctgagcggatccaccttctcggattgtcttatggtggttcagttccttcgtaacttcggcaaagtcttaggatttgacgtgaacatagacgtacccaacctctccgttttgcaggaggggctcctgaacattggtgattcgatgggtgaagtccaggatctgctggtccgactgctgagcgctgctgtctgtgatccgggactgattactggatataaagcaaaaactgctctgggggagcatttgctgaatgttggagtaaatcgtgacaacgtgtccgagattcttcagattttcatggaagctcattgtggtcaaacggagctcactgagtccctgaagacgaaggcctttcaggcgcacacaccagctcaaaaggcctcagtgcttgcttttttgatcaacgagctggcttgttctaaatctgtagtttctgagattgataaaaatattgactacatgtcaaacctacgcagagataaatgggtggtagaaggcaagctgcgaaaattaaggataattcacgcgaagaaaactggaaaaagggatacctcaggaggaattgatctgggtgaagagcagcaccccttgggaaccccaacccctggtagaaagcggaggcgaaagggaggagactcagattacgacgacgatgacgatgatgacagcgatgaccaaggcgacgaggacgacgaagacgaagaggacaaagaagataagaaaggtaaaaagacggacatatgtgaggatgaggacgaaggggatcaagccgcatctgttgaggaactggagaagcagatcgagaaactgtccaagcagcagtcacagtatcgcaggaaactattcgacgcaagccactcactccgttcagttatgtttggacaggatcggtacaggaggcggtattggattcttccccagtgtggcggtatcttcgttgaaggcatggagagcggtgagggactggaagaaatagctaaggagagggagaaactcaaaaaagctgaatctgttcagattaaagaagagatgttcgagacgagcggtgatagcttaaattgcagcaacacagatcattgtgagcagaaagaagatctgaaagagaaggataacaccaacctgttcttgcaaaagccgggatcattttctaaattgagcaaacttttggaagtggcaaagatgccccctgaatccgaagtcatgaccccgaagcctaacgctggcgctaacggctgcacacttagttaccaaaactctggcaaacatagcttgggctccgtgcagtcgacagccacccagagcaatgtagagaaggccgactcaaataacctgttcaacactggatcatctggtcccggaaagttctattcccccttgcctaacgaccagttgttaaaaacccttactgaaaagaatcgccaatggttttcgcttctgccaagaactccatgcgatgatacaagcctaacgcatgccgacatgtcgaccgctagcctggtcacaccccagtcacaacctccgtccaagtccccctctcccacccctgccccactaggtagcagcgcccagaacccagtggggctgaatcctttcgccttgagcccactgcaggtgaagggtggcgtttctatgatgggtctgcagttctgcggctggccgactggtgtggtcacaagcaatatccctttcacttcttctgtcccctctctagggtcaggcttagggctctctgaaggaaatggcaacagttttctcacctcaaatgttgcaagttccaagtccgagagtccagtgccgcagaatgagaaggcaacaagcgcacagcccgcagccgtggaagttgctaaaccagtagatttcccatcgcccaagcctatcccggaagaaatgcagttcggatggtggaggatcattgatcccgaagatctaaaggctctgttgaaggtgctgcacctgcgcggaatcagagaaaaggctctgcaaaaacaaattcagaaacacctcgattacatcacgcaggcttgcctaaaaaacaaggacgtcgctattatcgaattgaatgaaaacgaagagaaccaagttacccgggacattgtggagaattggagcgtggaggagcaggccatggaaatggatttgtccgtcctacagcaggttgaagacttggagaggagggttgcctctgcgtctctgcaggtgaaaggatggatgtgccccgaacccgcaagcgaacgggaagacttggtatactttgaacacaaaagctttactaaactttgcaaagaacatgacggggaattcactggagaggacgaatctagtgcacacgcactcgaaagaaaatctgacaatccgttggatattgcagtaactcgcctggctgatctggaacggaacatcgaaaggcgcattgaagaagatatcgcccctggtctgcgggtctggcgtcgggcactatccgaggcaagaagtgctgcacaagttgccctgtgtattcagcagctgcaaaaatctatcgcctgggagaagagcataatgaaagtgtattgtcaaatttgcagaaaaggtgacaatgaggagctgctcctgctgtgcgacggttgcgataaaggttgtcacacctattgtcatcggcctaaaatcaccacgattcccgatggggattggttctgtcccgcttgtatcgctaaagcaagcggccagaccctgaagatcaagaagctgcatgtgaaagggaagaagacaaatgaaagcaaaaaaggaaagaaggttacactgaccggggacaccgaggacgaagactctgcaagtacatctagttcactcaaaagagggaataaggacctcaagaagaggaaaatggaggagaataccagtattaacctgtccaagcaagaaagttttacttctgtcaaaaaaccgaagcgagacgattccaaagacttagccctctgttccatgatcctcacagaaatggagacacacgaagacgcgtggccgtttctgctgccagtgaacctcaagctagtgcctgggtacaagaaggtgatcaaaaagcctatggatttctcgacgattcgcgagaagctttctagcggtcagtacccaaacttggagacgtttgcattagatgtgcggctcgtctttgacaactgcgagacatttaatgaagacgatagcgatataggacgagcgggacataacatgagaaagtacttcgaaaagaagtggacagacaccttcaaggtgtccta

SEQ ID NO: 216180 - DNA, 432 bp, synthetic construct
  misc_feature 1..432: note = Description of Artificial Sequence: Synthetic coding sequence
  source 1..432: mol_type = other DNA
atggaatctggtgaaagactaccaagttccgccgctagcagtaccacaccaactagttcttctactcccagcgttgccagcgtcgtcagtaagggtggactctcgacaggggtggcctcactctcttcgactattaacccttgcggacacctgtttcgtacggcaggagatcagccttttaacctgtctaccgtctctagcgctttccccatggtttcacatcccgtgtttgggcttcattccgcctcctcaggccactctgagtttggtggtcttggcacactggggacacccacagcccttgccgcacacccccaactggcttccttccctggtgcagagtggtggcgcactaccgatgcccatacacggacgggggctacatttttccccccactcctcggcattcccccacttttcgcacccccttag

SEQ ID NO: 216181 - DNA, 1563 bp, synthetic construct
  misc_feature 1..1563: note = Description of Artificial Sequence: Synthetic coding sequence
  source 1..1563: mol_type = other DNA
atggaaagcggcgagagactcccatccagcgccgcatcctcaacaacccccactagctcctccacgcccagcgtggcaagtgtggtgtcaaagggcggactctctacgggcgtcgcgagcttgtcctccaccatcaatccttgcggcgcagaatggtggcgaacaactgatgcccatactaggaccggtgccactttctttcccccattgttaggcattccaccactcttcgccccaccagcacagaaccatgatagcagctcgtttcacagtaggacctccggaaaaagcaatcgtaacggaccggagaagggagtgaacggctctataaacggaagcaacacctcatcggtgatcggcattaacacgagtgtcttatcaaccacagctagttcttctatgggtcagaccaagtcaaccagcagtggaggcggaaacaggaaatgtaaccaggaacagagcaaaaatcagccgcttgatgcacgcgtggacaagatcaaggataaaaagccgcgtaagaaggctatggaaagctcctcaaattcagactccgactctggcacatcatcagatacatcctctgaaggaatatcctcatctgacagcgacgacctggaagaggatgaggaagaagaggaccagtctattgaagagtcagaagatgatgatagcgattccgaaagtgaagcccagcacaaatccaacaaccaggttctgctgcatgggatctcagatccaaaggccgacggacaaaaggcaacagagaaggcccaggagaagcggattcaccagccactgcccctcgcctcagaatcccagacacacagcttccagtctcaacaaaagcagccccaggtgctgtcccagcagctgccatttatcttccagtcttctcaagctaaggaagagagtgtcaataagcacacttcagttattcagagcacaggcctggtgtcgaatgtgaagccccttagtctggtcaatcaggctaaaaaggagacatatatgaaactaatcgtgccctctcctgacgtgctgaaggccggaaataagaatacctccgaagaaagctccttactgacatcagagttgcgaagtaaacgcgagcaatacaagcaggccttcccgagtcagctgaaaaaacaggaaagtagtaagtctttgaagaaagttatagctgctctctcgaatcccaaagcaacttcctccagtcctgcacatcccaagcaaaccctcgaaaacaaccacccgaacccctttttaacaaacgctttgttgggaaaccatcagccaaacggggtgattcaatctgtcattcaggaagctcccctcgccctgactacaaagacaaagatgcaaagcaagattaacgaaaatatcgctgcagcctcatccaccccctttagctctcctgttaacctctccacgtctgggaggcgaactcccggaaaccagacgcctgtcatgccctcagcgagcccaattttgcattctcagggcaaagaaaaggccgtttcaaataacgtcaacccccgtaaaatgatgaaaaagaaaatgcgctag

SEQ ID NO: 216182 - DNA, 3645 bp, synthetic construct
  misc_feature 1..3645: note = Description of Artificial Sequence: Synthetic coding sequence
  source 1..3645: mol_type = other DNA
atgggcgtggacttcgacgtgaagacattctgtcacaatttacgcgctacaaaacctccttatgagtgtcccgtcgaaacatgcaggaaagtgtacaagagttattctggtatagaatatcacctttaccattatgaccacgacaacccaccgcctccccagcagacccctctgagaaagcacaaaaagaaaggccgacaaagtcggccagccaacaaacaatctcctagtccgtctgaggtatcgcagtcccctggcagagaggtgatgagctacgctcaggcacagcgtatggtggaagtggatctgcacggcagagtgcacaggatctccatatttgacaacctcgacgtcgtgtcggaggatgaggaggcccctgaggaagcccctgagaacgggtccaacaaggagaacaccgaaactcctgcggcaacgccaaagagcggcaaacacaagaacaaagaaaaaaggaaggattccaaccaccatcaccaccataacgtatctgccagcacaaccccaaagttgccggaagtggtctaccgggaactggagcaggatacccccgatgctcctcccagacccaccagttactatcgatacattgaaaagtcggctgaggagttagatgaagaggtcgaatacgacatggatgaggaagactacatctggttggacattatgaatgagcgtaggaaaactgaaggtgtaagcccaattccacaggaaatcttcgagtatcttatggatcgcttagagaaagaatcttacttcgagagccataacaagggggatcctaatgcactggtggacgaagacgccgtctgttgtatttgtaatgatggagagtgccagaatagcaacgtgatcctcttctgtgacatgtgcaacctggctgtccaccaggaatgctacggggttccatatattccagagggtcagtggctgtgtagacggtgtcttcaatccccttctcgggctgtcgattgcgctttatgtccaaacaagggcggagctttcaaacagaccgacgacggccgttgggcacacgtcgtctgtgccctctggattccagaggtgtgcttcgccaacactgttttcctggagccaatcgatagcattgagcacatccctcccgctcggtggaagcttacttgttatatctgcaaacagaggggttccggcgcatgcattcaatgtcataaggctaactgttatactgcatttcatgttacctgcgctcagcaggcagggctctacatgaaaatggagcccgtccgtgagaccggagccaatgggacctctttcagtgtgcggaagaccgcatattgcgacatccatactccacccggtagtgcgcgtagactgcccgcactgagtcacagcgagggggaagaggacgaggacgaagaagaggatgaaggaaaaggctggtcatctgaaaaggtgaaaaaggctaaagccaagtccagaattaagatgaagaaggcacgcaagattctggccgagaagagggctgccgcaccggtggtctccgtgccttgtattccccctcaccgactgagcaagatcaccaaccggctgacgattcaacggaaatcacagtttatgcaacgcttgcactcttattggaccttaaaacgccagtctcggaatggcgtgccactgctgcgacgattgcagacacatctccagagtcagcgaaattgcgatcaggtcggcagggatagcgaggataaaaactgggctctcaaggagcagctgaagtcttggcagcggctgcgtcacgacctggagcgagctaggttgctggtcgagctgattcggaaacgcgaaaaactaaagagggagacaatcaaagtacaacagatcgcaatggaaatgcagctgaccccttttctcattctgttaaggaagacacttgagcagctgcaggagaaggatactgggaacatcttttctgagcctgtgccactcagcgaggtgccggattatttggatcacattaagaaaccaatggatttcttcacgatgaaacaaaacctcgaggcctaccgctacctgaattttgacgacttcgaggaggacttcaatctcatcgtgagcaactgcctgaagtacaatgctaaggataccatcttctatcgggctgcagtgcgtctccgcgagcagggcggagccgtgcttcggcaggcccgaagacaggctgaaaagatgggaatcgactttgagaccgggatgcacattcctcactctcttgctggggacgaagccactcatcatactgaggatgccgctgaggaggagcgattagttttgttggaaaatcagaagcacctccctgtggaggagcaactgaagctgcttcttgaacggctcgacgaggtgaacgcctccaagcagagtgtgggcaggagcaggcgagctaagatgatcaaaaaggagatgaccgcgctgcggagaaagctggctcatcagcgagagaccgggagggatggcccagagcggcacggtccttcgagtcgtggaagtctgaccccccatccggcagcctgtgataaggatgggcagactgactctgccgctgaagaatcaagcagtcaggaaaccagcaaggggctcggtcccaacatgtcaagtacccccgcacatgaagtcggcagaaggacttcagtcctcttttccaagaaaaatccaaaaactgcgggacccccaaagcgccctggcagaccccctaagaatcgtgagtcacaaatgactccctcccacggaggaagtcctgttggacctccccagctcccaatcatgtcctccctgcggcagcgcaaaaggggccgtagccctagaccctcatccagtagcgattctgatagcgataagagcacagaagatcccccaatggacttaccagctaatgggttttcaggagggaaccaaccagtgaagaaaagctttctggtatataggaacgattgctcactgcctcgttcttcctctgactccgaatcgagcagctcgtcttcaagttccgccgctagtgatcggacatctactactccatcaaagcagggacgaggaaaaccctctttctctaggggtaccttccccgaagacagctccgaggatacgtccggcactgaaaacgaagcatacagcgttgggactgggagaggtgttggccactccatggtgcggaagagcttaggtcgtggcgctgggtggctgtccgaggacgaggattcccccctggatgcccttgacttggtctgggctaaatgtcggggatacccgagttaccccgcacttattatcgatccaaagatgccacgagaaggcatgttccaccatggtgttcccatccctgtgccccctctggaggtgctaaaactaggagaacagatgacacaagaagctagggaacacctgtatcttgtgctattttttgataataagagaacgtggcagtggctcccacggacaaagctggtcccactgggagtgaaccaggacctggacaaggagaagatgcttgaggggagaaagagcaacataaggaagagcgtgcagatagcctatcacagggcactgcagcatagatcaaaagtgcagggggaacaatccagcgagaccagcgactccgactag

SEQ ID NO: 216183 - DNA, 3663 bp, synthetic construct
  misc_feature 1..3663: note = Description of Artificial Sequence: Synthetic coding sequence
  source 1..3663: mol_type = other DNA
atgggagtggattttgatgttaaaaccttttgccacaatctgagggccaccaagccaccctatgaatgccccgtggaaacctgccgtaaagtctacaaaagctattcgggaattgagtatcacctttaccactacgaccacgacaaccctcctcccccacagcagacccccctccggaagcacaagaagaagggacggcagtctaggcctgccaacaagcagagtccctccccaagtgaggtttctcaatcacccggacgggaagtaatgagctacgcccaggcccagcgcatggtcgaagtggaccttcatggtcgggtgcaccggatctccatttttgataacctcgatgtggtttctgaggacgaagaggctcctgaggaagccccagagaatgggagcaataaagagaatacagagactcccgcagcaactcctaagtcaggtaagcataaaaacaaggagaaaaggaaagattcaaaccatcatcaccaccataatgtgtcggccagcaccactcctaagctacctgaggtcgtatatcgcgagctggagcaggacactcccgatgctccccctagaccaacgtcgtactatagatacattgaaaaatccgcagaggaattggacgaggaagttgagtatgatatggacgaagaagattatatttggctagatattatgaatgaacgtcggaagacagaaggagttagtcccatccctcaagagatctttgagtatttgatggatagactggagaaagaatcttacttcgaaagtcataacaaaggcgacccgaacgccctggtcgacgaagatgctgtttgttgtatctgcaacgacggtgagtgccagaacagcaatgtaatactgttttgcgacatgtgcaacctcgcagtgcaccaggagtgttacggcgtcccctacattcctgaggggcaatggctatgtcgtagatgcctgcaatcaccctctagggccgtggactgtgccctgtgccctaacaagggaggggcattcaaacagacagacgatggcagatgggctcatgtcgtgtgcgctctttggataccagaggtctgcttcgcgaacacagtttttctggaaccgattgattcaattgagcatattcctcccgctaggtggaagttgacatgctacatctgcaagcagcgcggatcaggggcatgtatccagtgccacaaggctaattgctacacagcctttcacgtcacctgtgcacagcaagcagggctctacatgaagatggagcccgtaagggagactggcgcaaatggaacgagttttagcgtgcgcaaaacagcctattgtgacatccacactccccctggaagcgctaggagactacctgcgctgtctcactccgagggggaggaggatgaggatgaagaggaagacgaaggaaagggctggagcagtgagaaagtcaagaaagccaaagcaaaatcccggattaaaatgaaaaaggccagaaagattctcgcagaaaaacgcgcagccgctcctgtggtgtccgtgccctgtattccacctcaccggttaagtaagataaccaatcgcttaactatacagcgtaagtcgcagttcatgcagcgactgcatagctactggacattgaaacggcagtctcggaatggggtgcctctgctccgccgattacaaacgcatttgcagagtcagcgcaactgtgatcaggtgggtagggactccgaggataagaattgggcactcaaagaacaactcaaatcttggcagaggctccgccacgatctggaacgggctcgcctattggttgaattgattagaaagcgggagaagctaaagcgggagaccataaaggtccagcagattgcaatggaaatgcagcttacaccctttttgattcttttgagaaagacacttgaacagttgcaagagaaggacacaggaaatatttttagtgagcccgtgcctttatccgaagtgaccgagttagatgaggtgccagattatctggaccacatcaagaaaccaatggacttttttaccatgaagcagaacttggaggcctacaggtaccttaacttcgacgacttcgaggaagatttcaatctcatcgtatccaactgcctgaagtacaatgcaaaggacacaattttttacagagccgcagtgagactgagagaacagggaggtgccgttctccgccaagcacgacgccaggctgagaagatgggtatcgatttcgagacaggaatgcacattccccactccctcgccggtgacgaggccacgcaccacactgaggatgccgcagaggaggaaagactggtacttttggagaatcagaaacacctccccgtggaggaacaactgaaactcctgctggaaagactagacgaagtaaatgcgagcaagcagagcgtcggcaggtctaggcgcgcaaaaatgattaagaaggagatgaccgccttacgccgaaaattggcgcatcaacgcgagacagggagagatggcccagaaagacatggccctagcagcaggggtagcttgacgccgcatcccgcagcctgcgacaaagatgggcagactgactcggccgcagaagaaagttcatcccaggagacttcaaaggggctcgggccaaacatgtcatccacacccgcacacgaagtgggcaggcgcaccagcgtcctgttctcaaagaagaatcccaaaacagctggcccacccaaaagaccgggaaggcccccaaagaacagagaatctcagatgaccccatcacacgggggatcccccgtgggcccaccacagcttcctatcatgagcagcctgcgacagcggaagcgcggacggtcacccagacccagcagttccagcgatagcgacagtgataaaagcacagaggatccacccatggatctgcccgctaacggcttcagtggcggaaaccagcccgtaaaaaagagcttcctcgtctacaggaacgactgctccctgcccaggtcttcatcagattctgaatccagttcctcctccagctcatctgcagcctccgataggacaagcacgactccttcgaagcagggcagaggcaaaccttcctttagccggggaaccttccccgaagactcatccgaggatacctctggtactgagaatgaggcctacagtgtgggcacagggaggggtgtgggacactccatggttcggaagagtctggggcgtggagcagggtggttgtcagaagacgaagacagccctctggacgcactggacctggtttgggcaaaatgcagagggtatccttcatatcccgcactgataattgatccgaagatgcccagagaagggatgtttcatcatggggtcccaattccagttccgcctcttgaggtgttaaaacttggcgagcagatgacacaagaggctcgagaacacctgtacctcgtcctgttctttgataataaacgaacttggcagtggctgcctaggactaagcttgtgccactaggagtgaaccaggatcttgataaagagaaaatgttggagggccgaaagagtaacattagaaagagcgtgcaaatagcctatcaccgggctcttcagcaccggagcaaggtgcagggggagcagtccagcgagacttcagattccgattag

SEQ ID NO: 216184 - DNA, 303 bp, synthetic construct
  misc_feature 1..303: note = Description of Artificial Sequence: Synthetic coding sequence
  source 1..303: mol_type = other DNA
atgggcgtggattttgacgtgaaaacgttttgccataatctgagagctaccaagcccccttacgagtgccctgtagagacctgtcggaaggtctacaagtcctactctggaatcgaataccacctttaccattacgatcacgataatccaccacctcctcagcagacccccctcagaaaacataaaaaaaaaggacgacaatcgagacccgctaacaagcagtcaccttctcctagtgaggtgtcccagtctccaggcagggaagtgatgagctacgcccaagcacagcggatggtagagtag

SEQ ID NO: 216185 - DNA, 318 bp, synthetic construct
  misc_feature 1..318: note = Description of Artificial Sequence: Synthetic coding sequence
  source 1..318: mol_type = other DNA
atgggagtcgatttcgatgtcaagaccttttgtcataacctccgggcaactaagcccccttacgaatgccccgtggagacatgcagaaaagtgtataaatcctactctggtattgagtatcatctgtatcattacgatcatgacaatccacctcctcctcagcagacaccgctccgaaaacacaaaaagaaggggaggcagagccgacccgcaaataaacagagcccatcaccctctgaggtgtctcagtcccctggtcgggaggtcatgtcttatgctcaggcccagcgtatggtggaagtggacttgcatggttag

SEQ ID NO: 216186 - DNA, 3645 bp, synthetic construct
  misc_feature 1..3645: note = Description of Artificial Sequence: Synthetic coding sequence
  source 1..3645: mol_type = other DNA
atgggggtagactttgatgtcaaaaccttctgtcataaccttcgagccactaaacccccttacgagtgccctgtggagacctgtcgaaaggtgtacaagtcttacagcggaattgagtaccacctctaccactacgaccacgataatccgcctcctcctcaacagacccccctacggaaacacaagaagaagggcaggcaaagcaggccagccaataagcagtccccatctccgtctgaggtcagtcagtctcccggtcgggaggttatgtcctatgcccaggcacagcggatggttgaggtcgatttacacggtagggtgcaccggatttcaatctttgacaatctcgacgtcgtcagcgaggacgaagaggctccagaggaggccccagagaacggcagcaataaagagaacacagaaacccccgctgccacaccgaaatccggcaaacacaaaaacaaggaaaagcggaaggactccaatcatcaccatcaccataatgtaagcgcgagcacgaccccgaaactccccgaagtggtgtatcgtgagctcgagcaggacactccagatgctccccctagacccaccagttattaccgctatatcgagaagagtgccgaggaactggacgaagaagtggagtatgatatggacgaggaggattatatctggctcgacattatgaatgaaaggcggaaaaccgagggagtctcacccatccctcaggagatattcgagtatcttatggatcgtctcgagaaagagagctacttcgaaagccacaataagggagacccaaatgccctcgtcgacgaggacgcagtttgttgcatttgcaatgatggggaatgccaaaattctaatgttatactattctgcgatatgtgcaatctggcagtacatcaggaatgctacggagtgccatacattcctgaaggccagtggctgtgtagaaggtgcttgcagagcccctctcgggctgtcgactgcgcactgtgcccaaataagggcggagccttcaagcagaccgatgatgggagatgggcccatgtggtttgcgccctatggatcccagaggtgtgctttgccaacacagtgtttttggaaccaatcgattctatcgaacacatcccaccagcacgatggaaactcacctgctacatttgcaaacagcgcggaagcggagcctgtatccagtgtcataaggccaactgctacacagccttccacgtaacatgcgcccaacaggctggtttgtatatgaagatggaacctgtgagagaaaccggggcaaatggaacttcattcagcgtccggaaaaccgcatattgcgatatccatactccccctggctcagcaagacgcctgcctgctcttagccatagcgagggcgaagaggacgaggacgaggaagaagacgaagggaaaggatggtcctctgaaaaggtaaaaaaggccaaagccaaaagcaggatcaagatgaagaaggctcggaaaatcctagcggaaaagcgagcagcggcacccgtggtctccgtaccgtgcatccctccacataggctaagtaagataaccaatcgcttaactatccagagaaaatcccagtttatgcaacgactacatagttactggaccctgaaacgccagtcaagaaatggcgtgccgcttttaaggaggctccagacccacctgcagtctcagcgtaactgtgatcaggtgggtcgtgattccgaggacaagaactgggcattaaaagagcagctaaagtcttggcagaggctgaggcatgacctcgaacgggctcggctgctcgtcgagttgattagaaagcgagagaagctcaaacgggaaacaattaaggtgcaacagatcgccatggagatgcagctgactccctttttaattctcctccggaaaactctggaacaactgcaggaaaaagatactggaaacatttttagcgagccggttcctctctctgaggtccccgattatctggatcatataaagaagcccatggatttctttaccatgaagcaaaatttggaggcttatcgctatttgaactttgacgactttgaagaggacttcaatctcatagtctcaaattgcctaaagtataatgcaaaagacacaattttctatcgggcagcggttcgcttgagggagcaggggggtgccgtgctgcggcaggccaggcggcaggcggagaaaatggggattgattttgagactggaatgcacatacctcacagtcttgcaggagatgaagcaacgcaccacaccgaagacgctgctgaggaggagcgactggttttgctcgaaaatcaaaagcatcttccggtcgaggagcagctcaaactcctgttggagcgcttagacgaggtaaacgcaagtaaacagtctgtcggcaggtcccgccgtgctaaaatgatcaagaaagaaatgaccgccctaaggcgaaaattagcccaccaacgggagacaggcagagatgggccagaaaggcatggccctagcagtcgtgggtcccttacgccccacccagccgcttgtgataaggacggacagaccgattccgccgcagaggaatcgagtagtcaggaaacaagtaagggtctcgggcctaacatgtctagcactcccgctcacgaggtagggcgacggaccagcgtactgttttccaagaaaaatccaaaaactgcaggtcctcctaagcgccctgggcgacctccgaagaacagggagtcccagatgaccccttcccatggcggatcacctgtcggcccacctcagctcccaatcatgtcgagcctgcggcagagaaaaaggggacgttcacctaggccaagttctagctcagatagcgatagcgacaagtctacagaagatcctcctatggatctgcccgcaaacggcttctcgggcggaaatcagcccgtgaagaaatcgtttctggtgtaccgtaatgattgtagtttaccgaggtcatcgtccgatagtgagtcttcttcctcgtcttcaagttccgccgcaagtgaccgtacgtcaactactccatctaaacagggaagaggaaagccttccttcagccggggtactttcccggaggattcctctgaggatacaagcggtaccgagaacgaggcctactccgtcggaacgggaagaggggtcggtcactcaatggtgcggaaatccctgggacggggtgccggttggctgtcagaggacgaagatagcccactggacgcgctggacctggtgtgggccaagtgtagggggtatccttcataccctgccttgattatcgatcccaaaatgccacgcgagggtatgttccatcacggtgtgcccattcccgtccctccgctcgaagtgctaaagttgggcgaacagatgacccaggaggcacgagagcatttataccttgtgctctttttcgacaataagaggacatggcaatggctgccacgcacaaaactggttcctctgggggtaaaccaagacttagataaagaaaagatgctcgaaggcagaaaatccaacatccgaaagtcggtgcagatcgcttaccaccgtgcactgcaacatcggtcaaaagtgcagggcgagcaaagtagcgagaccagcgatagcgattag

SEQ ID NO: 216187 - DNA, 5408 bp, synthetic construct
  misc_feature 1..5408: note = Description of Artificial Sequence: Synthetic coding sequence
  source 1..5408: mol_type = other DNA
atggccgcagctcctactcagattgaggcagaactgtattatctcattgcaagatttttacagagcgggccatgtaacaaatctgcacaggttctggtccaagagctggaagagcatcagttgattcctagaagactagactgggagggcaaagagcatagacggtcttttgaagacctggtcgcagccaatgcacacatacccccagactatcttctgaaaatatgcgaacgaatcggacccctcctggataaagagatcccacagtcggtgcctggagtgcagacactgctgggggtcgggaggcagtccctgctgagggacgccaaagattgcaagtccacgctatggaatggaagcgctttcgcagctttgcatcgcggtcgcccaccggagcttcccgtcaactacgtcaagcctcccaacgtcgtgaatattacctccgcgagacagctgaccggatgctcccgctttggccacatctttcctagtagtgcatatcaacatataaaaatgcataagaggatattaggacacctgtccagcgtatattgcgtcgccttcgatagaagcggacgcagaatatttaccggcagcgacgattgtctggttaagatctgggcaacagacgatggccgtctgctcgccacactccgtggacactctgcagagatttccgatatggcggtgaactatgagaatactctgatcgctgccggttcttgcgacaaggtagtacgcgtgtggtgcctcaggacctgcgctccggtggctgtactgcagggccactctgcgtctatcacgagcatacaattctgcccaagcaccaaagggaccaatagatacttaacatctaccggggcagatgggaccatctgcttttggcaatggcatgttaagacaatgaagttccgcgacagaccagtgaagtttaccgagcgaagccgtcctggcgtacaaattagctgcagttcctttagctcaggcggaatgtttatcacaacaggcagtacggatcacgtgattcgtatatactatttgggatctgaagtgcccgagaagattgctgaactggaaagtcatactgataaagtggtggcggtacagttttgcaataatggggacagtctgcggttcgtgagcggatcaagggacggtacagccaggatatggcaatatcaacagcaggagtggaagagtatagtgctggacatggcaacaaagatgaccggtaataacctgccatccggtgaagataaaattaccaaattaaaggtcactatggtggcttgggaccgctacgacaccaccgtgatcacagccgtcaacaacttcctcctgaaggtatggaattctatcacaggacaactgcttcacactctcagcggccacgacgatgaagtgttcgtcctggaggcccacccctttgatcagaggatcatcttgagcgctggccacgatgggaatatcttcatctgggacttggatcgaggtacaaagattcggaattatttcaacatgatcgagggccagggccatggcgctgtcttcgactgcaagtttagtccggatggcaaccacttcgcctgcactgattctcatggccacttactgctttttgggtttggctgtagcaaatattatgaaaaaatcccagaccagatgttctttcataccgattaccggcctctgattcgagatgctaacaattatgtcttggacgaacagacacagcaggcacctcatctgatgcctcctcccttcctcgtggatgtggacgggaacccacatccgacaaagttccagaggttggtgcccggaagagagaactgcaaagacgaacagctgattccacagctgggttacgtggcaaatggcgacggagaggtcgtggaacaagtgataggccaacagacaaatgaccaggacgaaagcatcttggatggtattattcgtgagctccagagagagcaggacttaagattaattaatgagggcgacgtgccacacctgcccgtgaaccgggcatactcagtcaatggggcattgcggtcccccaacatggacatctctagttctcccaacatccgcctgcgcagacactcttcccaaatagaaggagtgaggcaaatgcacaacaacgcacctcgatctcagatggctacagaaagagatcttatggcctggagccgccgagtggtagttaacgagttgaacaacggcgtgtctcgggtgcaggaagaatgtagaactgcaaaaggggacattgaaatttccctgtatacagtagagaagaaaaaaaagcctagttacacaacccaacggaacgactacgaaccttcgtgcggccgtagccttcgccgaacgcagcggaaacgccagcatacttaccagactcgcagtaatattgagcacaattcacaggcatcctgtcagaactccggcgtgcaggaagactctgactcaagcagtgaagaggatgagaccgttggcacatctgatgctagcgtggaggaccctgtcgttgagtggcagagcgaatctagttcttccgattcttccagtgaatattcggattggacagccgatgccggaatcaacctgcaacccccaaagaggcagaccaggcagacgacgcgcaagatctgttccagcagcgacgaagaaaacctcaagtctctggaagagcgccagaaaaaaccgaagcagacccgcaagaaaaaaggaggacttgtttctatcgcaggagaaccaaacgaagagtggttcgctccccaatggattctcgatacgattcccaggcgctcccccttcgtaccacaaatgggggatgaattgatctactttagacagggccacgaagcctacgtccgcgctgtcagaaagtccaagatctattctgtcaatttgcaaaaacagccttggaataagatggacctcagggagcaggagtttgtaaaaattgtgggaattaagtacgaagtcggcccaccaaccctgtgctgcctcaagctggcatttcttgatcccattagtggaaaaatgacaggcgaatccttttctatcaaataccatgatatgcccgacgtgatcgattttttggtactccatcaattttataacgaggccaaggaaaggaactggcagattggagaccggttccgaagcatcattgatgacgcctggtggtttggcacagtagagtctcagcaaccctttcagcccgaatacccagattcatcttttcagtgctatagtgtccactgggacaacaacgaacgggaaaagatgagtccatgggacatggagccaattccggagggtacagcattccctgacgaggtgggcgcaggcgtgcccgtaagtcaggaagagctgaccgcactgctgtacaagccacaggaaggggagtggggtgcccattcacgcgacgaggaatgtgagcgtgtgattcaagggatcaatcacttgctcagcctcgatttcgccagtccgttcgccgtgccagtcgatctttctgcatacccactgtattgtacagtcgttgcctatccaactgacttgaacaccatccgcagaaggcttgaaaatcgtttttaccggaggatatctgctctgatgtgggaggtccgctacatcgagcataacgcccgaacgtttaatgagccagactccccaattgttaaagcagcaaaaatcgtgacagacgtgcttcttaggttcataggtgatcaatcctgtacagatatcttggatacctacaacaaaataaaggctgaggagagaaactctactgatgcagaagaagacaccgaaatcgtggatctggactctgacggccctggcacaagctcgggcaggaaggtcaaatgccggggtcggaggcagagtctcaaatgtaatcctgatgcatggaagaagcagtgcaaggagctgctgtcactgatttacgagagagaggacagtgagccgttccggcaaccagcggacctgctttcataccccggacaccaggaacaggaaggcgaaagctcggagtcagtggtgcccgagaggcaacaagattccagcctgtcggaggactaccaggacgtcatcgatactcctgtcgatttctccacagtgaaggagaccctagaggctgggaactatggctccccactggagttctacaaagacgtccggcagatcttcaacaattccaaggcctatacatctaacaaaaaatcacggatctactctatgatgttgagactgagcgccttgttcgaatctcacattaagaacatcatctcagaatataaaagcgctatccagtcacagaaacggagacgcccaaggtaccgcaagcgccttagatcctcgtcttcatccctgtcctcgtctggggcaccctcacccaagggcaaacaaaagcagatgaagttgcaaccaaaaaatgaccaaaacacatctgtctcacacgccaggacatcctcaccgttttcctcccctgtgtcagatgctgccgagggtctgtctctctatctgttggacgacgaacccgacgggcctttctctagtagtagctttgggggatactcccgatccgggaacagccacgacccaggaaaagccaaatcattccgcaacagagttctgcctgtgaagcaggaccacagtcttgatgggccactaactaacggcgatggaagggaaccacggacaggcattaaaagaaaactgctttctgcgtcagaagaggacgaaaacatggggggagaggacaaagagaagaaagagaccaaggaaaaaagccacctttctacgtccgagtctggagaactggggtcgtccttatcaagcgagtccacatgtggatctgatagcgactctgagtccacgtcaagaacagaccaggattatgttgacggcgatcacgattacagcaagttcattcaaacaaggccaaagaggaagcttcgaaagcaacacgggaacgggaaaagaaattggaagacccggggaactggagggagaggccgttggggccgttgggggcgttggtctaggggtggaagaggccgtggcggtcggggacggggtagcaggggacggggagggggtggcacccgcggacgcggtagggggaggggcggtcgaggcgcttcccgtggcgctacacgggctaagcgagccaggattgcggacgacgaattcgatacaatgttctcagggcgattctctcgtcttccccgtatcaaaacaaggaaccagggtcggcgaaccgttttgtataatgatgactctgacaacgacaattttgttagtaccgaagatcccctgaacctaggtacttcccggtctggacgggttcggaagatgaccgagaaggcacgagtttcccatctcatgggatggaactacta

SEQ ID NO: 216188 - DNA, 2406 bp, synthetic construct
  misc_feature 1..2406: note = Description of Artificial Sequence: Synthetic coding sequence
  source 1..2406: mol_type = other DNA
atgcttcagaacgttactccgcacaacaagttgcctggtgaagggaacgcgggtctgctcggcttgggacccgaagcagcagcaccaggaaaacggatccggaagcccagcctactgtacgagggttttgaatcgcctaccatggcttcggtaccagcactccagcttacgccagctaatccgcctcctcctgaggtgtccaatcctaagaaacccggaagagtgaccaatcagcttcagtatcttcacaaggtcgtcatgaaggccttatggaagcaccaattcgcatggccatttcgtcagcccgtggatgcagtgaaactaggtttgcccgattatcataagatcataaaacagcctatggatatggggacgataaagaggaggcttgagaacaattattattgggccgcatctgaatgtatgcaagacttcaatacaatgttcaccaactgctacatctacaataagcctactgacgacatagtgctcatggctcagaccctggaaaagattttcctccagaaggtagcttccatgcctcaggaagagcaagagctcgtcgtgaccatccccaagaactcacacaagaaaggcgctaaactcgcggcactgcaaggatcggtgacaagcgcgcaccaggtaccagcggtaagctctgtgtctcatacagcactctacacaccccctcccgaaattcctacaaccgtactgaatataccacatccgtcggtgatcagttcaccgctgcttaagtcgttgcacagcgctgggcctcccctccttgctgttaccgccgcaccaccagcccaacccctggccaaaaagaaaggtgtgaaacgtaaggcggatacaacaactcctactcccaccgccatcctcgcgccaggtagccccgcaagccctcctgggtctctggagcccaaagccgcaagactcccccctatgcgaagagaatccgggagaccgatcaaaccccctcgcaaagacctacccgactcgcagcagcagcatcagagtagcaagaaagggaagctctctgaacaactcaagcactgtaacgggatcttgaaagagctactgtccaaaaaacacgcggcttacgcctggcccttctataaacccgtagatgccagtgcgctagggctacatgattatcatgatatcatcaagcaccccatggacttgtccactgtaaagaggaaaatggagaaccgggattatagagacgcgcaagagttcgccgctgatgtcaggttgatgttcagcaactgctacaagtacaatccgcctgatcatgacgttgtggctatggcgaggaagttgcaggatgtgttcgagtttcgatacgccaagatgcctgacgagcccctcgaacctggtcctttacccgtgtcgactgctatgccacctggcctcgccaagagttcaagtgagtcctcatccgaggaatcaagctctgagtccagtagcgaggaagaagaggaagaagatgaggaagacgaagaggaagaggaaagcgagagtagtgatagcgaggaagaacgggcacaccggctagccgagctgcaggagcagctgagagccgttcacgagcagcttgctgctctgtcccagggcccaatcagtaagccaaagcggaagcgtgaaaagaaagagaaaaagaagaagcggaaagctgaaaagcacagaggacgcgcaggtgccgatgaggatgacaaagggccacgggcaccccgacctcctcagccaaagaagtccaaaaaggccagtggtagcggaggaggctctgccgctttgggaccatcggggttcggaccaagtggcggtagcgggacaaagctcccaaagaaggccacgaaaacagcacctcctgcgctaccaactggctacgacagtgaggaggaggaggaaagtcggcctatgagttacgatgagaagagacaattatctttagacatcaataagttgcccggtgaaaagcttggccgtgtggtgcatatcattcaggctcgggagccatctcttagagacagtaacccggaggagatcgaaatcgattttgaaacgctcaaaccaagcacattaagagaactcgaacgttacgtgcttagctgcctgagaaaaaaacccaggaagccatatacgattaagaagcccgtaggaaaaaccaaggaggagttggcactggaaaaaaaaagggagctcgagaagcgactgcaggatgtgagcgggcagctaaattccacaaagaagccgccaaagaaggcaaatgaaaaaactgagtcttcttcggcgcaacaggttgccgtgagcaggctgtctgcctcaagctccagtagcgattcttcatcgtctagctcctcctcctcaagtagcgacacatccgacagcgattctgggtag

SEQ ID NO: 216189 - DNA, 2406 bp, synthetic construct
  misc_feature 1..2406: note = Description of Artificial Sequence: Synthetic coding sequence
  source 1..2406: mol_type = other DNA
atgctgcaaaacgtgactccccacaacaagctgcctggagaaggaaatgctgggttgttagggctgggtccggaggccgcagctcctggtaagcggatacggaaacctagcttgctgtacgagggctttgaatccccgactatggcatcagtgcctgccttgcagctgacacccgctaatccaccccctccagaggtgtcgaaccccaagaagcctggcagggtgacaaatcagcttcaatacctgcacaaagtcgttatgaaagccctctggaagcaccagtttgcctggccattccgacagccagttgatgccgtcaagctcggcctcccggactaccataaaattattaaacagccgatggatatgggcaccattaaacgacggctggaaaacaactattattgggccgcatcagagtgcatgcaggacttcaatacaatgtttactaattgttatatctacaataaacccactgatgacatcgttctgatggcccagactctagaaaagatcttcctccagaaggttgcatctatgccacaggaagagcaggaattggtcgtaacaatccctaagaactcacacaagaaaggcgctaagctggctgctctgcagggctccgttacatcagcccatcaggtgccagccgtgtcttctgtaagtcacaccgctctttataccccccctcccgaaatcccgactactgtcctcaatataccacatccaagcgttatctcttcgccactactcaagtccctgcacagtgccggaccccctctgctagccgtgaccgccgctccacctgcacagcctttagctaagaagaaaggggtcaagagaaaagccgacacaaccacacctacccctactgctatcctggcaccagggtctcccgcaagtcccccaggcagcttagagccaaaggccgcaagactgccaccaatgagacgggaatccggcagacccataaaaccaccaagaaaggatctcccagattcccagcagcaacaccagtcctctaagaaaggcaaactctcagagcagctgaagcactgtaatggtattcttaaagaactcctgtctaaaaagcatgctgcatacgcgtggcccttctacaagccagtggatgccagcgccctgggactgcacgactatcatgacattatcaagcatccgatggacctttcaactgtgaagaggaaaatggagaaccgcgattaccgcgacgcccaagagtttgcagccgacgtgaggctgatgttttccaactgctacaagtacaatcccccagatcacgacgttgtggcaatggcgcgtaagctccaggacgttttcgaatttaggtacgccaagatgcctgacgagcctctcgaacctggtccgctgccggttagcacggccatgcctcctggactggctaagtcttcctcagagagttcatccgaggagtcttcaagcgaaagttcttccgaagaggaagaagaagaggacgaggaagacgaggaggaggaggagtcagagtcgagcgatagcgaagaagagcgggctcaccgactcgccgaattacaagagcaactgcgcgcagtgcacgaacaacttgctgcgctttcccagggcccaatttccaaacccaagcgaaagagggagaaaaaggagaagaaaaaaaaaaggaaggccgagaaacatcgagggcgagctggcgcagacgaggatgacaaaggaccacgggctcctcggcctccacagcccaagaagtcaaagaaagcctctggctccggcggaggatctgccgctctggggccaagtggattcggaccttccggtggaagcggcacgaaactgcctaaaaaggcaactaagactgcgcctccagctcttccgactgggtatgattctgaagaagaagaggagagtaggccaatgtcctacgacgaaaagagacagctgagtctcgacattaataaactccctggcgaaaagctaggaagggtggttcacattatacaagccagggagccctcactgcgtgactcaaaccctgaggaaatagaaattgacttcgagactctgaagccttccaccctccgagaattggaaagatacgtgctcagctgcctcagaaagaaaccaagaaaaccatataccatcaagaaacccgtcggcaagacgaaggaggagctcgccctagagaaaaaacgagaattggagaaacggctgcaggacgtgtcagggcagctgaattccacaaagaagccgcctaagaaagccaatgagaaaacagaatcatcttctgcacaacaagtcgctgtatcccggttgtctgctagcagctcatcctccgactcctcctcctccagtagcagtagcagcagcagcgatacctccgattcagattccggttag

SEQ ID NO: 216190 - DNA, 2406 bp, synthetic construct
  misc_feature 1..2406: note = Description of Artificial Sequence: Synthetic coding sequence
  source 1..2406: mol_type = other DNA
atgctgcaaaacgtcacgccccataataagctccccggtgaagggaatgccggacttctgggacttggcccagaagctgctgctccaggcaaaaggataaggaaaccttccctactctatgaaggattcgagagcccaactatggccagtgttcctgctctacaactcactcccgctaatccacctccgcctgaagtgtcaaaccccaaaaaaccgggaagggttactaaccaactccagtacctgcacaaagtggtaatgaaggctctgtggaaacatcagttcgcttggccgtttcgacagccagtggacgcggtcaaactggggctgcccgactaccataaaataattaagcaacctatggacatgggaacaattaagaggaggctagaaaacaattattactgggccgcatccgagtgcatgcaggattttaatacaatgttcacaaactgttatatttacaacaaaccaaccgacgacattgtgttgatggcccagacactagagaaaattttcctccagaaagtagctagcatgccacaggaggaacaggagctggtagtcactataccgaaaaatagtcataagaaaggtgccaaattagctgcactccagggttccgtaacatccgcacatcaagtgccagctgtgtcctccgtctctcataccgccctgtacaccccacctccagaaataccaactacagtccttaacatcccacacccgtcagtgatctcctcacctctcctgaagtctctccactccgctggacctcctttgttggctgtgaccgctgcccctcccgctcaacctctggcaaagaagaaaggcgtgaaacgcaaagcggatacaactacgcccacaccgaccgccatactggccccagggtctccggcttctcccccaggatcattggagccgaaggctgccagattaccacctatgaggagggagtctggccgacccatcaagccaccaagaaaggacctgcccgattcacagcagcagcaccaatcctctaagaaggggaagcttagcgaacaacttaagcactgtaacggcatcttgaaagagttactttccaaaaagcacgccgcatacgcatggcctttttacaagcccgtcgatgcatctgctctcggactccacgattatcacgatattatcaaacacccaatggacttatcaacagtgaagaggaaaatggaaaatagggattacagagacgctcaggaattcgccgctgacgtgcggctcatgttttccaactgctataaatataacccgcctgaccatgatgtcgtggcaatggcacgcaagctgcaggatgtattcgaatttcgttatgccaagatgcctgacgagcccctcgaacctggtcctctccccgtgtccaccgctatgccacccggtttggcaaaatcctcctctgagtccagttcagaggagtcctctagtgagtcaagcagtgaggaggaagaggaagaagacgaggaggacgaggaggaggaggaaagcgaaagtagcgactctgaagaagaacgtgcacaccggctggccgaactgcaggaacagctcagggcagttcatgagcagttagccgctctgtctcagggccctatctccaagccgaagcggaagagagaaaagaaggaaaaaaagaagaaacggaaggccgaaaagcacaggggacgcgctggggctgatgaagacgataagggtcctcgtgcccctcggcctccacagcccaaaaagagtaaaaaagcttccggctccggaggaggcagcgcagccttggggccttcagggtttggtccctccggcggatctggcaccaaattacctaagaaggccacgaaaaccgcgccaccagccctgcccactggatacgacagcgaagaagaagaagaaagtaggcccatgtcttacgacgagaaaagacaactgagcctggatataaacaaactgccaggggaaaaactggggcgtgtcgtacatataatacaagccagagaaccatccctccgcgactccaacccagaggaaattgagatcgactttgaaactctgaaacctagcacactgagagaactggagcgctatgtgctcagctgcctgcggaaaaagccaaggaagccttacaccatcaagaaacccgttggcaaaaccaaagaggagttggcgctcgagaagaaaagagagctagagaaaagacttcaggatgtgtctggccagttgaacagtaccaagaagccccctaaaaaggcaaatgaaaagactgaatcaagtagtgctcaacaggtagccgtgagcaggctgagcgcctcttcttcatcctctgactcttccagttccagcagctcttcttcaagttctgatacatcagattccgactccggatag

SEQ ID NO: 216191 - DNA, 2511 bp, synthetic construct
  misc_feature 1..2511: note = Description of Artificial Sequence: Synthetic coding sequence
  source 1..2511: mol_type = other DNA
atgctccagaacgtgacacctcataataagctgccaggagaaggaaatgccggtctactgggcctgggccctgaagccgctgctcctggaaagcggattcggaaacctagcttgctgtatgagggctttgagtctccaaccatggcctcggtacccgctcttcagctaactcctgccaatccccctccccctgaagtcagcaaccctaagaagccgggacgcgtgacaaaccagctgcagtacctgcacaaagtagttatgaaggccctgtggaagcaccagtttgcgtggccctttcgtcaacccgtggatgcagtgaagctcggtttgcctgactatcataaaatcataaaacagcctatggatatgggtaccataaagagaagactggagaacaattattattgggctgcgtccgaatgcatgcaggattttaatactatgttcactaactgctacatctacaacaaacctactgatgacattgtgcttatggcacagactttagaaaagatttttttacaaaaggttgcaagcatgccccaggaggagcaggaattagtggtgaccattcccaaaaactcccataaaaagggagcaaaactggccgcactacagggaagtgttacaagtgcgcaccaggtgccagctgtgagcagcgtaagtcacaccgcactttacacaccacccccagagatacctacaaccgtgttgaacatcccacacccgagtgtgatctctagtccgctacttaagtccctgcactcagctggcccacccctgttggctgtgaccgcagccccaccagcccaaccattggcaaaaaagaaaggtgttaaacgcaaagcggacacaactacacctacccctactgctatccttgccccaggttccccggcaagcccaccaggctccttggaacccaaagcagctagattgccacccatgaggagagagtctggtcgcccaattaagcctccaagaaaggacttacctgactctcagcagcagcatcagagtagcaagaagggaaagctgtcagaacagctcaagcactgcaatggcatcttgaaggagctattgagcaaaaagcatgctgcatacgcctggcccttctacaaaccagttgacgccagtgctctgggcctccacgactaccatgatattatcaagcatccaatggacctcagcacagttaagaggaaaatggaaaatcgagactatagggatgcccaggaatttgccgcagatgtccgcttaatgttcagcaattgttacaaatataatccaccagatcacgatgttgtggctatggcacgaaaactgcaggatgtatttgagttccgctacgctaagatgcccgatgagcctttggaaccaggtcccttgcccgtttctaccgctatgccccctggcttagctaaatcctcaagtgaatcctcgtcagaagaatcatcatctgaatcctccagcgaagaggaagaagaagaggatgaggaagacgaggaagaggaagaatccgaatcatctgactccgaggaggagagagcccacaggctggccgaactccaggaacagctcagagcggtccacgaacaactcgctgccctgagtcagggccctatctccaaacctaagcggaaaagagagaaaaaggaaaagaaaaaaaagagaaaagccgaaaagcaccgtggcagagcaggagccgatgaggatgacaagggccctagagcccctcgccctcctcagccaaaaaagtcaaagaaggcttcaggatctggcggtggaagcgccgctttgggaccaagcggctttggacccagcggcggatcagggactaagcttcaggcaggcgtgcaatggcgggatttgggattactgcaacctcccctgctgggattcaagagattttcgtgcctatctctgcctagctcccaggactatcggcttcccaaaaaagccaccaagaccgcaccccctgccctccccactggttatgactctgaggaggaagaggagtctcggcctatgtcatacgacgagaagcgacagttgtcgctggacatcaataagctgcctggtgaaaagttgggtagagtggtgcatatcatccaagcccgagagcctagcctgagggacagcaatcccgaagagattgagatcgatttcgagaccctcaagccatccacgttacgggagcttgaacgttatgtcctcagctgtctaaggaagaagccacgtaagccctacacaatcaaaaagcccgtgggtaaaactaaggaagagctagccctcgaaaaaaagcgagagctagagaaacgcctgcaggatgtgtccgggcagctaaattcaactaaaaagcccccaaagaaagccaatgagaagaccgaatctagcagtgcccagcaggttgccgtaagtcgcttaagcgcttcctcttcctcatctgatagctcttcctccagttcttctagttcctcctctgatacaagtgactccgattcaggatag

SEQ ID NO: 216192 - DNA, 2511 bp, synthetic construct
  misc_feature 1..2511: note = Description of Artificial Sequence: Synthetic coding sequence
  source 1..2511: mol_type = other DNA
atgttacaaaacgtaaccccgcacaataaattgccaggcgaaggcaacgccggattgctgggacttggtccggaagccgctgcccctggaaaacgaatccggaaaccttcgttactgtacgaagggtttgaaagcccaacaatggcgtctgtgcctgctctgcagctcacccccgctaaccctcccccaccggaggtgtctaaccccaagaaacctggcagagtgactaaccagcttcagtacttgcataaggttgtgatgaaggccctttggaagcaccagttcgcctggccttttcgacagccagtggatgctgttaaactaggtctcccagattaccataagatcataaaacagcccatggatatggggaccatcaagcgtaggttggagaataactattattgggccgcaagtgagtgcatgcaggattttaacactatgtttacaaactgctacatatacaacaagcctactgatgatattgtactgatggcccaaaccctggagaagatttttcttcaaaaggtagcctcaatgcctcaagaggagcaggaattagtggtaacaatcccaaagaactcgcacaagaagggtgctaagctggccgctctgcaaggttctgtgacttcggctcaccaggtcccagccgtgagttcggtatcacacaccgcgctctacacccccccaccagaaatccccactactgttcttaacatcccccatccatcagtgatctcgagtccgctccttaaaagtctgcattcagccggtcctcccctgctcgccgtgacggccgctcccccagcgcagccattagctaaaaagaaaggtgttaagagaaaagccgacacaactacgccgacccccacagccatcctggctcccggtagccctgcctcaccacccggaagtcttgagccaaaagccgctagactccctccgatgcggagggagagcggtcgccctatcaagccgccacgaaaagacctcccggactctcagcagcagcatcagtcatctaagaaagggaagttgagtgaacagctgaagcactgcaatggcattctcaaagagctgctgagcaaaaaacatgcagcttatgcctggccattttacaaacctgtggacgccagtgccctgggactgcacgattaccatgacatcatcaagcaccccatggacctatctacggtaaagcgaaagatggaaaaccgagattatagagacgcacaagagtttgctgccgatgtgcgactcatgttctcgaattgttacaagtacaatccgccagatcacgacgtagtggcgatggctcggaagctgcaggatgtttttgagttccgatatgccaagatgccagacgaacccctggagccaggcccactgcccgtaagcactgccatgcctcctggcctggctaaaagcagcagcgagagttcatcagaagagtcctccagcgagtcttcttccgaggaagaagaagaagaagatgaggaagacgaggaagaagaagagtcagagtctagtgattcagaagaagaacgggcacataggctcgcagagctccaagagcagctgagggccgtgcacgaacagctggccgcactgtcccaagggcctatctcaaagccaaagagaaagcgcgaaaaaaaagagaagaaaaaaaaacggaaagcggaaaaacacaggggcagagcgggtgcggacgaggatgataaagggcctcgcgcacccagaccaccccagcccaagaagtctaagaaagcttccggaagcggcggtggcagcgccgctttaggtccttccgggttcggcccatcaggaggcagcggaacaaaacttcaggccggagtgcagtggcgggacctgggactgttacagccgccactactagggttcaagaggttcagctgcttgtcactcccatcctctcaggactatcgcctcccaaagaaggctaccaagacggccccacccgctctgcctaccggttacgacagtgaggaagaggaggagtccagacccatgtcttacgacgagaaacggcagctgagcctggatatcaataagcttcccggtgagaaactaggcagggtggttcacattatccaggcgagggagccatccctgagagacagcaatccggaagagattgagatagatttcgaaacactgaaaccttcaacattgcgcgaactggagagatatgtgcttagctgccttcgtaagaagccgcgaaaaccatacacaattaaaaagcctgtaggaaagacaaaggaggagctggccctcgagaagaagagggaattggagaagcgcctacaggacgtgtctgggcagttgaatagtaccaagaaacctcccaagaaagctaatgagaagaccgaatcctctagcgcccaacaggtggctgttagccggttatcagcttcgagttcttcctccgactccagcagcagctcttcaagcagtagttcgtcggatacaagcgattccgattccgggtag

SEQ ID NO: 216193 - DNA, 2511 bp, synthetic construct
  misc_feature 1..2511: note = Description of Artificial Sequence: Synthetic coding sequence
  source 1..2511: mol_type = other DNA
atgctccagaatgtgaccccgcataacaagctgcctggagagggtaatgccggactgctcggcctggggccagaagctgctgcgccaggaaagaggatccggaagccatcgttactgtacgaaggcttcgagagtcccaccatggcctcagtgcccgctctgcagttgacccccgctaaccccccacccccagaggtcagtaaccccaagaagcctggcagagtgacgaatcaactgcagtatcttcacaaggttgtcatgaaagcgctgtggaagcatcagtttgcctggcccttccgccagccagtggatgcagtcaagttggggctgcccgattaccacaaaatcatcaagcaacccatggacatgggcacaatcaagagacgcctggaaaataattactactgggccgcatcagaatgcatgcaagacttcaacacaatgttcactaattgctacatctacaataagccaactgacgacatcgtcctgatggctcagaccctcgagaagattttcctccaaaaggtggcttcaatgcctcaggaagaacaggaactcgtagtgaccattcccaaaaattcccacaaaaaaggcgcaaaattggccgcattgcaaggcagcgtgacaagtgctcatcaggtcccagcagtcagtagcgtgagccacacagccctatacacccctccacccgaaatccctacgaccgtgcttaatattccacatccatcagttataagcagtccgctcttaaagtctctgcacagtgccggacccccactgcttgccgtgacggcagccccacctgctcagcccctggccaagaaaaaaggggtgaagcggaaggcagacacaaccacgccaacccctactgccattctcgcaccgggtagtcccgcatccccacccggaagcttagagccaaaagcagctcgcctccctccaatgcgtagggagagtgggcgaccaatcaagcctcctcgcaaagatctgccagatagccagcagcaacaccagtcctccaagaagggtaagctctctgagcagttgaaacactgcaacggcattctgaaggagttgctgagcaagaaacatgcagcctacgcatggccattctataagcctgtcgacgcgtctgctctaggcctgcacgattatcacgatattatcaaacaccccatggatttaagcacggtgaagagaaagatggaaaatcgtgactatagagatgcccaagagtttgctgccgacgtgcggctgatgttcagcaactgttacaaatacaaccccccagaccatgatgtggtggcgatggcacgcaagctccaagacgtgttcgagttccggtatgccaagatgcctgatgaacctctcgagcccggtcctcttcccgttagtacagccatgccacctggcctcgctaagagcagttcggagtcttcctctgaggaatcatctagcgagagttcctctgaggaggaggaagaagaagacgaagaggacgaggaagaagaggagagcgaaagctccgactcagaagaagagagggcacaccgtcttgctgaattacaggaacagctgcgggcagtgcatgagcaattagctgctctgtcacagggccctatctcaaagccaaagcgcaagagggaaaaaaaagagaagaaaaagaagaggaaagcggagaaacatcgcggtcgggcaggcgctgatgaagatgataagggcccaagagctccaagaccaccacagcccaagaagagcaaaaaagcctccgggtccggagggggttcagccgctcttggccctagcgggtttggcccaagcgggggttcgggcactaagcttcaggccggagtgcagtggcgggatctcgggctgctgcagcccccacttctgggattcaagaggtttagctgcttatccttaccgtcctcacaggattacaggctgccaaaaaaggccacaaaaaccgcacctccagcgctcccaaccggctacgactccgaggaggaggaggaaagcagacctatgagttacgacgaaaaaaggcagctgtccctggatatcaataagctgcctggggaaaagttgggtcgggtggtgcatattatccaagccagagagccgtctctgcgcgactccaatccagaggagatcgagattgattttgaaactttaaagcctagcacactgcgcgagctggaacggtatgtgctgtcttgcttacgaaaaaagccgcgtaagccatacacaataaagaagcctgtcggcaaaacaaaagaagagttagcccttgagaaaaagcgagaactcgaaaaaagattgcaggatgtgtcaggacaactgaactctaccaagaaaccacccaagaaagctaatgagaaaacagaatcctcctcagcccagcaagttgcggtgagcaggctgtctgcaagcagcagttccagcgacagcagcagctcatcgtcctcgagctcctcctccgatacaagcgacagcgactccggttag

SEQ ID NO: 216194 - DNA, 2406 bp, synthetic construct
  misc_feature 1..2406: note = Description of Artificial Sequence: Synthetic coding sequence
  source 1..2406: mol_type = other DNA
atgctgcagaacgttacaccacataacaaactgcccggagagggcaatgccggtctgctcggtctaggccctgaggccgctgctcctgggaagcgcattcgcaaaccttccctgttgtacgagggtttcgaaagtcctaccatggccagtgttcctgcgttacagctgactccagccaatccgccaccaccagaagtatccaatcccaaaaaacctggccgtgttaccaaccaactccagtatttgcataaagtggtgatgaaggcactctggaagcaccaatttgcctggcccttccggcagcccgttgatgccgttaagctgggcttacctgactatcacaaaatcatcaagcagcctatggacatgggcactattaaaagacgactggagaataattactactgggccgcaagtgagtgcatgcaagactttaatactatgttcaccaactgctatatttacaacaaacccaccgacgatatagttctaatggcgcagaccctggagaaaattttccttcagaaggtggcatcaatgcctcaagaggagcaagagcttgtggtaacgattccgaagaacagtcataagaagggcgctaagctagcggctcttcagggctcggttacatctgcacatcaggtcccagcggtgagcagcgtgtctcacaccgcactgtacaccccaccccctgaaattccaactacagttctgaacataccacacccgtcagtcatcagcagtcccctcctgaagagccttcactctgcgggtcctcccctcctggccgttacagcagcaccacccgcacaacctctggccaagaagaagggcgtgaaaaggaaggcagacactacaaccccaaccccaactgccattcttgctccgggtagccctgcctcccctcccggtagcctagagcccaaggccgctaggctgccccctatgaggagagagagtggcaggcctatcaagcccccaagaaaggatttaccggactctcaacagcagcaccagtctagcaagaaaggcaaattgtctgaacagcttaagcattgcaatggaatcctgaaggagttgttgagcaagaagcacgcggcatatgcctggcctttctacaaacccgtggacgccagcgcactagggttacatgactatcatgacattatcaagcatcccatggatcttagtactgtgaaaaggaaaatggagaaccgcgattacagagacgcacaggagtttgccgcagatgtcaggctgatgttctctaattgttacaagtacaacccccctgaccacgatgtcgtcgcaatggcccgaaagttgcaagacgtgttcgagtttcgctatgcaaagatgccggatgagccgctagagcccggtcctctgccagtctccaccgcaatgcccccaggcctggctaagagcagctccgagtctagttccgaggaatcttcatcagagtcctcttccgaagaggaggaggaggaggatgaagaggacgaggaggaagaggagtccgagtccagcgactccgaagaggaacgtgcacaccgtctggcggaactccaggaacaactgagggccgttcacgagcagctggcagcgttatctcagggacctatcagtaagcccaagaggaaacgggagaaaaaggaaaagaagaaaaagaggaaggcagaaaagcaccgagggagagctggcgcagatgaggacgataaaggaccaagggcccctcggcctcctcagcctaagaaatccaaaaaagcgtcgggctccggaggcggaagcgcagcgcttggcccaagtggattcggtcccagcggcggttccgggaccaagttacctaagaaagcaacaaagacagcacccccagctctgcctacggggtacgactcggaggaggaggaggaatccagacccatgagctatgacgagaagagacaactgagtctggatattaataagctgcccggagagaagctgggcagggtcgtgcacataatccaggcccgtgagccatcccttagagacagcaatccggaggaaatagagatagacttcgagactttaaaaccaagcaccctccgggagttagagagatacgtgctgagctgcctgagaaagaagccccgaaagccgtataccatcaagaaaccagtgggcaagaccaaagaagagctggccctggaaaaaaagagggagctggagaaacgccttcaggatgtgagcggacagctcaactctacgaagaagcctcctaaaaaagcgaatgaaaagactgaaagctcctcagcccaacaggttgctgtgtcacgcttgtctgcctcgtcctcctcttccgactccagctcaagtagctcttcctccagttcctccgatacttccgattccgactcaggatag

SEQ ID NO: 216195 - DNA, 2406 bp, synthetic construct
  misc_feature 1..2406: note = Description of Artificial Sequence: Synthetic coding sequence
  source 1..2406: mol_type = other DNA
atgctgcaaaacgtgacgccccataataaactgcccggtgaggggaacgctggccttttagggcttgggccagaggccgcagctcccggtaagcgcataaggaagccctctcttctctatgaaggtttcgagtcacccaccatggcttcagtgcctgcgttgcagctgactcccgctaacccgccaccaccagaagtttccaatccaaagaagcctggccgagtcaccaatcagttgcagtatctccacaaggtggtgatgaaggccctctggaaacatcagtttgcctggccatttagacagcctgtcgatgccgtgaaattaggattgcccgactaccataagatcattaaacaacctatggacatgggaacaattaagcggaggctcgagaacaattactattgggccgcttccgagtgcatgcaggactttaatactatgtttaccaactgttatatttataacaagcccacagatgacattgtcttaatggctcagacattagagaaaatcttcctacagaaggtggcctccatgcctcaggaagaacaggagctggtcgtcactatcccaaaaaactctcacaagaagggcgctaaattggccgctttacaaggctcagtgactagtgcccatcaggtaccagccgtgtcctccgtcagccacacagctctgtataccccaccccctgagatcccgacaactgtgctgaatatcccccatccctctgtaatctcttctccgctgctgaagtctctgcattcagccggaccacctctcctggccgtgacggccgcaccccctgcacagccattagcgaagaagaagggcgtcaagagaaaagctgacacgactacacctacaccaaccgctattctggcaccaggaagtccagctagccctccaggatctctagagcccaaggccgcacggctgcctccaatgcggagggagagcggccgacctatcaaacctccacgcaaagacttaccggactctcagcagcagcatcaatcctcgaagaaaggcaagctgtccgaacaactcaagcactgtaacggtattctgaaagagctcctttctaaaaagcacgcagcctacgcctggcccttctataaaccagtcgatgcatctgcactcgggcttcacgattatcacgatattataaaacacccaatggatttgtccactgtaaaacgcaaaatggagaacagagactaccgggacgcgcaggagttcgcagccgacgttcgcctgatgttttccaactgttacaaatacaacccccctgatcacgacgtggtggctatggctaggaagttgcaagatgttttcgagttccggtatgccaaaatgccagacgaaccccttgagcctggcccactgccggtaagcaccgccatgccgcctggcctagccaagagcagcagtgagagttcttcggaggagtcatccagcgagtctagtagcgaggaggaggaagaggaagacgaggaggatgaggaggaagaggagtccgagtcctcggattcagaagaggagcgggctcaccggctggccgaacttcaagaacagctcagagctgttcatgaacaactcgccgcactgtctcaggggccaatctccaagcccaaaaggaagcgggagaagaaagagaaaaagaagaaacgcaaagccgagaagcatagaggacgcgcaggagcggacgaggatgataaggggccacgcgctccacgtcctccccagcctaaaaagtctaaaaaggcgtcaggaagcggcggtgggtctgcagccctggggccaagtggctttggtcccagtggagggtccggcacaaaacttcctaagaaggccacaaaaaccgctcctcccgcacttcccacagggtacgactccgaggaagaggaggaaagtcgtccaatgtcatatgatgagaagagacaactgtcgctggatattaataagttgccaggcgaaaaactggggagggtcgtgcacatcattcaggccagggagccgagtctgcgagactccaatccggaggagatcgaaattgactttgagaccttgaaaccgtctaccctgagggagcttgagaggtacgtcctgtcttgtttacgcaaaaagccgagaaagccatacaccatcaaaaaaccagtggggaaaactaaggaagaactagctctagagaagaagagagagctagaaaagcgcctacaagatgtgtccggacaacttaacagcactaaaaaacctccaaagaaagctaacgaaaagaccgagagctcaagtgctcaacaagtcgccgtaagtcggttatccgcctcgtcctcttcgtccgacagctccagctcttcgtctagttcatcctcaagcgataccagtgattcagattcggggtag

SEQ ID NO: 216196 - DNA, 891 bp, synthetic construct
  misc_feature 1..891: note = Description of Artificial Sequence: Synthetic coding sequence
  source 1..891: mol_type = other DNA
tagcgacccctgggagtgcagcagcccggtgccagacttcccggagaagggaatgcagggctgcttggtcttgggcctgaagctgcagcacccggaaagcgcataagaaagccaagcctgctatacgagggctttgaaagccctactatggcaagtgtgcccgctcttcagttgaccccagcaaatccaccccctcccgaagtatctaaccccaagaagccagggagggtgaccaatcagttgcaatacttacataaagtagtgatgaaagcattatggaagcaccagtttgcgtggcccttccgccagcccgtcgatgcagtcaagctgggtttgcccgactaccataaaatcattaagcaacccatggacatgggtactatcaaacgaagactagagaacaactattactgggctgcaagcgagtgcatgcaagacttcaacacaatgttcaccaactgttacatttataataaacctaccgacgatatcgtgctgatggcacagaccctagagaagatttttctacagaaggtggcctcaatgcctcaggaggagcaggaattggtggttactatcccaaaaaatagccacaaaaagggagcaaaactagccgcactacagggtagcgttactagcgctcaccaagtgcccgctgtttcatctgtgtcacatacggcgttatatacccctccacctgagatccctactaccgtgctcaatatccctcacccatccgtgatctcctcccccctattgaagtccctgcactctgctggaccaccactgctagcggtgacagccgctcccccagcccagcccttggccaaaaaaaagggcgtgaagcgtaaagcagacacaacaaccccaacacccactgccatactttag

SEQ ID NO: 216197 - DNA, 2406 bp, synthetic construct
  misc_feature 1..2406: note = Description of Artificial Sequence: Synthetic coding sequence
  source 1..2406: mol_type = other DNA
atgttgcagaacgtcacaccccacaacaaactgccgggagaagggaacgctggcctgctggggctgggcccagaggctgctgctcccggaaagagaattcgtaagcccagtctactgtacgaaggtttcgagtctccaaccatggcctccgtaccggcactgcaacttacaccagcaaaccctcctccccctgaagtctcaaaccctaagaagcctggtcgagtaactaaccagctccagtacctccacaaagtggtaatgaaagcgctgtggaagcaccagttcgcctggccttttcggcagccggttgacgctgttaagctggggctccccgattaccataagatcatcaaacagcccatggacatgggtacaatcaagaggagactggaaaataactattactgggccgcatctgaatgtatgcaggacttcaacacaatgtttacgaattgctacatttataacaaacccaccgacgacatagtcctgatggcgcagaccttagagaagattttcttacaaaaagttgccagcatgcctcaggaggaacaggaactcgtcgtgactatccctaaaaacagccataagaaaggagccaagttggccgcactccaggggagtgttacatctgcccaccaggtccctgccgtttcatctgtaagccacaccgccttgtacacccctccacccgagattcctaccactgtattcaacattcctcatccttcagtgatttcctctcccctcctgaagtcgctacacagtgctggacctccactgttggcggtcaccgcagccccaccggcacaaccgttggctaagaaaaaaggtgtaaagcgaaaggcagacacgacgacccccacccccactgccatcctggctcccggaagccccgctagtccgcctgggagtctcgagcccaaagctgctcgcttgccaccaatgcggagagaatccgggcgaccaatcaaaccacccagaaaggatcttcctgattctcaacaacagcaccaaagctcgaaaaagggcaagctgtctgagcagctgaagcactgcaatggcatattaaaagagctactgagcaagaagcacgcagcctatgcctggcctttttataaaccggttgacgcctccgccctcggtctgcacgattatcatgatatcattaagcaccctatggacctttctactgtgaaacgcaagatggagaatagagattatcgtgacgcacaggagtttgcagccgatgttcggctaatgtttagtaactgctataagtataaccctcccgaccacgacgttgtcgccatggccagaaagctacaagacgttttcgaatttcgatatgccaaaatgccagatgaacccctggaacccggtcccctgccagtgagcactgctatgcccccagggctcgccaagtcctcctctgagtcaagtagcgaggagtcttcgtcagagagtagctccgaggaagaagaggaggaggatgaggaggatgaagaggaggaggagagcgaaagctccgacagcgaggaggagcgggctcacagactagcggagttacaggaacagctaagggcagtgcacgagcagttggcagctttgagccaggggcctatcagcaagcccaagaggaagagagagaagaaggaaaagaaaaaaaaaaggaaggccgagaaacatcgcggacgtgccggtgccgatgaggacgacaaaggcccaagggcacccaggccgccacaacccaaaaaatcaaaaaaggccagcggttccgggggaggctcagcagctctgggaccatccggcttcggccctagcgggggtagtggaacgaaattaccaaagaaggccactaaaacagccccaccagccttgccgacaggctacgacagcgaggaagaggaagagtcacggccaatgagctacgacgaaaagcggcagctctccttggacatcaataagttacctggggaaaaactcggccgagtagtccacattatccaagcaagagagccatccctgagagactccaatcctgaggagattgagattgacttcgaaactttaaagccatccacgctcagggaactggaacggtacgtgctttcatgcctcaggaagaagccccgaaagccttataccatcaaaaagccagtgggcaaaaccaaggaagagctcgcactcgaaaaaaagcgggaactcgagaagaggctgcaggatgtgagtggccagctgaattcaacgaaaaagccccctaagaaggccaatgagaaaacagagagctcatctgcgcagcaggtggctgtatcgcggctctctgctagctccagcagttccgatagtagttcctctagttcctctagttctagcagcgacacgagcgatagtgattcaggttag

SEQ ID NO: 216198 - DNA, 1842 bp, synthetic construct
  misc_feature 1..1842: note = Description of Artificial Sequence: Synthetic coding sequence
  source 1..1842: mol_type = other DNA
atgctgcagaacgtcaccccgcacaacaaattacccggagagggcaatgccggattactgggtctgggacccgaggccgctgcaccgggtaaaaggattagaaagccaagcctgctgtatgaggggttcgagtcacccactatggcttccgttcctgcattgcagctgaccccagcaaacccgccacctccggaggttagcaatccgaagaagccaggaagagtcaccaatcagttgcagtacctgcacaaggtcgtcatgaaggccctgtggaagcatcagttcgcatggcccttccggcaacctgtcgatgccgtgaagctcggcctgcccgactaccacaagataattaagcagccaatggacatgggcaccattaaacgtcggttggaaaataattattactgggcagccagcgagtgcatgcaggacttcaataccatgttcaccaactgttatatctataataaacctacagatgatattgtgttgatggcccaaacactggaaaagatcttcctgcaaaaggtagctagcatgcctcaggaagaacaggagctggtggttaccatccccaagaatagtcacaaaaagggagccaagctcgcagccttgcaggggtcagttacttcagcccatcaggtgcccgctgtttcctctgtaagccacacggccctatacaccccaccacccgagatccctaccaccgtcctgaatatacctcatccctctgtcatttcttctcccttattgaaatcactgcactcagctggacccccactcttggccgtaaccgccgcaccacccgctcagccactggcgaaaaaaaagggcgtgaagcggaaggctgatacaaccacccctaccccaaccgcgatactcgctcctgggtccccagcttctccacctggatctctggagccgaaagccgctcggctgccgcctatgagacgtgaaagtggccgtccaattaagccccctcggaaggaccttcccgattcccagcagcagcatcagtcctccaagaagggcaaactgagtgaacagttgaaacattgcaatgggattcttaaagaactactgtccaaaaaacatgcagcttacgcgtggccattctacaagcccgtggacgcttctgccctgggccttcatgactatcacgatatcataaagcatccgatggatctgtccactgtcaaacgcaagatggagaatcgggattacagggacgctcaggaatttgccgcagacgtcaggttgatgttctccaactgttacaagtacaatcctcctgatcatgacgtggtcgctatggcacgaaaacttcaagatgtgtttgagttccgatacgcaaaaatgccagacgagcccctggaacctggccctctacccgtttctacagctatgccacctggccttgcaaagagtagctccgaatcttcatccgaagaaagctcgtcggagtcctctagtgaagaagaggaggaggaagatgaggaggacgaagaagaagaggagtctgaaagctccgacagcgaagaggagcgcgctcaccgccttgcggagcttcaagagcagctgcgtgccgtgcatgagcagctggctgctctctctcagggcccaataagcaagccgaagaggaagcgggaaaagaaagagaaaaagaagaagcgcaaggccgagaaacaccgcggacgcgcaggcgctgacgaagatgataaaggtcctcgcgctcctcggcctccacagcccaagaaaagtaaaaaggcctcgggatcaggaggcggttcggcagcattgggtccttccggattcgggccatccggcggaagcggcacctag

SEQ ID NO: 216199 - DNA, 1842 bp, synthetic construct
  misc_feature 1..1842: note = Description of Artificial Sequence: Synthetic coding sequence
  source 1..1842: mol_type = other DNA
atgctgcagaatgttaccccgcacaataagctgccaggcgaagggaacgctggcctactgggcctggggccagaagccgctgcacccggtaaaagaataagaaaaccatctctgctttatgaagggtttgaatctcccacaatggcttccgtgcctgcactacagttgactcccgctaatcccccaccaccagaggtctctaaccctaagaagcccggacgcgttacaaatcagctacagtatctgcacaaggtggttatgaaggctctgtggaaacatcagtttgcctggccttttcgtcagcctgtggacgccgttaaactcggtttgcctgattaccacaagattattaaacagcccatggacatggggacaataaagcggagacttgaaaacaactattactgggccgcaagtgagtgcatgcaagattttaataccatgtttaccaattgttatatttacaacaaaccaacagacgacatagtcctgatggctcaaacccttgagaaaatcttcctgcagaaggtagcaagcatgccccaagaagaacaggaactggtggtgacaattccaaaaaacagccacaaaaagggcgctaagttagctgccttgcaaggatccgtgacaagtgcccatcaggtgcccgcagtttcatcagtctcccacactgcactttacactccacctcccgagattcccaccacagtgctgaatatcccacatcccagcgtgatctcctccccattgcttaagtcacttcactctgcaggacctcccctgctggccgttactgccgctccccctgctcagccacttgcaaaaaagaagggcgtaaaacgaaaggccgacacaactaccccaacccctaccgccatccttgcacccggttcccctgcaagcccaccagggtcactcgagcccaaggccgcaagactaccccctatgcgcagggaaagcggtaggcctattaaacccccacggaaggacctgcctgattcccagcaacagcaccagtcaagtaagaagggaaaattgagtgaacagctgaagcattgtaatggcatcctgaaggaattgctctccaagaaacacgcggcatatgcatggccattttataaaccggtggatgcatccgccctgggcctccacgactatcatgacataatcaagcaccccatggatttgagcacggtcaagaggaagatggagaaccgtgattatcgggatgcccaggaatttgctgccgatgtgcggcttatgttttcgaactgctacaaatacaatccacctgatcacgatgtggtcgcaatggcacgcaagctgcaggacgtgttcgagtttcggtatgcaaaaatgccagacgagcctcttgaacctggccctctcccagtgtcaacagcaatgccccctggcctcgccaagagctcctcagaatctagctccgaggaatcatccagtgagagcagttctgaagaagaagaagaggaggatgaggaagacgaagaagaggaggagagcgagagctctgattctgaggaggaacgcgctcataggcttgctgaactccaggagcagttgcgggcagtacatgaacaactggccgcattgagccagggaccgatttccaagcccaaaagaaaacgcgaaaaaaaggagaagaagaagaagcgcaaagccgaaaagcaccgagggagagctggggcagatgaggacgacaaaggtcctagggcgcctcgtcctcctcagcccaagaaatcaaagaaggcttcagggtccggcggtggatcagcagctctcggcccaagtgggttcggccctagcgggggtagtggcacttag

SEQ ID NO: 216200 - DNA, 987 bp, synthetic construct
  misc_feature 1..987: note = Description of Artificial Sequence: Synthetic coding sequence
  source 1..987: mol_type = other DNA
tgagccaagagcagttcagagtcatcctcagaggagagctcctccgaaagttcctctgaagaggaagaagaagaggatgaagacgaagaagaagaggaaagcgagagctcagattctgaagaggagagagctcatagactcgcagagctgcaggaacagctgcgggctgtgcatgagcagctcgccgctctgtctcagggccctatcagtaaacccaagagaaagagggagaaaaaagagaagaagaagaagagaaaggcagagaaacaccggggaagagccggtgccgatgaggatgacaaaggtccacgagcccctcggccaccacagccaaagaagtccaagaaggccagtggctccggaggtggcagcgccgcactggggcctagtggcttcggtccatctggagggagtggtacaaagttaccgaagaaagccactaagaccgctccacccgcacttcccacaggatacgattccgaagaggaggaggagtccagacccatgtcttacgatgaaaagagacagctttccctcgatataaacaaattgccaggcgagaagctgggaagagtggtacatatcattcaggctcgggagccctcattgcgtgatagcaaccccgaggagatcgagatcgacttcgagaccctgaagccctctaccctcagagaattggaacgctacgtgctcagctgccttcgcaagaagcctcggaaaccctataccatcaagaagccagtaggaaaaactaaggaggaattggctctggagaagaagagggagctcgaaaagcggctgcaggacgtgagcggccagctcaatagtaccaagaagccacctaagaaggctaatgagaagactgaatctagctcagcccagcaggttgctgtcagtcgactttctgcaagctcaagctccagtgacagctcgtcctcgtcctcaagcagctcatccagtgacaccagtgatagcgatagcggatag

SEQ ID NO: 216201 - DNA, 1947 bp, synthetic construct
  misc_feature 1..1947: note = Description of Artificial Sequence: Synthetic coding sequence
  source 1..1947: mol_type = other DNA
atgctgcagaacgtgacaccacacaataagctgcctggcgaggggaacgccggacttctcggccttggtccagaggccgcagctccaggtaaacggattcgcaaaccctcactgctgtatgagggctttgaatcgccgacaatggcctccgtgccagccctgcagctgacacccgctaatccacctcctcccgaggtgtccaaccctaaaaaaccaggaagagtgactaaccaactgcagtacctgcataaggtcgttatgaaagctctgtggaaacatcaattcgcctggccattccgtcagccagtggatgccgtgaagcttgggctgccagactaccataaaataatcaagcaacccatggatatgggtacgataaagaggcggttagagaataattactactgggcagcttccgagtgcatgcaggattttaacaccatgttcaccaattgctatatctacaacaagcccaccgatgatattgtccttatggcacagacactcgagaaaatatttctccagaaggtggcctctatgccacaggaggagcaagaattggtggtgactatccccaagaacagccacaagaaaggcgcaaagcttgcagcactgcagggatccgtaacgagcgcacaccaggtacccgctgtcagcagtgtttcccataccgcactctacactccacctcctgaaattcccacaacagtgttgaacattccccacccctccgtcatatcgtcccccctgctgaagtctctccattcagctggccctccactgctggcagttactgccgctccccctgcgcagccgctcgctaagaaaaaaggggtcaaaagaaaagctgatacaaccacccctactccaaccgcgattctcgcaccgggatcccctgcttccccacctggatcattagaacccaaggccgctaggctgccacctatgcggagagagtcaggaaggccaatcaaaccccctcggaaggacctcccagattcacagcaacagcatcaatcgagcaaaaagggaaaattgtctgagcagctgaagcactgtaatggcatactgaaggagctgctgagtaaaaaacatgctgcgtacgcctggccattttacaaacccgtcgacgccagcgctctaggccttcacgattaccatgatatcatcaagcatccaatggacctaagtacagtcaaaagaaagatggagaatagagactaccgggacgcccaggaattcgccgcagatgtgcgacttatgtttagcaactgttataagtacaaccctccagatcatgacgtggtggccatggctagaaaactccaggacgtctttgagttccggtacgccaagatgccggatgaacctcttgagcccggacctttgcccgtctcaactgccatgcctccaggactagctaagtcctcatctgaaagcagttcagaggaatcatcaagcgagtcaagttccgaagaagaagaggaggaggacgaagaggacgaggaagaggaagaatcagagtcctccgacagcgaagaggagcgcgctcaccgcttggctgagctccaggaacagctccgcgcagttcatgagcagctggctgctctgtctcaagggcctattagtaagcccaagcgaaagcgagagaagaaagagaaaaagaagaaacggaaagcagaaaagcatcggggtagagctggcgctgacgaggacgacaagggaccccgtgctcccagacctcctcaacctaaaaagtccaagaaagcttcagggtctggcggaggaagtgcggctctgggaccttccgggttcggtccttccggaggatccggaacaaaactccaggccggtgttcagtggcgcgatctgggcctccttcaaccacctttactcggatttaaaaggtttagctgtctgtcccttccgtctagccaggattactag

SEQ ID NO: 216202 - DNA, 2424 bp, synthetic construct
  misc_feature 1..2424: note = Description of Artificial Sequence: Synthetic coding sequence
  source 1..2424: mol_type = other DNA
taaaacggaggtgggggatcagccaccgcgaggggcggagagtacagactccccggtgaggggaatgctggcctgctgggcctcggtcccgaagccgctgcccctgggaaaaggatccgcaaaccttcgctgctttacgagggcttcgagtcaccaaccatggcctctgtgcccgcactgcagttgacaccagccaatccaccgccacctgaggtgtctaatcccaagaaacccggtcgtgtgacaaatcaacttcagtacttgcacaaagtcgtaatgaaggctctgtggaagcatcagtttgcctggccatttcggcagcccgtggatgcagtgaagctggggcttcctgattaccataaaattattaaacagccaatggatatgggtaccataaaaagacgcctggagaataattattactgggccgctagtgagtgcatgcaggactttaacaccatgttcaccaattgctatatatacaacaaacctacagacgatattgtactaatggcacagaccctcgagaaaatcttcctgcagaaagtggccagtatgccacaggaagaacaggagttagtcgttactattccaaaaaattcacacaaaaaaggagccaagctggccgcattgcagggctctgttactagcgcccatcaggtgcccgctgtatcttctgtcagtcatacagccctctacactccccctccggaaatcccaaccaccgtctttaacattccacatccgagcgtgataagcagccccttgctgaaatctctccactctgcgggacctcccttgttagctgttactgcggcaccccctgcccagcctctcgccaaaaagaaaggggttaaaagaaaggccgacaccaccactccgacacccactgctattctcgcccctggctcaccggcaagcccccctggaagtctagagccgaaggcagccagactgccccctatgaggagagaaagcggcagacccattaagcctccacggaaagacctgcctgacagccagcaacagcaccaatccagcaaaaaagggaagttatccgagcagctgaaacactgtaacgggatcctcaaagagctcctttctaaaaaacacgctgcgtatgcttggcctttctacaaaccagtggacgctagcgccctaggcctacacgattaccacgacattatcaagcaccctatggacctgtcaacagtgaaaagaaaaatggaaaaccgcgactacagggacgcccaggaatttgcggctgacgttcgtctcatgttcagcaattgttataagtacaatccccctgaccacgacgtggtggcaatggctcgcaaactgcaggacgtgttcgagttccgatacgctaagatgccagacgagcccctggagcctgggccattgcctgtgagcacagccatgccccctgggctcgcgaagtctagttccgagtcatcctctgaggagagcagcagcgagagctcatccgaggaagaggaagaggaggacgaggaggacgaggaggaagaggaatcagagagttcagactcggaagaggagcgagctcaccggctcgctgagttgcaggagcaactgagggccgtgcacgagcagctcgccgcactgagtcagggccctatttcgaagccaaagcgtaagagggagaaaaaggagaagaagaaaaaacggaaggccgagaaacaccgcggaagggctggcgctgacgaagacgataaaggcccaagagccccacgccctcctcagccaaagaaaagcaagaaggccagcggtagtggcggtggctcagccgctctggggccaagcgggtttggcccatccggagggtccgggactaaactccctaagaaggccactaagacagctccgccagcactgcctacaggatacgatagtgaggaggaggaagaatccaggccgatgagttacgatgagaagcgccaactgagcctcgatattaataagcttcccggagaaaagctggggcgagtggttcacatcatccaagccagagagccatctctgcgggactccaatcctgaggaaattgaaattgactttgagaccctcaagccaagcacactgagggaacttgagcggtatgtgctctcttgcctgagaaaaaagccacgcaagccctataccatcaaaaaaccagtcgggaagacgaaagaggaactggcgctagagaagaagcgcgaactcgaaaaacggctccaggatgtgtccggccagttgaatagcactaaaaaacctcctaagaaggccaacgaaaaaacagagagctccagtgcccagcaggtcgctgtcagcaggctgtctgcatccagcagttcttctgactcatcaagtagttccagttcttcatcgtcatccgacactagcgactcagatagtggatag

SEQ ID NO: 216203 - DNA, 891 bp, synthetic construct
  misc_feature 1..891: note = Description of Artificial Sequence: Synthetic coding sequence
  source 1..891: mol_type = other DNA
tagcgccctttgggcgtccaacaacccggagcaaggctgcccggagaaggaaacgcaggcctcttggggctaggtcctgaggctgccgctccaggcaagcgcattcggaagccttccctgctctacgaagggttcgaaagccctactatggcctcagttcccgcactgcagctgacccccgcaaatccaccaccccctgaggtttctaatcccaaaaaaccaggcagagtcacgaaccagctccaatatttgcataaggtggtgatgaaggctctgtggaaacaccagttcgcatggcctttccggcagcccgttgacgctgtgaagctaggcttgcctgattaccataagatcataaaacagcctatggatatggggacaataaagagacggttagagaataactactactgggccgcaagtgaatgcatgcaggactttaacactatgttcacgaattgctacatttataacaaaccaaccgatgatatcgtactcatggcccagaccctagagaaaattttcctgcaaaaagtggccagcatgccgcaggaagaacaggagctcgtggtgactatccctaagaattcgcacaagaagggcgctaaactcgccgcactgcaagggagcgtgacctccgcgcaccaggtcccggctgtttcttcggtgagccacaccgccctgtacaccccaccaccagagatccctaccacagttttcaacatcccgcacccttctgtgatttcgagtcctttgttaaaaagcctgcacagcgcaggcccaccacttcttgccgtcacagccgcaccccctgctcagcccctcgcgaaaaaaaaaggcgttaagcggaaggcagataccaccactccaacacccaccgccatcctgtag

SEQ ID NO: 216204 - DNA, 2265 bp, synthetic construct
  misc_feature 1..2265: note = Description of Artificial Sequence: Synthetic coding sequence
  source 1..2265: mol_type = other DNA
atggcttcagtccccgcacttcagttaacgccagctaatcccccacccccagaggtgtccaatccgaaaaaaccgggacgcgttaccaaccagcttcaatacttacacaaggtggtcatgaaggctttatggaaacaccagtttgcttggccattcagacaacctgtggatgcggttaagttgggcctgccagattatcataaaatcatcaagcaaccaatggacatgggcactatcaaacgacgccttgagaacaactactattgggccgcaagcgaatgtatgcaggattttaataccatgttcactaattgttatatttataataagcctactgacgatatcgtcctaatggctcagacactagagaaaatatttctccagaaagtggcctccatgccacaggaagagcaagagctggtagttaccatccctaagaacagtcacaagaagggagccaagttggccgcactgcaaggctcagtgacctccgctcaccaggtgcccgcagtgagttcagtctcacacaccgcgctctatacgccccctcccgaaatcccaaccaccgtgctgaacatcccccacccctccgtcataagtagtcccttactcaaatccttacattctgccggtccgccactgctggccgtcacagctgcccctccagcacaacctttagcaaaaaaaaaaggagttaagaggaaggcggacacaaccacccccacacccaccgcgattctggcccctggatcacctgcctcaccgcctggatcactcgagccgaaggcagccagactcccaccaatgaggagggaatcaggcaggcccattaagcctccccgtaaggacttacctgactcacaacagcagcatcaatcatccaagaagggaaagctgtcagagcaactgaaacattgcaatgggatccttaaagagctactgtctaaaaaacacgccgcttacgcctggcccttctacaaacccgtggatgccagcgccctcgggttgcacgattaccacgatataattaaacatccaatggacctgtctacagtgaagcgcaaaatggaaaatcgagattatagggacgcacaggagttcgcagccgacgtcagactgatgttttcaaattgttacaaatataaccctccagatcacgatgtagtggccatggcccgaaagctccaggatgtgttcgaatttagatacgccaaaatgcctgatgaacctctggagcctggaccactgccggtgtctacggccatgccccctggtcttgcaaagagttcctctgagagcagctccgaggagagcagcagtgaatcctcttctgaggaagaggaggaggaagacgaggaagatgaggaggaggaggaatctgaatcgagtgacagcgaagaggagagagcccatagactggccgagctgcaggagcagttgcgcgcagtgcacgaacagctggcagcgctttcccagggcccaataagcaagcccaagcggaaacgcgagaaaaaagagaagaaaaaaaagcggaaggcagaaaaacatcggggaagggcaggagctgacgaggacgacaaaggcccaagggcacccaggcccccacaaccaaaaaagagcaaaaaggctagtggaagtgggggaggctctgctgcacttgggccttctggtttcggtccatccggtggcagcggcactaagctccccaaaaaagccactaagacagcgccacccgctctccctaccgggtacgacagcgaagaagaggaagaaagtcgccctatgtcctatgacgaaaaacgtcagctttccctggacattaacaaactgcctggcgaaaaacttggcagagtcgtccacattatccaggccagggagccatcattgagagattccaaccccgaagaaattgagattgactttgaaaccttgaagcctagcactttgcgcgaactggagagatacgtactgtcttgcctcagaaagaagccaaggaagccatacacaattaagaagcccgtgggtaagactaaagaagagcttgccttggagaaaaagcgggaactggagaagcgcttacaggacgtgtccggacaattgaatagcacaaagaaacccccaaaaaaagctaacgaaaagacggagagttctagcgcccaacaggtagccgtgagccgtctctctgccagttcgtccagctccgactcatccagcagttcttcctcctcgagtagctctgacacctcagatagtgattccggatag

SEQ ID NO: 216205 - DNA, 2406 bp, synthetic construct
  misc_feature 1..2406: note = Description of Artificial Sequence: Synthetic coding sequence
  source 1..2406: mol_type = other DNA
atgctgcagaacgtgacgcctcacaataagcttcccggtgagggtaacgctggactgttaggtttgggacccgaggctgctgcgcctggcaaacgcattagaaaaccctccctgctgtacgagggattcgaatcgcccaccatggccagtgtgcccgctctgcaactgacacctgccaaccccccacctccagaagtttccaatcctaagaaacccggacgggtgactaatcagctgcagtacctgcataaggtggtaatgaaggccctctggaagcaccagttcgcatggccattcagacagcctgtggacgctgtcaaattgggcctgcccgactaccacaaaataatcaaacagcctatggacatggggaccataaaaaggcgcctggaaaataattattattgggctgccagcgaatgtatgcaggacttcaacaccatgtttaccaactgctacatttataacaagcctacagatgacattgtcctgatggcgcagacgttagaaaagatttttctgcagaaggtcgcatccatgccccaggaggaacaagaattggtggttacaatcccgaaaaatagccacaagaagggggcaaaactggctgcactgcagggtagcgtcacgagtgctcatcaagtcccagccgtgtctagcgtgagccacaccgctctgtacacccctccacctgaaattccaactaccgtcctgaacattccacacccgagcgtcatctcttccccactcctcaaatccttacacagcgcgggtccaccactccttgctgtcacagcagctccaccagcccaaccactggccaaaaaaaaaggcgtgaaacgaaaggccgataccaccacaccaactccgactgctatcctggcaccgggaagtcctgctagccctcccggaagcctggagcccaaggcagcccgtctgcctccaatgagaagagagtccggccgaccaattaagcctcctcgaaaagatcttccagacagccaacagcaacaccagagtagtaagaaagggaaactgagcgagcagctgaagcattgcaacggaatactaaaggaactgttgtcgaagaagcacgccgcttatgcctggcctttctataagccggtagacgccagcgccctgggcctgcacgattaccacgatattataaaacaccccatggatctctccaccgtgaagcgtaaaatggagaatcgtgactaccgggacgctcaggaattcgccgcagatgtacggcttatgttctccaactgctataaatacaatccaccggatcacgacgtcgtggccatggccagaaagctgcaggacgtcttcgagtttcgctatgctaagatgccagacgagccgttggagcctggcccattgcctgtctcaacagccatgcctcccggactggctaagagttcctcggaatcatcgtctgaagagtcttcgtccgaaagcagctcagaggaagaagaggaagaggacgaagaagatgaggaagaagaagaatcggagagcagtgacagtgaggaggagcgggcacatcgcctggccgagctgcaagagcaactccgggctgtgcacgagcagctcgctgccctttcccaggggccaatctccaaacctaaaagaaagcgcgagaaaaaagaaaaaaaaaaaaagaggaaggctgagaaacaccggggacgggctggagctgatgaggatgacaaaggacctagggcacccagacctccacaacctaagaagagcaaaaaggccagtggctctggcggtggctctgccgcactaggtcctagcgggttcgggccaagcgggggttctggaactaagcttccgaaaaaggctaccaagaccgcaccacccgctttgccgaccgggtacgatagcgaagaagaagaagaaagccggcctatgtcttatgacgagaaaaggcagctgagcctagatataaataagctccccggtgaaaagctgggcagggtggtgcacatcatccaggctcgggagccctccctccgcgacagcaaccccgaggagattgagattgactttgagactctcaaaccaagcacgctgcgcgaactggaacggtacgttctgagttgcctgcggaagaaacctcgcaagccttataccatcaaaaaacctgtcggcaagacaaaggaagagctggccctagagaagaagcgtgagttggagaaaaggctccaggacgtgagcggtcagctcaactctaccaagaagcctcctaagaaagctaacgaaaaaaccgagagcagctctgcacagcaggtggcagtgagtaggctgtccgccagctcttcctctagcgatagctccagttcctcctcatcatcatcctcgtctgatacatctgattctgactccggctag

SEQ ID NO: 216206 - DNA, 2424 bp, synthetic construct
  misc_feature 1..2424: note = Description of Artificial Sequence: Synthetic coding sequence
  source 1..2424: mol_type = other DNA
tgaaatggagggggtggctcggcaactgctcggggaggtgagtaccggctccctggtgaaggtaatgccggattgctgggactcggtccagaggccgcagctcccggaaaacgcatcaggaagccaagtctcctgtatgagggattcgaatccccaaccatggctagcgtgcctgcactccagctgaccccagccaaccccccaccacctgaagtctcaaaccctaagaagcccggaagggtgaccaatcagctccagtatttacataaggttgttatgaaagcactctggaagcatcagtttgcctggcctttcaggcagcccgtagacgcggtgaagctaggtctcccagattatcacaaaattattaaacagccaatggatatgggcaccatcaaacgtaggctagaaaacaactattactgggccgcttccgaatgtatgcaagactttaacactatgttcacaaattgctacatctacaataagcctactgacgacattgttttgatggcccagaccctcgagaaaatcttcctgcagaaggttgcttctatgccacaagaggagcaagagctcgtggtgactataccaaaaaatagtcataaaaaaggcgctaagcttgcagccctgcaggggtcagtgacttcagcccaccaggtgcccgctgtgtcctctgtcagtcacactgctctctacacccctcctccagaaatacccaccacagttttaaacataccacacccgtcagttatatctagtccgttgctgaaatccttacatagtgccggtcctcccttactagcagtgactgccgctccccctgcccagcctcttgcaaaaaaaaagggtgtgaagaggaaggcggatacaacaacccctacacccaccgcaattctcgcgccagggtcacctgcctctccgcctggttctcttgagcctaaggccgcacgccttccacccatgcgtcgcgaatccggcagaccaatcaagccccctaggaaggatctgcctgatagtcagcagcagcatcagagcagcaaaaaagggaaactgtcagagcaactgaagcactgtaacgggatactgaaggaattgctaagcaaaaaacacgccgcttacgcctggcctttttataagcctgttgatgcctctgccctcggcctccatgactaccacgacattattaaacatcctatggatcttagcacggtcaagcgtaagatggagaatcgggactatcgagacgctcaggaatttgctgctgacgtgagactgatgttcagtaactgctataagtataacccccctgaccacgatgtggtcgccatggcacgaaaattgcaggatgtctttgagtttagatatgctaaaatgcctgatgagcccctggaacctggccctttgccagtgtccaccgccatgcctccaggcctggccaagtcatcgtctgaaagcagttccgaagagagctctagcgagagctcctccgaagaggaagaagaagaagacgaggaggatgaagaagaagaggagtctgagtcctccgacagtgaggaggaacgcgcacaccgccttgccgaactgcaggagcagctcagggccgtgcacgagcaacttgcagcccttagccagggacctatcagtaaaccaaaacggaagagagaaaagaaagagaaaaagaaaaaacggaaggctgaaaaacatagggggagagccggagccgacgaagacgataaagggcctcgagccccacgaccacctcagccaaaaaaatctaagaaggccagcgggtcgggtggcggaagcgctgccctgggaccaagcgggttcgggccttcaggtgggtccggcacaaaactgccgaagaaggctaccaaaacagcaccacccgctctgccaactgggtacgatagtgaggaggaggaagagagtcgccctatgagctatgatgagaagcgacaactgtcattagacattaacaagttaccaggcgaaaagttaggaagagtcgtacacattatccaggcacgtgaacccagtttgagggattcgaaccctgaagagatcgagatcgactttgagaccctgaagccatccactttgagggagctcgaaagatacgttttatcttgtctgcgcaaaaagccgaggaagccatacacaataaagaagcccgtggggaagacaaaggaggagcttgccctcgagaagaagagagagctcgaaaagaggcttcaggacgtttctggccagctcaactctactaaaaagccgcctaaaaaagctaatgagaagactgaatcatcctccgctcagcaggtggctgtcagcagattaagtgctagttcctcttcgtcagacagctccagctcctcttctagttcatcatcctcagacacaagcgacagcgattcagggtag

SEQ ID NO: 216207 - DNA, 1092 bp, synthetic construct
  misc_feature 1..1092: note = Description of Artificial Sequence: Synthetic coding sequence
  source 1..1092: mol_type = other DNA
tgagcaaagtcctcctcagaaagcagttccgaagaaagcagctctgagagctcgtccgaggaggaagaagaagaagatgaggacgaagaggaagaggagtccgagtcaagcgattccgaagaagaaagagcccatagactcgctgaacttcaggagcaactgagagccgtgcacgagcagctggccgcactttcccaagggccaatctccaagccgaaacggaagagggaaaaaaaggaaaagaagaaaaagcggaaagccgaaaagcaccgagggagagctggtgccgatgaggatgacaagggccctcgggctccaaggccgcctcagcctaaaaagtcaaagaaggctagcggttctggtggcggaagcgcagccttaggcccatctggctttggcccatctggcggaagtgggaccaagctgcaagctggggtccagtggcgagatctgggtcttcttcagcccccactgctggggttcaagcggttttcctgccttagtttaccatcctctcaggactatcggctaccgaagaaggcaacaaagaccgctccacccgcactgccaactggctatgactctgaggaggaggaagaaagtcggccaatgagttatgacgaaaaacggcagctttcactcgacattaataagctgcccggagaaaaactggggagggtcgtacatatcatccaggccagggagcctagtctgagggatagcaatccagaggaaatcgagatcgatttcgagacactcaaacctagcactctccgggagctggagaggtatgtgttgtcctgtcttcgcaagaagccgcgtaagccctacactattaaaaagcccgtcggaaaaacaaaagaagagttggcactagagaaaaagcgagagctggagaaacgcttgcaagacgtgtcaggccagttgaactccaccaaaaagccaccaaagaaggctaacgaaaaaaccgagtcaagctccgcgcagcaggtggcggtgtctcgcctcagcgcaagctcatctagcagtgattcatcttctagctcctcgtcgtcaagtagttccgacacgagcgatagcgattccggctag

SEQ ID NO: 216208 - DNA, 2511 bp, synthetic construct
  misc_feature 1..2511: note = Description of Artificial Sequence: Synthetic coding sequence
  source 1..2511: mol_type = other DNA
atgttacagaacgtaacaccgcataataaactgcccggagaagggaatgcagggcttctagggctggggccagaggctgccgctccaggtaaacgcatccggaaaccttccttattgtacgagggattcgagagccccacaatggcaagtgtgccagccctccagctgactccagcgaatccccctcctccagaggtttcaaatcccaaaaagcctggacgggtgactaatcagctgcagtacctgcacaaggtagttatgaaggccctttggaagcaccaatttgcttggccctttcggcaacctgtggacgctgtaaagttgggcctgccagattaccataaaatcattaaacagccaatggacatgggcactatcaagcggaggctcgaaaacaattattattgggcagcctctgaatgtatgcaggactttaataccatgttcaccaactgctatatctataataaaccaaccgacgacatcgtcctgatggcccagaccttggaaaaaatttttcttcagaaagtcgcctcgatgcctcaagaggagcaggagttagtagtaaccatacccaagaatagtcacaaaaagggcgcaaagctggcagccttgcagggttccgtcaccagcgcccaccaggtgcccgctgtgagcagcgtctcgcatacagctctatacacacctcctcccgaaattccgactacagttctgaatatcccccacccatctgtgatttcatcaccgctcctgaagtcattgcatagcgccggaccaccactgttggctgtgaccgccgctccccctgctcagcctctggcaaaaaagaaaggagtcaagcgcaaggcagatacgaccacccctaccccgaccgccattctagcacccggaagtccggcttctccgcctggtagtctcgaaccaaaagccgcacgcctgcctcctatgaggagagagagtgggcgacctatcaaacccccacgtaaagaccttcccgactctcagcagcagcatcagtcctccaagaaaggaaaactcagcgagcagcttaagcactgtaacggaatcttaaaggaactgctgtccaaaaagcatgccgcatatgcctggcctttttacaaaccagtcgatgcatctgcactcggactccatgattaccacgacatcatcaagcacccaatggacctctcgactgtcaaacgcaagatggaaaacagggactatcgggatgcgcaggagttcgctgcagacgtccggctgatgttcagcaattgctataaatacaatcccccagaccacgacgtggtggccatggctagaaagttgcaagatgtgtttgaattccggtacgcaaagatgccagatgagcctctggagcctggcccactcccagtttccacggccatgccccctggcttagcaaagtcgtcatcagagtcctcatccgaagaaagctcgtctgaatcgagcagtgaggaggaagaggaagaggatgaagaggacgaagaagaggaggaatcagaatcatctgactctgaagaggagcgcgctcatcgtcttgcggaacttcaagaacagctccgtgcagtacacgagcagctagctgcactgtcacaaggaccgattagtaagccgaagcgcaagagagagaagaaggagaaaaaaaaaaaacgtaaagccgagaagcataggggaagggccggagctgatgaggacgacaaaggacccagagctcccagaccacctcagcccaaaaagtctaaaaaggcatccggaagcggcggtggctcagcagccctgggcccaagtggatttggacccagcggaggcagtggaaccaaactccaggctggtgtgcagtggagagacctcggcctcttgcagcccccactcctgggattcaagaggttcagctgtctgtctcttccgagctctcaagactatcggctcccaaagaaggccactaagaccgcccctccggctctgcctactgggtacgacagcgaggaagaggaggagtccagacctatgtcatacgacgagaagcgacagctctcccttgacatcaacaaacttccaggggagaaactgggtagggtcgtccacatcattcaagctagggagccgtcattgagagatagtaatcccgaagagatcgaaatagacttcgagactctgaagccctctacacttagagagttggaaaggtatgtactgtcttgcttgcggaaaaaaccccgtaagccctacaccatcaaaaagccagtggggaaaacaaaagaggaactggccctggagaagaaacgggagcttgagaaacgactccaggacgtctctggacagctgaattctaccaaaaagccccctaaaaaggctaatgaaaaaaccgagagttcgtctgcccaacaagtggctgtgtccaggctgagcgcatcttcctccagtagcgactcatccagctccagctcaagtagctcatccagcgacacatcagactccgacagcggatag

SEQ ID NO: 216209 - DNA, 2046 bp, synthetic construct
  misc_feature 1..2046: note = Description of Artificial Sequence: Synthetic coding sequence
  source 1..2046: mol_type = other DNA
atggacatgggaactatcaagcgtaggctggaaaacaactactattgggccgcttccgagtgcatgcaggacttcaatactatgttcactaattgttacatctataataagcctacggatgatatagttttaatggcccagactctagagaagatttttcttcagaaggttgcctccatgccccaggaagagcaagagctggtggtcactataccgaagaactcacacaagaagggggctaaattagctgctcttcaggggtctgtcacatctgctcatcaagtcccagcggtgagcagtgtctcccacacagcactgtacacccccccacctgaaatccctactactgtcctgaacatccctcatccttctgttatttccagtccactcctcaagtcccttcactcggccggacctccactcttggctgtgactgctgcccctcccgcacagccgttagccaaaaaaaagggcgtgaaaaggaaggcagacactaccacccccactcccactgctatcttagccccaggatctccagcaagccccccaggctcgctcgaaccaaaggccgctaggcttcctccaatgagaagggagtccggtcgccctattaaacccccacggaaagacctcccagattcccagcagcaacaccagtctagtaaaaaaggaaaactttcagaacaacttaaacattgtaatggtatactgaaggaactactcagcaaaaagcatgccgcttacgcgtggcccttttacaagcctgtggacgcaagtgccctgggtctgcatgactaccacgacataattaaacatcctatggacctgagcacagtgaagagaaagatggagaaccgggattacagagacgcacaagagttcgctgcagacgtgcggctgatgttctcgaattgctacaagtataatcccccagaccacgatgtagtggccatggcccgaaaacttcaggacgttttcgaatttaggtatgctaagatgcccgacgagcccctggagcccggacccctgcctgtgtcaacagcaatgcctcctggcctagccaaatcatccagtgagtcttcttctgaagagtcttcatcggaatctagctccgaggaagaggaggaagaggacgaggaggatgaggaggaggaggagtcagagtcctccgattccgaagaagagagagcccaccgcttagccgaactgcaggaacagctgcgggcagtacatgagcagctggctgcactgtcccagggacctatctcgaagcctaagcgcaagagggagaagaaagaaaagaaaaagaagcgtaaggctgagaagcatcggggtagggccggagctgacgaagacgataaaggtcctagggccccacggcctccacaacctaagaagtccaagaaagctagcgggtcgggaggagggagtgcagctctgggaccctctgggtttggaccctccggaggttcggggaccaaacttccaaaaaaagcgacaaaaacagctcccccagcactgcccactggctacgattcagaagaagaagaagagtcacgtcccatgtcctacgatgaaaaacggcagttaagtctggatattaataaactgccaggagaaaaactaggtcgggttgttcacatcattcaggccagggagccttcccttcgggattcaaatcctgaggaaatagagatcgatttcgagacactgaagccctccacattacgtgagctggagaggtacgtgctgtcatgtctgcggaaaaaacccaggaagccttatactattaaaaaaccggtgggtaaaacgaaagaggagctggctctggagaagaagcgtgagctcgaaaagagactgcaggacgtttccggacaactaaatagcactaagaagcccccaaaaaaggccaacgaaaagacagagtcttcatcggcccagcaagtggctgtcagtagactatctgcttcctctagttcatcagactcctccagttctagctctagtagcagcagcagtgacacaagcgactcggactcagggtag

SEQ ID NO: 216210 - DNA, 2424 bp, synthetic construct
  misc_feature 1..2424: note = Description of Artificial Sequence: Synthetic coding sequence
  source 1..2424: mol_type = other DNA
taaaatggaggagggggaagcgccacggcccgaggcggagaatatcggctgccgggagaaggtaatgcgggacttctgggtctggggccagaagctgccgctcctgggaaacgaattagaaagccatccctcttatatgaaggttttgaaagtcccacaatggcctccgtgcctgccttgcagctcaccccagccaacccccctccccctgaggtctctaatcctaaaaagcctggcagggtcaccaatcagctgcagtacctgcataaggtggttatgaaagccctctggaagcaccagttcgcatggccatttagacaaccggtggatgcagtcaagcttggtctgcctgattaccataagataatcaagcaaccaatggatatgggtaccattaagagacggctggaaaacaattattattgggcggcatcagaatgcatgcaggattttaacaccatgtttacaaattgttacatttataacaagcccacagatgatatagttctcatggcacagaccctggagaaaattttcctgcaaaaggtggcgtccatgccccaggaggagcaggaactggtagtaacaatacccaagaatagccacaaaaagggggctaaacttgcggcactgcagggctctgtgacatccgctcatcaggtgccagccgtgagctctgtctcacacactgccttgtatactccaccccctgaaattccgacaactgtgctgaacatcccacatccctccgtgatctcatccccccttctgaaatccctgcattccgccggtcctccgctcctagccgtcaccgctgcccctcctgcgcagccactggccaagaaaaagggcgtgaaacgtaaggccgacacaacaacacctacccccacggcgattctggcgcctggatcaccagcttctcctccgggatccctggaaccaaaggccgctagattgccaccaatgcgaagggaaagcggcagacctatcaagccgccacgcaaagacctccccgacagtcagcaacagcaccagtcaagtaaaaaagggaagcttagtgaacagctgaaacactgtaatggcatactaaaagagttgctatccaagaaacacgcagcctacgcatggcctttttacaagcctgtggacgcaagtgctctcggtctacacgattaccacgacataatcaagcaccctatggatctgtcaaccgttaagcggaagatggagaatcgcgactatagggatgcacaagaattcgccgctgatgtaaggctgatgttctcaaattgctacaagtacaaccctcctgatcacgacgtagtcgccatggcccgtaagttacaggacgtattcgagtttcggtacgccaaaatgcctgacgagcctctggaaccagggcctctgccagtgtccacagcgatgccacctggtctggcaaagtccagctccgagagttcctcggaggagtcctcttctgaatcctcctccgaggaggaggaggaagaggacgaggaggacgaggaggaggaggagtcagagtcctccgactctgaagaagaaagagcacaccgcctggctgagttgcaggaacagctacgcgctgtgcatgagcagttagccgcacttagccagggacctatcagcaagcctaagcgcaagagggagaagaaggaaaaaaagaagaaacgaaaggctgaaaagcaccgtggacgagcaggggctgatgaggatgataaagggcctagagcaccccgtccaccacagcctaagaagagtaagaaggcgagtgggtctggaggcggatccgccgcactcggaccgtctgggtttggaccgagtgggggaagcggtacaaagttacctaagaaggccaccaaaaccgcccctcctgccctgcctacggggtatgatagcgaagaggaggaggagagtaggcctatgagctacgacgagaagcgacagctgtcccttgacatcaataagctcccgggtgaaaagctggggagagtggtgcacataattcaggctagagagccatcgcttagagacagcaatcccgaagagatcgagatcgatttcgaaacccttaaaccctcgacactacgagaactggagcggtacgttctgtcatgtcttcgcaagaaaccacggaagccatacaccatcaaaaaacctgtaggcaaaacaaaagaggagctggctcttgaaaagaagcgggaactggaaaagagactgcaggatgtttcgggccagttaaattccacaaagaaaccgccaaaaaaggccaacgaaaaaacagaatctagttcagcacagcaagtcgctgtctctcggttaagcgctagctcctcgtcctcagactcttccagcagcagcagctcgtccagttcctccgacactagcgatagcgattcaggttag

SEQ ID NO: 216211 - DNA, 987 bp, synthetic construct
  misc_feature 1..987: note = Description of Artificial Sequence: Synthetic coding sequence
  source 1..987: mol_type = other DNA
taagccaaatcatcaagtgagtccagtagcgaggagagctcaagcgagtcatcctctgaagaggaagaggaagaagatgaagatgaagaggaggaggagtccgagtcttcagactcggaagaggaaagggctcataggcttgcggagttgcaggagcaactgcgggcagttcatgagcagctcgccgctctgtcacaaggacccattagtaagccaaaacgcaaaagggaaaagaaagaaaagaaaaagaagcgcaaggcagaaaagcatcgcggaagggccggtgccgacgaggatgacaaaggaccacgggcaccgaggcctccccagcctaaaaagagcaagaaagcgagcgggagtggaggcggtagcgccgcactggggcctagcgggttcggtccatccggcggttccggcactaagctccctaagaaggcaacaaagactgcccctcccgctttgcccacaggatatgactcagaggaggaagaagagtcccgccctatgtcttatgacgagaagagacagttgagtctggacatcaataagttgcccggagaaaagcttgggcgagtggttcacattatccaagctcgggagccctccttacgcgactctaatcctgaggaaattgaaatcgactttgaaacattgaagccgtcaacgctgcgagaactggagagatacgtgctgtcttgcttgcgtaagaagccaaggaaaccctatactatcaagaagcccgtggggaaaactaaggaagagctggctctcgaaaaaaagcgcgagctcgaaaaaagactgcaggatgtcagcgggcagctcaacagcacgaaaaagcctcctaagaaggctaatgagaaaaccgagagctcatctgcccagcaggttgccgtgtcaaggttgagtgcaagtagtagctccagcgattctagttcttcctctagctcatcttctagctctgatacctctgactctgattcaggctag

SEQ ID NO: 216212 - DNA, 2511 bp, synthetic construct
  misc_feature 1..2511: note = Description of Artificial Sequence: Synthetic coding sequence
  source 1..2511: mol_type = other DNA
atgcttcagaatgtgacgccgcacaacaagctgcctggtgagggaaatgcaggtcttctgggattaggcccagaggcagcagctcctggaaagagaatcaggaagccttcactgctgtacgaaggattcgagagtcccacaatggcaagtgtacctgctcttcaactgactcctgcaaatccaccccctcccgaggtgagcaaccctaaaaaacctggccgagtgaccaaccagctccaatatttgcacaaagtggtgatgaaggcgctctggaagcatcagtttgcctggccgtttcggcagcctgtggatgctgtcaaactcggcctgcccgactaccataaaatcatcaaacaacccatggacatgggaactatcaaacgacgcctagagaataattactactgggccgcatcggagtgcatgcaggactttaacaccatgttcacaaactgctacatctataataagccaaccgacgatattgtgttgatggctcagacgctggagaaaatctttcttcagaaagtggcctcaatgcctcaagaagagcaggagctcgtggtaacaatacccaagaacagccacaaaaagggagctaagttggcagctcttcagggctctgtgacctcagcacatcaggttcctgccgtatcttccgtgtctcacaccgcgctgtatacaccccctcccgagatccctactaccgtgttgaacatcccccatccatctgtcatcagctccccacttctgaaatcactccacagcgccggaccacccctcttagccgttactgctgcccctcccgcacagcccctcgcaaagaagaagggagtaaagaggaaggccgacaccacaacacctactccgacagcgatcctggctcctggcagcccagcatctccccctgggagcttggagcccaaggccgcacgccttcccccaatgaggcgcgaaagcggtcggcctatcaagccgccaagaaaggacctgccggactcacagcaacagcaccagtctagcaagaagggaaaattatctgagcaattgaagcactgcaacggcatcttgaaggagttgctgtcaaaaaagcacgctgcctacgcttggcctttctataaacccgtagacgcgagtgctctcggcctgcacgattaccacgatattataaaacacccaatggacctttctacagtcaaacgaaagatggagaaccgagattatcgcgacgctcaggagttcgcggctgacgtacgactgatgttctctaattgctataagtacaatccccctgaccacgatgtggtggctatggcacggaagcttcaggatgtcttcgaattccgatacgccaagatgcctgacgaaccccttgagccagggcctttacccgtgtctacagcgatgcctccaggcctggccaaaagctctagcgaatcctcatctgaggagtcttccagcgagtcctcttcagaggaggaggaagaagaagacgaggaggacgaggaagaagaagagtctgagagctccgatagtgaggaagaacgggcacacaggttggctgaactgcaggaacagctgagagctgtccatgaacagctcgccgcactgtcacagggacccattagcaaaccaaaacggaaaagggaaaaaaaggagaagaagaagaaacgtaaggcggaaaaacaccggggacgggctggagcagacgaggatgataagggaccacgcgctcctcgacctccccagccaaaaaagagtaagaaagcctccgggagcgggggtggaagtgctgcgttgggtccgagcgggtttggtccaagtggtggctcaggaaccaaactgcaggcaggcgtgcagtggcgggatctcgggcttttacagccgcctctgctggggttcaagcgcttctcttgtctatccttgccctcttctcaggactatcgtctgcccaagaaagctaccaaaacagcccctccagccctgcccacggggtatgatagcgaggaggaggaagaatctaggcctatgagctacgacgagaagaggcagctgtccctggacatcaataaactgcctggggagaagctcggacgcgtcgtgcacatcatccaggcgagagagccatctctgagggatagcaatcctgaagagattgaaattgattttgagacactgaaaccaagcacactccgagaactcgagaggtacgtgctgagctgcttgagaaagaaaccaaggaagccttacacaataaagaagcctgtgggcaagaccaaggaagaattggctctggaaaaaaaaagggagctggagaaacgactgcaagatgtatccggtcagctgaattcaaccaaaaaaccacccaaaaaagccaatgagaagactgaatccagttcagcgcagcaggtcgctgttagtaggctctctgcatccagctctagttctgactcctcgtccagctcgtcctctagctcttcttccgacacaagcgactccgactcaggatag

SEQ ID NO: 216213 - DNA, 2424 bp, synthetic construct
  misc_feature 1..2424: note = Description of Artificial Sequence: Synthetic coding sequence
  source 1..2424: mol_type = other DNA
taaaacgggggaggtggaagcgctaccgcccgaggcggtgagtaccgattgcccggagagggcaatgcgggacttctgggcctcgggccagaagctgctgcccctggtaagagaattagaaagccatcccttctctatgagggtttcgaatcgcccaccatggcctcagtgcctgctcttcagcttacgcctgccaatccaccaccacctgaggtttcaaacccaaaaaagcctggcagagtgaccaaccagctgcaatatcttcacaaggttgttatgaaagcgctctggaaacaccaattcgcttggccttttcgccagcctgttgatgccgtcaagctcggtctgcctgattatcacaaaatcataaaacagccaatggatatgggaacaattaaacggagattggaaaacaactattactgggcagcctcggagtgcatgcaggatttcaatacgatgttcacaaattgttatatctataacaagcccacggacgacatagttttaatggcccagacacttgaaaagatctttctgcagaaagtggctagcatgccgcaggaggaacaggaactggtggtgacaatccccaaaaattcacacaagaaaggggctaaattggctgctctccagggatccgtaacctcagcccaccaagtgcctgccgtttcgagcgtatcccacaccgcactatataccccaccaccagagattccaacaacagtgctgaatatcccacacccgagcgtcataagctcgcccttgcttaaatctctacattccgctggaccaccactgctcgccgtcacagctgctccccctgcacagccactcgccaaaaaaaagggggtcaaacggaaggccgacacgaccaccccaaccccgactgccatacttgcacctggaagcccagcaagtccgcctggatctctggagccaaaggccgctcgcctacctccaatgcgaagagagagtgggcgacccataaaaccccctcggaaggatttacctgatagccagcaacagcatcaaagctctaagaaaggcaagctctctgaacagttgaagcactgtaatgggatactcaaggaactgctgtctaaaaagcacgccgcttatgcttggcccttctacaagcccgttgacgcctcagcgctgggacttcatgactaccatgacattattaagcatccaatggacctgtctaccgtgaagagaaaaatggagaacagagactatagggacgcacaggagtttgcggcagatgtgaggctgatgtttagcaactgttataaatacaacccgcctgatcacgacgtggtagccatggcacgcaaattgcaagatgtcttcgagtttcgctacgccaagatgcctgatgaaccacttgaaccaggacctcttccagtgagcaccgcgatgcctcccggactagcaaagtctagcagtgaatccagtagcgaggagtcaagctcagaatcctcctctgaggaggaagaggaagaagatgaggaggatgaggaggaggaggagtcagaaagcagtgatagtgaagaggagagagcacaccgcttggctgagctccaggagcaactgagagctgtgcacgagcaactggcagcactgagccagggaccaatttcgaagcccaagcggaagcgagaaaagaaagagaaaaagaagaagcggaaggctgagaagcatcgcggacgggctggtgccgacgaggacgacaagggccctcgggcacctaggcctcctcagcctaagaaatcaaagaaagcttctgggtctgggggaggatctgccgctctagggccatccgggttcggcccatccgggggtagcggaaccaagctccccaagaaagccaccaaaacagccccaccagctctgcccaccggctacgatagcgaagaggaggaggaaagccgacctatgagttatgacgagaagaggcagctcagcctggacattaacaagcttcctggagagaagttgggtagggttgttcacattattcaggctagagagccttccttgcgcgacagtaacccagaggaaatcgagattgattttgaaacactgaaaccctccactctgagggagctagagagatatgtgttgtcatgcttgcgcaagaagccgaggaaaccttacacaattaaaaagcctgtcggaaaaacaaaggaagaacttgcgctcgagaagaaaagagagctggaaaaaaggctgcaggacgtgtctggtcaattgaacagcacaaagaaaccacctaagaaagctaacgagaaaacggagtcttccagcgctcaacaggtcgctgtgagtcgcctcagtgcctcttcgtctagttcagacagcagctcgtctagcagctcatcttcttcttccgatacgagcgactccgactctggctag

SEQ ID NO: 216214 - DNA, 2265 bp, synthetic construct
  misc_feature 1..2265: note = Description of Artificial Sequence: Synthetic coding sequence
  source 1..2265: mol_type = other DNA
atggcctcagtccccgctctccagcttacccctgccaatccgccaccacctgaagttagtaatcccaagaagccgggtcgggtgactaatcagttgcagtaccttcataaggtggtcatgaaggcactctggaagcaccaatttgcctggccattccggcagcccgtggacgctgtgaagttgggcctccctgactatcacaaaatcatcaaacaacccatggacatgggaacgattaagaggcggctggagaacaattactattgggctgcttcggagtgtatgcaagatttcaacactatgtttactaactgttacatttacaacaagccaaccgatgacatcgttctcatggcgcaaaccctggagaagattttcttacaaaaggtcgcgagcatgccacaagaggaacaggaactcgtggtgaccatcccaaagaacagccataagaagggcgctaaactcgcagccttgcagggctcagttacctcagcacatcaggtgcctgctgtaagttctgtgtcccataccgccctatatacgccaccccctgaaatcccaacaaccgtgttgaacatacctcacccatctgtgatctcatctccactactcaagtcgctccactctgccggaccaccgcttcttgctgttacagcagctcctccggctcagcctctggcaaaaaaaaaaggtgtgaagaggaaggcggacactacaaccccaacccctactgctattcttgcgccagggtcacctgcatctcctcctggatccttagagccaaaagccgctcgtttgcccccaatgcggcgagagagcggtcgccctattaagccaccaagaaaggaccttccagattcgcagcagcagcaccaatctagtaagaaaggaaaattgtctgaacagctaaagcactgtaatggaatcttaaaggagttactgagtaagaagcatgctgcctacgcatggccattttacaaacccgtggatgcaagcgcactcggtctgcacgactatcatgatataataaagcaccctatggacctcagtactgttaagcgtaagatggaaaaccgagattacagggatgcacaggaatttgcggcagatgtgcgcctgatgttcagtaattgctacaagtacaaccctcccgatcacgacgtggtggctatggccagaaaattacaggacgtctttgaattcaggtatgcaaagatgcctgacgaacccttagagccagggccattgccagtatcgacagcaatgccacccggtctagccaagtcctctagtgagtcttcaagcgaggagtcatcttctgagagcagttcagaggaggaagaagaggaggatgaagaagatgaagaagaagaggagtctgagtcgagtgactcagaggaggagagggcacaccgcctggcggagctgcaggaacagctcagagccgtccatgagcaactggctgcacttagtcagggtccgatttccaagcccaaaaggaagcgcgagaagaaagagaaaaaaaaaaaacgcaaggccgagaaacacaggggacgcgcaggggcagatgaggatgacaaggggccacgggctccacgccctccccaacccaagaagtccaaaaaagcatccggcagtggagggggaagcgcagccctcggcccaagcgggtttggtccttctggaggaagtggaaccaaactcccaaaaaaagcgacaaaaactgcacccccagccctcccaactggctacgacagcgaagaagaagaggagtcgagacccatgtcgtacgacgaaaaacgccagctatctttagacatcaacaaactgcctggtgagaaactgggacgtgtggtccacatcattcaagcgagagaaccttccctccgcgacagcaatcctgaagagattgagattgattttgagacacttaagccctccaccctgcgggaactggaacgctatgttttgagttgcctgcggaaaaagccaaggaagccgtataccatcaaaaagccagtcggaaaaactaaggaggagctggccctggagaaaaagagggaactcgagaagaggctgcaggacgtgtctggacaattaaattcaacgaagaaaccaccaaagaaggccaatgagaagactgagtctagcagcgctcagcaggtagccgtatcacgattgtccgccagctcttccagcagcgacagtagttccagttctagctcttcctcaagttcagacacgtctgacagcgatagcggctag

SEQ ID NO: 216215 - DNA, 2406 bp, synthetic construct
  misc_feature 1..2406: note = Description of Artificial Sequence: Synthetic coding sequence
  source 1..2406: mol_type = other DNA
atgttgcagaacgtcacccctcacaacaaactgcccggagaagggaacgcgggactgctcggactgggtcccgaggctgcagctcctgggaaacggattcgtaagccttcactgctgtatgaggggttcgagtctccgaccatggcatctgtgccagccctgcaactgacccccgcaaatcccccaccacccgaggtgtcgaacccgaaaaagcctggacgcgtaacgaatcagcttcaatacctgcataaggtggtgatgaaggcactgtggaagcaccagtttgcctggccgttccggcagccagtcgatgctgtaaagttagggctccctgactaccacaagataataaaacagcctatggacatgggcacgattaagagaagactcgaaaacaattattactgggccgcttccgagtgcatgcaggacttcaacactatgttcaccaactgttatatttataataaaccgactgatgacattgtgttgatggcccagaccctggagaagatctttctgcagaaagtcgcctcaatgcctcaggaagagcaggaactggtggtgactattcctaagaactcacacaaaaagggagctaaattggccgctctacagggctcagtgactagcgcccatcaggtgccagctgtgtcgtcagtgagccacaccgcactctacactccgcctcccgagattcctaccaccgtgtttaacattcctcacccttctgttatcagcagtcctttactcaagtctttgcacagcgcaggacccccactgctggctgtcacagcagctccccctgcacagccgctggctaagaagaagggcgtgaaacgcaaagctgacacaaccacgccaactccaactgcgatcctggctcctggatctcccgctagcccgcctggctcgctggaacccaaagcagccaggttgccaccaatgcgtcgcgagagtggtaggccaattaaaccccctagaaaggatcttccggactcccagcagcaacatcagtcctctaagaaaggtaaactgtctgagcagctgaagcattgcaatgggattctcaaggagctgctgtcaaaaaaacacgcagcgtacgcgtggcctttttacaagcccgtggatgcaagcgctctcggcttgcacgattaccatgacatcattaaacacccaatggatctatctacggtaaagcgtaagatggagaatagagactacagggacgcacaggagtttgccgctgacgtgcgcttgatgttcagtaattgttataaatacaacccgccagaccatgacgtcgttgctatggcccgtaagttgcaggacgtgttcgagtttcgatatgcgaagatgccagatgagccgctggaaccaggtcccctgcccgtatcaactgccatgccacccggactagccaaatcctcctcagaatcatccagcgaggagagttcatccgaatcctcatccgaggaggaagaggaagaagacgaagaagacgaggaagaagaggaaagcgagtcttctgactccgaggaagaaagggcccacagactggctgaactgcaagaacaactgcgcgctgttcacgaacagctcgctgccctgtcccagggacctatctctaaacctaagcgtaaaagggaaaagaaggagaagaagaaaaaacgaaaggcagaaaagcatagaggacgcgctggcgctgatgaggacgacaaagggccacgcgcaccgaggcctccccagcctaaaaaaagtaagaaagctagtggttcaggtgggggatctgcagcgttaggcccttccggctttgggccttcggggggtagtggtacaaaactgcctaaaaaggcaaccaagaccgctcccccagcactgcctacaggatatgacagtgaagaggaggaagagagccgccctatgagctatgatgagaaacggcaactcagtctagacattaacaagctgccaggggagaaacttgggagagtagtgcacatcatccaggccagagaaccttctctgagggactccaaccctgaagagatcgaaatcgatttcgaaaccctgaagcccagcactcttcgcgagcttgagaggtacgtgctgagctgcctccgcaaaaaacccaggaaaccctatactatcaaaaagcccgtgggaaagaccaaggaagagttggcacttgaaaaaaagagggaactcgagaaacgattacaggatgtgtctgggcagttaaactccacaaagaagccaccaaaaaaagcaaacgagaagaccgaatcttcttctgcacagcaggtagcagtctcccgcctaagcgcgtcctcttcctcgtctgacagttccagtagttccagcagttcttcatcaagcgacacatcggattctgattcaggatag

SEQ ID NO: 216216 - DNA, 891 bp, synthetic construct
  misc_feature 1..891: note = Description of Artificial Sequence: Synthetic coding sequence
  source 1..891: mol_type = other DNA
tagcggcctcttggcgtgcagcagccaggcgcacggctcccgggagagggtaacgctggtttgctgggtctgggacccgaggcagccgctccaggcaaaagaatccgaaaaccgtcgcttctttacgagggatttgaatccccaacgatggcctctgtgccagctctgcagttgactcctgccaaccccccacctccggaggtgtctaaccccaagaaaccgggtcgtgtgacgaaccagcttcaatacctgcataaggtcgtgatgaaggccttgtggaagcatcagttcgcatggccttttcggcagcccgtagacgccgttaagctgggcttaccagactaccataagattattaaacagccaatggatatgggaaccattaagaggcggctggaaaataactactattgggccgctagcgagtgcatgcaggatttcaacacgatgtttacgaactgttatatctataataagcccacagatgatattgtcctcatggcgcagactctcgagaagatatttctacagaaggtggcgagcatgcctcaggaagaacaagaacttgtggtgacgatcccaaagaactctcataagaagggagccaaattggcagccctccagggcagtgtaacttccgctcaccaggtgcccgcagtctcatccgttagccatacggcgctttatactcctcccccagagattcccacgactgtgctgaacatcccgcatcccagcgtcatatctagccctcttcttaagtcactacacagcgccggtcctccactcctcgcggtcactgctgctccacccgctcaaccactggctaagaaaaaaggcgtgaagcggaaagctgacaccacaaccccgactccaacggccattctctag

SEQ ID NO: 216217 - DNA, 2511 bp, synthetic construct
  misc_feature 1..2511: note = Description of Artificial Sequence: Synthetic coding sequence
  source 1..2511: mol_type = other DNA
atgctccagaacgtgactccccacaataaactgcctggagagggaaacgccggactgttgggcttaggtccagaagccgcagcaccaggcaaaaggattcgaaaacccagcctgttgtatgaagggttcgaatcacctaccatggccagcgttcccgcactgcagttaacccccgctaaccccccacctccggaagtgtctaaccctaaaaagcctggccgagtgaccaatcaactgcagtacctccataaagttgtcatgaaagctctgtggaaacaccagttcgcgtggccgtttcgtcagccagtggacgccgtcaagctgggactgcctgactatcataagatcattaagcaacccatggacatgggcacaataaagcgaaggcttgagaataactattactgggccgcaagcgaatgcatgcaggactttaatacaatgtttacgaactgctacatttataacaagcccaccgatgacattgtgctgatggcccagactttagagaagatctttcttcagaaggtagcttctatgcctcaagaggagcaggaacttgtcgtcaccattcccaagaattcccacaagaagggcgcaaaacttgctgccttacagggttctgtaacctccgcccaccaagtgcccgctgtgagctcagtgtcccacaccgcgctctacactccaccaccggaaatccctaccaccgtcttcaatatcccccacccaagcgtaatttctagtcctctcttgaagtctctccatagcgccggaccacctctgctcgctgtgacagctgcgccacctgcgcagccactggcaaagaaaaaaggcgtgaagagaaaggcggacactaccacacccacccctactgccattctggctccaggaagtcccgctagtcctccaggcagtctggagcctaaagccgctagattgcctccaatgaggagagaaagcggcagacctataaagccacccagaaaggacctgcccgacagccagcagcagcaccagtcttctaagaaaggcaagctcagcgagcaactgaagcactgcaacggtatcctgaaggagcttctaagcaaaaagcatgccgcttacgcttggccattttacaaacccgtggacgcctcagcacttggcctacacgactaccacgatatcatcaagcatcccatggacctgagcacagtgaagcgcaagatggaaaaccgggattaccgcgacgctcaggagttcgctgctgacgttagactgatgttcagtaattgttacaagtataacccccctgatcatgatgtcgtcgccatggctcggaaactacaggacgtgttcgagtttcgctacgctaaaatgccagatgagcccttagaaccgggaccacttccggtttcaaccgctatgccacctgggctcgccaaatctagctctgagagcagtagcgaagaatcatcctcggaatcctcaagcgaagaggaggaggaggaggacgaagaggatgaagaagaagaagagagcgaaagctcagactctgaggaggagcgagcccatagactggccgagctgcaagagcaattgcgcgcagtgcacgagcagttggcggcattgtcccaggggcctatcagcaagcctaagcggaagcgggaaaaaaaagagaaaaaaaaaaaaagaaaggccgaaaagcacagggggcgtgcaggtgccgacgaggatgataaaggccctcgggcaccccgtcctccccagcctaaaaagtctaaaaaggcatctgggtcaggcggagggtcggcagccttgggaccaagtggatttggacccagtggaggatcgggaaccaaactgcaagctggggtccaatggcgtgacttgggtctgcttcagcccccactgttgggattcaagcgcttttcctgtctctcgctgccatcaagccaaaattatagactcccaaaaaaggcgaccaaaactgcgcctcctgcactgccgaccgggtatgacagcgaggaagaggaggaaagccgccctatgtcttacgacgaaaagagacaactgagcctggatatcaataaattgcctggagaaaagctcgggcgtgtggtgcatatcatccaggccagggagccatctctgagagactcaaacccggaggagatcgagatcgactttgaaactctcaagccatcaacgttaagggagctggagagatacgtgctctcctgcctgcggaaaaagccccgaaagccctatactatcaaaaagcctgtcggcaaaactaaggaggagttggcacttgaaaagaaacgtgaattagaaaagcggctacaggacgtgagcggccaactgaatagcacgaaaaagcccccaaagaaagcaaacgaaaagacagagtcgtccagtgcacagcaagtggctgtgagtagactgtcagcaagcagtagttcctccgatagcagcagttctagttcttcaagctcttcgagcgatacctccgattcggactccggatag

SEQ ID NO: 216218 - DNA, 987 bp, synthetic construct
  misc_feature 1..987: note = Description of Artificial Sequence: Synthetic coding sequence
  source 1..987: mol_type = other DNA
taggccaagtcttcaagcgaatcttcgagtgaagagtctagtagcgagtccagttctgaagaagaggaagaggaagacgaagacgaggaggaggaggaaagtgaaagctcagattccgaggaggagcgcgcacatcggctagccgagctgcaggagcaactgagggcagtccatgaacagctagccgcactgtcccaggggccaataagtaagcccaagaggaagagggagaagaaggagaagaagaagaagaggaaagccgaaaagcaccgcggtcgagctggagccgacgaagacgacaaagggcctagagctcctaggccaccccagcccaaaaagtccaagaaggcgagtggctccggtggaggcagtgcagctctgggcccaagcgggttcggacctagtggcggaagcggcactaagttaccaaagaaggcaactaagactgcaccgccagccttaccgaccggttacgattctgaagaggaggaagaaagccgcccaatgagttacgacgagaaaagacagctctctctggacataaataagctgccaggcgagaagctcgggagagtcgtgcatattatacaggcgagggagccctcactccgagatagcaatcctgaagagatcgaaatcgactttgaaacactcaagccctcaacgctgagagaactggaacgatacgtactgtcatgcctgagaaaaaaacccaggaagccatataccatcaagaagcctgtgggtaaaactaaagaagaactagccttggagaaaaaacgcgagcttgaaaaacgattgcaggacgttagtgggcagctaaattccacgaaaaagcctcccaagaaggcaaacgaaaagacagaaagctcatccgcacagcaggtagcagtctctcgattgagcgcatcatcctcttcttctgactctagctcctcctcgtcaagcagttcctcttccgacacatccgatagtgattcagggtag

SEQ ID NO: 216219 - DNA, 891 bp, synthetic construct
  misc_feature 1..891: note = Description of Artificial Sequence: Synthetic coding sequence
  source 1..891: mol_type = other DNA
tgacgaccactcggagtgcaacaacctggggcacgcctgccaggcgaggggaacgccggtctgttaggtctgggccctgaggcggcagcccctggcaagagaattcgtaagccatctctgttgtacgaaggctttgagtctcctacaatggcaagtgtgccagccctccagttaactcccgcaaacccaccccctcctgaggtttctaacccaaagaagcccggtcgggtgaccaaccagttacagtacctgcacaaggtcgtaatgaaagcattatggaaacaccaattcgcttggcccttcaggcagccagtggacgccgtcaagctgggactccccgactatcataaaatcatcaaacaaccaatggatatggggactattaaacgtcgtctcgagaataattactattgggctgcatccgagtgtatgcaggattttaacactatgttcacgaactgctacatttataataaacccactgacgacatagtcttgatggcacagaccttagagaaaatcttcttgcaaaaggtcgcatcaatgcctcaggaggaacaggaactggtggttacaattccaaagaattctcacaagaaaggcgcaaagctggccgcactgcaaggctccgtcaccagcgcccatcaagtccccgcagtgagctcggtatcccatactgccctgtataccccgcctcccgagatccccacaacagtgctaaacatccctcacccatctgtcatcagctcgcctctgctcaagtctcttcacagcgctggcccacctttgctggctgtcacggctgcgcctccagcgcagccattagcaaaaaagaaaggagtgaaaaggaaagcagatacaactacacccacacccacagccattttatag

SEQ ID NO: 216220 - DNA, 891 bp, synthetic construct
  misc_feature 1..891: note = Description of Artificial Sequence: Synthetic coding sequence
  source 1..891: mol_type = other DNA
tgaaggccgcttggggtccaacagcccggtgccagacttcctggggagggcaatgcgggactgctagggctgggcccagaagcagccgctccagggaagcgtatccggaagccctcactgctctacgagggttttgaaagccctactatggcaagcgtgcccgcacttcaactaacgccagcaaatcctccacctcctgaggtaagcaaccctaagaagcccggacgggtgacaaatcagttacagtacttacataaggttgttatgaaggcattatggaagcatcagtttgcttggccatttcggcagccagtcgacgctgtgaaactggggctacccgattatcacaagatcatcaagcagccaatggacatgggcaccatcaaacgcaggttggagaacaactactactgggcagcttccgagtgtatgcaggattttaacaccatgtttactaattgttacatctataacaagcctacggatgatatcgtactgatggcgcagactcttgaaaagatcttcttgcagaaggttgcgagcatgcctcaggaagagcaggaactggttgtgactattccgaagaacagtcataagaagggagctaagctggctgctcttcagggttccgtcacatctgcccaccaagtccccgctgtctcatctgtgtcccacacagcgctgtataccccacccccagagatccccacaactgtacttaacattccccatccttctgtgatatcgtctccactgctcaaatctttacatagtgcaggacctcccttgctcgccgtgacagcggcacccccagcccagccactggccaaaaagaagggcgtgaagcggaaggcagatacgactacgcccacaccgacggccattctctag

SEQ ID NO: 216221 - DNA, 1860 bp, synthetic construct
  misc_feature 1..1860: note = Description of Artificial Sequence: Synthetic coding sequence
  source 1..1860: mol_type = other DNA
tagaacgggggtggcggaagtgcaacggctcgcggaggtgagtacagacttcccggtgaagggaatgctggtttgctagggctgggcccagaggcagccgctccgggtaagcggattagaaaaccctccttattgtacgagggtttcgaaagcccaacaatggcaagtgtgcccgcactgcagctcacacccgctaatccaccccctccagaggtcagcaatcccaagaaaccgggacgcgttaccaaccagctgcagtaccttcataaggtggtgatgaaggctctgtggaagcatcagttcgcttggccatttaggcagcctgtggatgccgtgaaattgggactcccagactatcacaagattataaaacaacccatggatatgggtactatcaagcggcgattagaaaacaattactactgggcggcttccgagtgcatgcaagattttaacaccatgttcaccaactgttacatctataacaagccaacagatgacatcgtcctgatggcacagacccttgaaaagatctttctgcagaaagtcgctagcatgccacaggaggaacaggaactcgtggttaccatccccaagaacagccacaaaaagggcgcaaaattggctgcactgcaggggtcagtcacatccgcacaccaggtcccagctgtctcctcagtgtcccatactgctttgtacacccctcctcctgagattccaacgaccgtcctcaacataccccatccatcagtgatcagtagtccactcttgaagtctttgcattctgctggtccacccctgttggcggttacggccgcaccccctgcccagcctctcgccaagaagaagggcgtgaaaagaaaagcagatacgaccacgcctaccccaaccgcgattctggctccaggtagtcccgcatcaccacccggtagcctggaaccaaaggcggctcgactccccccaatgcggagagaatcaggcaggccgataaaaccacccaggaaggacctgcccgacagccaacagcagcatcagtcttctaaaaagggcaagctctcagaacagcttaagcattgtaatggaatattaaaggagctgctgtccaagaaacatgccgcttacgcctggcctttttacaaacccgtcgatgccagcgccctgggtctgcacgactatcacgatatcataaagcatccaatggatctgtccaccgtgaaaaggaaaatggagaatcgggactaccgggatgcacaagagtttgctgcagatgtcagactaatgttcagtaattgttacaaatacaatccgcctgatcatgatgttgtcgccatggccaggaaactccaggatgttttcgaatttcgctatgccaagatgccagatgagccactcgagccagggccactgcccgtgtcaacagccatgcccccaggcctcgccaaaagcagttccgagtcgtcatcagaggagagcagttctgaatcctcatccgaagaggaggaagaagaggatgaagaagatgaagaagaggaagaatctgagtctagtgactccgaagaggagagggcccatcggttggcggagcttcaagagcagctacgagcggttcacgaacaacttgccgcactgtcccagggtccaatcagcaaaccaaaacgcaagcgagagaaaaaggaaaaaaaaaagaaacggaaggctgagaaacaccgcggacgcgctggcgctgacgaggacgataaaggacctcgggctcccagaccgcctcaacctaagaagtccaagaaagccagcggatcagggggaggctccgctgctctagggcctagtggattcgggcctagtgggggatccggtacttag

SEQ ID NO: 216222 - DNA, 987 bp, synthetic construct
  misc_feature 1..987: note = Description of Artificial Sequence: Synthetic coding sequence
  source 1..987: mol_type = other DNA
tgagcgaagtcttcatccgagtctagctctgaggagtcatcatccgagtcctcctccgaagaggaggaggaagaagatgaagatgaggaagaggaggagagtgagtccagcgacagcgaagaggagagagcacacagactcgcagagttacaggaacagttgagagccgtgcatgagcaactggcggcattaagccagggtccaatctccaagcctaagagaaaacgtgaaaagaaagaaaaaaaaaaaaaaaggaaggccgagaagcataggggtcgggcaggtgctgacgaggacgataagggtcctagagcacccagacctccccagccaaaaaaatccaaaaaggccagcggcagcgggggagggtccgcggcactgggcccttccggctttggaccgtcaggtggtagcgggaccaaactgccgaagaaggcgaccaagactgcaccacctgcactccctacgggatacgattccgaagaagaggaggagtctaggcctatgtcctatgacgagaaaagacagctgtccctggacataaataagcttcccggtgaaaagctggggcgtgtcgttcacattatacaggctagagagccttctctgagagactcaaaccccgaggagattgagattgactttgagacgctcaagccgagcacccttcgcgaattagaacgctacgttttgtcctgcctcaggaagaagcctagaaaaccttacactataaaaaaacctgtcgggaagactaaggaagaactggccctggaaaaaaaacgcgagctcgagaagagactgcaggacgtaagtggtcagctaaatagcaccaagaagccgcctaagaaggccaacgagaagaccgagagctcttcagcacaacaggtagccgtgtccagactgtccgcttcctccagctcatcagacagctccagcagcagttcttcatcctctagtagcgacacaagcgacagcgacagcgggtag

SEQ ID NO: 216223 - DNA, 2046 bp, synthetic construct
  misc_feature 1..2046: note = Description of Artificial Sequence: Synthetic coding sequence
  source 1..2046: mol_type = other DNA
atggatatgggcaccatcaaacgcagactcgaaaacaattactactgggccgcaagtgaatgcatgcaggatttcaacacaatgttcaccaattgctacatctataacaagcctaccgatgacatcgtgctgatggcacagacactggagaagattttcctgcaaaaggtggcatccatgccccaggaagagcaagagctggtggtgactattccaaaaaacagtcataagaaaggcgctaaactagcagccctgcagggcagcgtgaccagcgcacatcaggtgccggcagtgtcaagcgtgtcacacactgcactgtatacaccaccacctgaaatccctaccactgttttcaacattccacacccgagcgtgatcagttctcccttgctcaagtcccttcactctgcgggacctccactgttagcggtgacggccgcacctccagcacagcccttggctaagaaaaagggcgtcaaacgtaaggctgatactactacacccacacccactgctatactcgcccctggctctcccgcttcccctcccggttcacttgagccaaaagcagcacggctccccccaatgcggagggaatcaggtcgaccgattaaacctccccgtaaagatctccctgattcgcaacaacaacaccagtccagtaagaaaggcaaactctccgagcagctgaaacactgtaacggtattctaaaggaactcctatctaagaagcacgctgcatatgcttggcctttctacaagcctgtcgacgcaagcgcactaggactgcatgactaccacgatataattaaacacccgatggatctgtctacagtgaaacgtaagatggagaatcgggattatagagacgcacaggagtttgcggctgatgtgcgattgatgttcagcaattgttacaaatacaacccacctgatcacgatgtagtcgcgatggctagaaaattgcaagacgtgtttgagttccgctatgctaagatgccagacgaacctctggagcccggtccacttcctgtgagcacggctatgcccccaggtcttgccaaaagttcaagcgagagcagctctgaggagagctcctctgagagctcaagcgaggaagaggaagaggaggatgaagaagacgaggaggaggaagagtctgagtcgagcgactcggaagaggaacgggctcatagattagccgagctccaagagcaactacgcgcagttcatgagcagttggccgcactgtcccaagggcctatctctaaaccaaagcgaaagcgagaaaaaaaagaaaaaaagaaaaaaaggaaggcagagaagcacaggggcagggccggagccgatgaggacgacaaaggccctcgagcgccacggcctccgcagcctaagaagtccaagaaggcgtcaggttcagggggagggtcggccgctctagggccaagcggattcggcccttctggcggatccggaacgaaactgcccaaaaaggccacaaagacggcaccccctgcactgccgacaggatacgactccgaggaggaagaagagtcccgaccgatgtcatatgatgagaagaggcagctctccctggatatcaacaaacttccaggagaaaagcttggacgggtggtccacattatacaggcaagagagccatcgttacgcgattccaacccagaagaaattgaaattgacttcgagacactgaagccttcgaccctgcgggagctggagaggtacgtcctgagctgtctccggaaaaagcctaggaaaccctacacaataaaaaagccagtcggaaagaccaaggaggagctcgctctggaaaaaaagcgcgagctcgaaaaaaggctgcaggacgtgtccggacagttaaatagtaccaagaaaccgccaaagaaggcaaatgaaaagacagagagcagttcagcacagcaagtagcagtaagtcgactgtccgcttcgtcatcaagcagcgattcatcaagtagcagcagttcatcaagttcttcagacacctccgactccgactccggatag

SEQ ID NO: 216224 - DNA, 2265 bp, synthetic construct
  misc_feature 1..2265: note = Description of Artificial Sequence: Synthetic coding sequence
  source 1..2265: mol_type = other DNA
atggcaagcgtgcctgctttacagctcaccccagccaaccccccaccgcctgaagtgtccaatcccaaaaagccagggcgtgtgaccaatcaactgcaatacctgcacaaagttgtaatgaaagccttgtggaaacaccagttcgcgtggcccttccgacaaccagtggacgcggtgaagcttggattgcccgattatcataagatcatcaagcaaccaatggacatgggcaccattaagcgaaggttagagaacaactattattgggcggcatctgagtgcatgcaagactttaacactatgttcactaattgctacatttataataaacctactgatgatattgtcctgatggcccagactctcgagaagatctttcttcagaaagttgcctctatgcctcaggaagagcaagagctcgtggtgactattcctaagaactcccacaagaagggtgccaagctggctgctcttcagggttctgtaacctcagcacaccaggttccagctgtgtcttccgtgtctcacacagctctttatactccccctccggagatacccactacagtgttcaatatccctcaccctagtgtgataagtagtccccttctgaagtcactccacagtgccggtccacctctgctcgcagtgacagcggctcccccagctcagccgctagcgaaaaaaaagggcgtgaagcgcaaagctgacacaaccacacccactcctacagctattctcgcaccaggcagcccggctagcccacctggctccctggagcctaaggcggctcggctgccgccaatgaggagggagtcaggaagaccaatcaaaccccctcggaaagatcttcccgactctcaacagcaacaccagagtagcaagaaggggaagctgtctgaacagctgaagcactgcaatggaattctgaaagaactgctatctaaaaagcatgcagcatacgcgtggcctttttataaaccggtcgatgcatccgccttagggctgcatgactaccacgacataatcaaacatccgatggacttatcaaccgtcaagcgcaagatggaaaatcgcgactacagggacgcccaggagtttgccgctgacgtgcggctcatgttctcaaattgttacaaatataaccctccagatcatgacgtggtagcaatggcgaggaaattacaggacgtcttcgagtttcgctacgcaaagatgcctgatgagcccctggagccaggcccactgcccgtttcaactgccatgcctccgggactcgccaaaagcagcagcgagtcatcgagcgaagaatcctctagtgagtcctccagtgaagaggaggaggaagaggatgaggaagacgaagaggaagaggaatccgagtcatccgacagtgaggaagagagagcccatcgactcgctgaactgcaggaacaattgagggctgtccatgaacagctagcggcactctcacaagggcctattagcaaacctaaacgcaaaagagagaagaaagaaaaaaaaaagaaaagaaaggccgaaaaacatcggggaagggccggagccgatgaagacgataaggggcctagggcccctcgacctcctcagcccaagaaatccaagaaagccagcgggagcggcggaggatccgctgcactgggacctagcggtttcggcccatctggagggagcggtaccaaacttcccaagaaggctacaaagactgccccacccgctcttcctacaggatatgatagcgaggaggaagaggagagtcgtccgatgtcgtacgatgaaaaacggcagctgtccctggacattaacaagttgcccggtgaaaaactcggacgagtggtgcacatcattcaagcgcgtgaaccatcactcagggactcaaaccctgaagagatcgagatagatttcgaaactctgaaacccagtacattgcgggaactggagcgatacgtcctctcctgtctacggaagaaaccccgtaaaccatataccatcaaaaagcctgtgggaaagacaaaggaagagctggccctggagaaaaagagagaattggagaagcggcttcaagatgtctccgggcagttgaatagtacaaagaagccccctaagaaagctaacgaaaaaacagaatcttcgagtgcccagcaagttgctgtgagcaggctgtccgcgtcctccagctcatcagattcgagttcaagctcctccagcagttccagctccgataccagcgattccgacagcggttag

SEQ ID NO: 216225 - DNA, 2511 bp, synthetic construct
  misc_feature 1..2511: note = Description of Artificial Sequence: Synthetic coding sequence
  source 1..2511: mol_type = other DNA
atgctacagaatgttaccccacacaacaagctgcctggagaggggaacgcgggactcctagggcttggacccgaggcggctgcccctggtaagaggattcggaagccctcgctgctttacgaaggcttcgaaagccctacaatggcgtctgtgccagccctacagctcacacctgccaaccccccacccccagaagtctccaatccgaagaaacctggtcgcgttactaaccagctccagtacctgcataaggtagtgatgaaggcgctgtggaagcaccaattcgcctggcccttcaggcagccggtggacgccgtaaaattggggttgccggactaccacaagattatcaagcagccgatggacatgggcacgattaaacggagattagaaaacaattattactgggctgcctccgagtgcatgcaggatttcaacacgatgtttaccaactgttacatatacaacaagccaaccgacgacattgtcctgatggctcagacgttggaaaagatttttttacagaaggtggcatccatgccacaggaagaacaagaactcgttgttaccatccctaaaaacagccacaaaaaaggagccaagctggctgctctccagggcagcgtgacctccgcacaccaggtccccgctgtgtctagcgttagtcacactgctctatacacgcctcccccagagatcccaaccacagtcctgaatatcccccatcccagtgttatctccagtcctttactgaaatctcttcactccgccggacctccactgctcgccgtgactgcggctccacccgctcaacccctggcaaagaagaagggggttaagcgaaaggccgatactaccaccccaacacctaccgctattctggcccctggaagtccagcttcccctcctggaagcctcgagccgaaggccgctaggctgcctcctatgcggagggaaagtgggcgacccatcaagccccctagaaaggacctccctgatagtcaacaacagcatcagtcttcgaagaaaggtaagctaagtgagcagttgaaacactgcaatggcatccttaaggaattgctcagcaagaagcacgcagcatatgcttggcctttttacaaaccagttgatgcttccgcccttggattgcatgactaccacgatattattaaacatcccatggatctctcaactgttaagaggaagatggagaaccgcgactatagagatgctcaagagttcgcagccgacgtgagactgatgttctctaattgctataagtataaccctccagatcatgacgtcgtggctatggccagaaagttacaggatgttttcgagttccgctacgcaaagatgccagatgaacctctagagcctggaccactacccgtaagcacagccatgccacctggattggcaaaaagtagttccgagtcatcaagcgaagagtcctcaagcgagtcttcctctgaggaggaagaggaagaggatgaggaggacgaggaagaagaagagagcgaatcatcagatagcgaggaggaacgtgctcatcgcctggctgaactccaggagcagcttagggccgtccacgagcaattagcggctctgtcacagggccctatcagcaaaccaaagcgcaaacgtgagaagaaggagaagaaaaagaaaaggaaggccgaaaaacaccggggtcgggctggcgctgatgaagatgataaaggtccgagagctccacgaccccctcagccaaaaaagtcaaagaaagcctcaggcagtggtggaggttcagctgccctcgggccttcaggctttgggccatccggcggtagcggcactaaactgcaggcaggagtccagtggagagacttgggtctacttcaaccccctttactaggctttaagcggttctcctgtctgtcactcccatctagtcaggattatcgactgccaaagaaagccaccaaaactgcccctcctgcactgcctacaggatacgattcagaggaagaggaggagtcgcggccaatgtcatatgatgagaagcgccagctgtcactggacatcaacaagctgcctggagagaagctcggtagagttgtacatattatccaggctagagaaccttctctccgtgacagcaatccggaggagatcgagatcgacttcgagacacttaagccgtccactttgcgcgaactcgaaaggtacgtactcagttgcttgcgcaaaaagcccagaaaaccttataccatcaagaagcccgtcgggaaaactaaggaggaattagcacttgaaaaaaagcgggaactggaaaagcggcttcaggatgtctcggggcagctgaacagcacgaagaagcctccaaaaaaagcaaacgagaaaaccgagtcctcgtcagctcaacaggtcgccgtttcacggctttctgcctcaagttccagttctgattcatccagctcctcctcgtctagtagcagtagcgatacgagtgacagcgacagtggttag

SEQ ID NO: 216226 - DNA, 2046 bp, synthetic construct
  misc_feature 1..2046: note = Description of Artificial Sequence: Synthetic coding sequence
  source 1..2046: mol_type = other DNA
atggacatgggtaccatcaagcgccgactagagaacaactactattgggccgcttccgaatgtatgcaagactttaatactatgttcacgaattgttacatctacaataaacccactgatgatatcgtgctcatggcgcagacgttagagaaaattttcctgcagaaggtagcatccatgccgcaagaggagcaggagcttgttgttactatccctaagaatagtcacaagaaaggggcaaaactcgcagccctacaaggatctgtcacctctgcccatcaggtcccagccgtgtccagtgtgtcccatactgcgctatacacaccaccgccagaaattccaaccactgtattaaacatcccacatcccagcgtgattagttctccactgctaaagagtctgcacagtgctggcccacccctgctagcagtgacggctgcacctcctgctcaaccgctggccaagaagaaaggcgtcaaacgaaaggctgatactaccacacccacgcccactgccatactggcccctggtagcccagctagcccgcctggctcactcgagccaaaagccgctaggctgccacccatgagaagagaaagcggaaggccgataaaaccccctaggaaagatcttcccgactcacagcaacagcatcagagcagtaagaaagggaaactgtctgaacagctgaaacattgtaacgggattcttaaagaactgctgagcaagaaacatgccgcttatgcttggcccttctacaaacccgtcgacgcatccgccttgggcctgcacgactatcatgatattattaaacaccctatggatctgtcaacggtcaaaaggaaaatggagaatagggattatagagacgcccaggagtttgctgctgacgtcaggttaatgttcagtaattgctataagtataatccacctgatcatgacgtagtcgcgatggccagaaagttgcaggacgtcttcgagttccgctacgcgaaaatgccagatgaaccgttggaacccggtcccctccccgtgagtaccgctatgccgccaggcctggctaaaagcagctctgaatccagctcggaggagagtagctccgagtcatctagtgaagaggaggaagaggaggacgaagaagacgaagaagaagaggagtcagagtcctccgatagcgaggaggaacgcgctcaccgcctggcggaactccaagagcaactgcgcgctgttcatgagcagctggccgcattgtcccagggtccaatcagcaagccaaagcggaagagagagaaaaaggagaagaaaaagaagaggaaagccgaaaagcatcggggaagagctggagcggatgaagatgataaaggtcctagagccccacgccctcctcagccgaagaagtctaagaaggccagcgggtcagggggaggttcagcagccttaggtcccagcggctttggcccttctgggggaagcggaaccaaactgcctaagaaggccacgaaaaccgcacccccagcactgcccaccggctacgatagcgaggaggaggaggaatcccggcctatgagttacgacgagaagcggcaactctccctggatatcaacaagctgccgggagaaaaacttgggagggtcgttcacattatacaggctagagagccttcgttacgagactcgaatcctgaggagatcgagatcgattttgagacattaaagcccagtacactaagggagttggagagatacgtcttgtcttgcctcagaaagaaacccaggaaaccttacacaattaagaaacccgtgggaaaaacgaaagaggaactggcgctcgaaaagaaacgggagctggaaaagagacttcaggatgtttcgggccaactgaactccaccaagaagcccccaaagaaagccaatgagaagacggagagtagtagtgcgcagcaggttgccgtatctaggctatctgcgtcttcctcatcctcagacagctcttcttcatctagtagctcctcttcctcagacacatcagattccgatagtgggtag

SEQ ID NO: 216227 - DNA, 2511 bp, synthetic construct
  misc_feature 1..2511: note = Description of Artificial Sequence: Synthetic coding sequence
  source 1..2511: mol_type = other DNA
atgctccagaatgtcactcctcataacaagttgcctggggaaggcaacgccggtctgctgggattggggccagaagcagctgcgcctgggaaacggatccgcaaaccatcactgctttacgaaggcttcgaaagccctactatggcttcagtgccggctttgcagttgactccagccaaccctcctccaccagaagtttctaatcctaaaaaacctggcagagtaactaatcagttacagtatctgcacaaggtcgtaatgaaggccttgtggaagcaccaattcgcttggccattccgccagcctgttgacgccgtgaagttaggccttcccgattaccacaagattatcaagcagccgatggatatgggaactattaagcgacgattggagaataactattactgggccgcttcagagtgcatgcaggactttaacactatgtttaccaattgttacatatacaataagcccaccgatgatattgttttgatggctcagaccttggagaagatcttcctacagaaagtggctagtatgcctcaggaggagcaagagttagttgtgacaattccaaagaactcccacaaaaagggcgctaaactggctgcattacagggcagcgtgacctccgctcaccaggtgcccgctgtctcatccgtgagccatacagccctctacacgcccccacccgaaatccctaccaccgtccttaacattccccatccaagcgtgatcagtagtcctctcttgaagagcttacactccgccggaccccctcttctggctgtcactgcagccccaccggctcaaccgctcgctaagaaaaaaggcgtgaagcgtaaggccgatacaaccacccctactcctaccgccattcttgctcctggcagtcctgcgtccccacccggatccctggaacctaaagcagcccgactgcccccaatgaggagggaaagcggcaggcctatcaagccccctaggaaggacctacccgatagccagcagcagcaccagagtagtaagaaaggaaagctttccgagcaactgaaacactgtaacggcatccttaaggagctgctctcgaaaaagcatgccgcatatgcgtggcctttctataagccagtggacgctagcgccctgggtctgcatgactaccacgatatcatcaaacaccctatggacctgtcaaccgtgaagcgcaaaatggaaaacagagattatcgcgatgcacaggagtttgccgctgatgtgaggttaatgttctcaaattgttacaagtataaccccccagaccacgacgtggtcgctatggctaggaaacttcaagacgtcttcgaatttcgatacgccaagatgccggacgagcccctggagccaggccctctgcctgtgtctacggccatgcccccaggtctggcaaagtcaagctcagagtcaagctccgaggagtcaagtagtgagtcatcatctgaggaggaggaagaagaggacgaagaagatgaggaagaagaagagagtgaatcttcagattccgaggaagaacgggcacacaggctcgcagagttgcaggagcagcttagagcagtccacgaacaactagccgctttgagccagggccctatctccaagcccaagcgaaagcgagaaaaaaaagagaagaagaaaaaacgcaaagctgagaagcatagggggagggccggagcggacgaagacgacaagggtcccagagctccacggcctccccagcccaaaaaaagcaagaaagcctctgggtccgggggaggatccgcagctttaggaccttctggatttgggccatctggagggagcggcacaaagctacaggcaggagtacaatggagagacctgggtctcttgcagcctcccctgttaggcttcaaaagattcagctgtttgagcctgcctagctctcaagattacagacttccgaaaaaggccaccaaaacggcgcctccagcactgccaaccggctacgactccgaagaagaagaggaatcaagacccatgagctatgatgaaaagcgtcagctttctttggatattaataagcttcctggggagaagctcggaagagtggtacacataatccaggccagggagcctagtctgcgtgatagcaatcccgaggaaatcgaaatagactttgaaactttgaagcctagcacactgagggagctcgaaaggtatgtcctgtcctgtcttcggaagaagcccagaaagccatacacgattaagaagcctgtcggcaaaactaaggaggagctggccctggagaagaagcgggaactggagaagcgtctgcaggatgtctctggccaactcaactccacaaaaaaaccacccaaaaaggccaatgagaagaccgagagcagttctgcacaacaagtggcagtgtctcgattgtctgcatcttcaagctcgtccgacagctcaagcagctcatcgagctcttcctcttccgatactagcgattcagactctggttag

SEQ ID NO: 216228 - DNA, 2265 bp, synthetic construct
  misc_feature 1..2265: note = Description of Artificial Sequence: Synthetic coding sequence
  source 1..2265: mol_type = other DNA
atggcatcagttcccgctctgcagctcacccccgcaaacccgccacctcctgaagtatctaatcccaagaaaccaggccgagtaaccaaccagctgcaatatctgcacaaagtcgtcatgaaagcactgtggaagcatcagttcgcatggccttttcggcagccagtcgatgccgtgaagttgggccttccagactatcataagattattaagcagccaatggacatgggcacaatcaagaggagactggagaataactactactgggcagccagtgaatgtatgcaggatttcaacactatgttcacgaactgttacatctacaataagcccacagatgacatcgttttgatggctcaaactctcgagaagatttttcttcagaaagtcgcatctatgcctcaagaggagcaagagctggtggttaccattcctaagaacagtcacaagaaaggcgctaaattagctgccctgcaaggcagcgtgacttctgcccatcaggtgccagccgtgtccagcgtgagtcacacagcactgtatacacctcctccagagatccctacaaccgttcttaatatcccccacccatcagttattagttcccctctgctgaagagtcttcatagcgccggacctcctctgctggccgtgaccgcagcaccacccgctcaaccactggcgaaaaagaagggagtaaaaagaaaggcggataccacaacgcccacccccacagcgatcctggccccagggtcccccgcttccccgcctggatccttggagccgaaagctgcgagactaccgcctatgcgaagagagagtgggaggcccatcaaacccccacgcaaggatctacctgactcccagcaacaacaccaatcttctaagaagggcaaactgtccgaacagctaaaacactgcaacggcatcctgaaggagttgctttccaagaaacatgcagcctacgcatggcccttttataagcctgtggacgcctcagctctggggctgcatgattaccatgacatcattaagcacccgatggaccttagcacagtgaagaggaagatggagaaccgtgattatagagacgcccaggagtttgccgctgatgtacgcctgatgttcagtaattgctacaaatacaaccctcctgaccacgacgtggtggccatggccagaaagctccaagacgtgttcgaattccgatacgccaagatgcctgatgaaccactggagcccggacctctgcctgtctcaacggcgatgccccctggactcgctaaatccagctctgaatcaagcagcgaggagtcgtcctccgagtcctccagcgaggaggaagaagaagaagatgaagaagacgaagaggaggaagagtccgagtcttccgactccgaggaggaacgcgcacaccggctggccgagcttcaagaacaactgcgggcagtgcacgagcagcttgctgccctctcgcagggacctataagcaagccaaagcgcaaacgcgagaagaaagaaaaaaagaagaaacgtaaggctgaaaagcacagggggagagcaggtgccgacgaggacgacaaagggccaagagccccacgtccaccacagcccaagaagtctaaaaaagccagcggaagcggtgggggtagcgcagctttgggcccaagtggctttgggccaagcggaggaagcggtacaaaactgcccaagaaagccactaagaccgctccccctgctctgccaaccggatatgattcggaggaggaggaggaaagtcggccaatgtcatatgacgaaaagaggcagctgtctctagacattaacaaactccctggtgaaaagttaggaagagttgtccacattatccaagcgagggagccttcattgcgggactccaatcccgaagagattgagatcgactttgaaacgctgaagccatctacactacgcgaacttgagcgctacgtgttaagctgtcttcgaaaaaaacctcggaaaccttatacaattaaaaaacccgttggaaaaaccaaagaagaattggctctggaaaaaaagcgggagcttgaaaagagactacaggacgtaagcggacaactcaattcaaccaaaaaaccgcctaagaaggccaacgagaaaacggagtcaagctctgcgcagcaggtggcagtctcccgcctaagcgcttcaagttctagctccgacagtagttcctctagttcctcttcctcatcttctgacacttctgatagcgacagtgggtag

SEQ ID NO: 216229 - DNA, 2046 bp, synthetic construct
  misc_feature 1..2046: note = Description of Artificial Sequence: Synthetic coding sequence
  source 1..2046: mol_type = other DNA
atggacatgggaacaattaagcggcgactggagaacaactattactgggccgcaagcgaatgtatgcaagatttcaacacaatgtttacgaactgctacatctataataaaccaactgatgatatagtgctgatggcccagacgttggaaaagattttcctgcagaaggtggcttccatgcctcaggaagagcaggagctggtggtgactatccctaagaactcacataaaaaaggggcaaaactggcggctcttcaaggcagcgttacaagtgcacaccaggtgcccgcagtgtcatcagtgtctcacacggcgctgtacacaccaccaccagaaattcctactacggtgttgaacattcctcaccccagtgtcatctcctcacccctgctaaagtctttgcattctgccggtcctcccctcctggccgtgacggcggcaccaccggcacagcccctagcaaaaaagaaaggtgtgaagaggaaggctgataccactacccctacccctaccgccattctggctcccggtagcccagcctccccaccaggcagtttggagccaaaagctgccaggctgccaccgatgcgcagggagtcagggcgtcctattaagccccctagaaaggatcttcctgactcccagcagcagcatcaatcatccaagaaaggaaaattaagcgagcaactgaagcattgcaatggtatcctgaaggaactgttaagcaaaaagcacgccgcatacgcctggcccttttacaagcccgtggatgcctcagcactcgggttacatgactaccacgacattatcaagcaccccatggacctgtcaacagtgaagcgcaaaatggagaaccgggattatcgcgacgctcaggaatttgctgccgatgtaaggctgatgttctccaactgttataaatacaatcctcccgatcatgacgttgttgccatggcaagaaagctgcaagacgtcttcgaattccggtacgcaaagatgccagacgaacctctagagcctggaccccttccagtctctaccgcgatgccacccggactggcgaagtcgagttccgagagttcatccgaggagtcatccagtgaaagctccagcgaggaagaggaagaggaggacgaggaggatgaagaggaggaggaatcggagtcctccgatagtgaagaagagcgggcacatcgcttggccgaactgcaggagcaactgcgcgctgtacatgagcaactggccgctctaagccaaggtcccatcagcaagcctaaacggaaaagagagaaaaaagagaaaaaaaagaagcgcaaggccgagaaacacagagggagagctggggctgatgaagacgacaaaggtccaagggcaccaagacctcctcaacctaagaaatccaagaaagccagcggaagcgggggtgggtcagcagctctgggaccctctggatttgggcctagtgggggttctggtaccaaattgcccaagaaagccactaagactgcccctccagctcttccgaccgggtacgacagcgaagaggaggaggagagtcgtcccatgtcgtatgacgagaaacggcagctctctctcgacattaacaagttgcctggcgaaaagctggggagggtcgtgcacatcattcaggctagagagccgtctctgcgcgatagtaaccctgaggaaatagagattgattttgaaactctgaagccttcaactctccgggagctggaaagatacgtgcttagctgcttacgtaaaaaaccacgcaaaccatatacaatcaagaagccagtcgggaaaacaaaagaggaactggctttggagaagaagcgagagttagaaaagcgcctgcaggacgtgtccggccagctgaactctaccaaaaagcctcccaaaaaggctaacgaaaagaccgagtcatccagcgctcaacaggtagccgtcagccggctgtccgcttctagcagtagttcggactcttctagtagttcttcctcctcttcatcatctgacacgtctgattctgacagcggctag

SEQ ID NO: 216230 - DNA, 2511 bp, synthetic construct
  misc_feature 1..2511: note = Description of Artificial Sequence: Synthetic coding sequence
  source 1..2511: mol_type = other DNA
atgctccagaatgtgactccccacaataagctcccgggagagggaaacgccggtctactgggtctgggtccagaggcagccgctcctgggaaacggatcaggaagccatctctgctgtacgaaggctttgagtctccaacgatggcttctgtgcctgctctgcaattaacacctgccaatccaccacctccggaggtatcaaatcctaaaaaaccaggccgagtgaccaatcaactccagtacctccacaaagttgtcatgaaagcactgtggaagcaccagtttgcctggccctttcgccagcctgtcgatgcggtgaaactcgggctgcccgactatcacaagatcatcaagcagcctatggacatgggtacgatcaaacgcagactggagaataattattattgggccgcatccgaatgtatgcaggacttcaatactatgtttacaaactgttacatctacaataagcccaccgacgacatcgttttgatggcccagacgttagaaaagatctttctccaaaaagtggcaagcatgcctcaggaagaacaggagttggtggtcactattccgaaaaattcgcacaagaaaggtgcgaagctggcagccctgcaaggatccgtcaccagcgcacaccaggtgcccgcagtgtcttcagtttcgcatacggcgctttatacaccccctccagagattcctacaactgttttgaatatcccacacccttccgttataagcagtccattgctgaaaagtttacactctgctggacctcccctgcttgctgtgactgccgcacccccagcgcagccgttagcaaagaagaagggggtgaagcgaaaagccgataccacgacccctacgcctaccgctatcctagctcccggttcccccgctagcccgcctggcagtttagagcccaaagcggcaagactgcccccaatgaggcgcgaatctggccgacccataaagccaccccgaaaagacttgcctgatagtcaacaacagcatcagtcttcaaagaaaggtaaactaagtgagcagctcaaacattgtaacggcatcctgaaggagctgctgagcaagaagcacgctgcttacgcctggccgttctataaaccagtcgatgcctcagcactgggtctacatgactaccatgacatcatcaagcatcccatggatctatccactgtgaaacggaaaatggaaaaccgggattatcgagacgcgcaggaattcgcagctgacgtcaggcttatgttctctaattgttacaagtacaacccacctgatcatgacgttgttgccatggctcgtaaactgcaggacgtttttgaattccggtatgctaagatgcctgatgagccactggaaccaggtccactgccagtctctaccgccatgcctccaggcctagccaagtcctccagcgaaagctcatccgaggagtcatcaagtgagtcttctagtgaggaggaagaagaagaagacgaggaagatgaagaagaggaagagtctgagtctagcgactctgaagaagaacgcgcacataggctcgccgagctgcaggagcagctcagagcggtgcacgagcagctcgctgcattgagtcagggccctatatccaagcctaaacgcaagcgagaaaaaaaagaaaagaaaaagaagagaaaggccgagaagcataggggtcgcgctggggctgatgaagatgataaaggacccagggctccacgcccaccacagcctaaaaagtcgaaaaaggcctctggatccggcggtggctccgccgctctgggacccagtgggttcggacctagcgggggttccggcaccaagctgcaggccggtgtacagtggcgggatctggggcttcttcagccccctttgctgggctttaagcggttttcttgcctcagcctgccctccagccaggattacaggctgcccaagaaagctactaaaaccgctccacccgcactgcctacaggctatgacagtgaggaagaagaagaatcgcgccctatgtcatacgatgagaagaggcagttgagcctggatatcaataaattgcccggtgaaaagctcggccgagtcgtccatatcattcaggccagggagccttctctcagagacagcaatccagaagagatcgagattgattttgagacacttaaaccaagtacattgagagaactggagaggtatgtcctcagctgtttgagaaaaaagccacgtaaaccttacaccataaaaaagcctgtgggcaagactaaagaggagctggccttggaaaaaaaacgtgaattagagaagagactccaagatgtgtcaggacaattaaacagcacaaaaaagccccctaaaaaggccaatgaaaagaccgagtcctcctctgcccagcaggtggccgtgagcaggcttagtgcctcctcctcttcctcggatagctccagttcaagcagctcctcctcttcatctgacacatccgatagcgattctggatag

SEQ ID NO: 216231 - DNA, 2511 bp, synthetic construct
  misc_feature 1..2511: note = Description of Artificial Sequence: Synthetic coding sequence
  source 1..2511: mol_type = other DNA
atgttgcaaaacgtaacaccccacaataaactgcccggagagggtaacgcgggattgctaggactggggcctgaagcggctgcccctggaaaacgaatccgcaagccatcccttttatatgaaggtttcgagtctccaacaatggcttccgtaccggctcttcagcttacgccggctaatccgccaccacctgaagtaagtaatccaaaaaagcctggccgagtcacaaatcaacttcagtacttacacaaggtggtaatgaaggccctctggaagcaccaattcgcctggcctttcagacagcctgtagacgccgtgaaactcgggctccccgattaccataaaataattaaacagccaatggatatgggcacaatcaaaaggcggttggagaacaattactactgggcggcatctgaatgtatgcaggactttaacaccatgtttaccaattgctacatatacaataaaccgactgacgatatcgtattaatggcacaaactctcgagaagatctttttgcagaaagtggcttccatgcctcaggaggagcaggaattagtcgtgactatccccaaaaacagtcataaaaaaggggcaaaactagccgcattgcaaggctcagtgaccagcgcccaccaggtgcctgcggtttccagcgtctcccacactgctctttatactcctcccccagaaatcccaacaacagtttttaatatcccccacccttctgttatctctagtccactattgaaatctctccactccgctggcccacctttactggccgtgacagccgctcctcctgcccagcccctggccaaaaagaaaggggtaaaaagaaaagccgacacgacaacacccacccccaccgcaatcctcgcacctgggagtcccgcaagccctccgggttcactggagccaaaagcagctcgcctgccgccaatgcgaagggaatccgggagaccgatcaagccacctaggaaggatctccccgacagtcagcagcagcatcagtcaagtaagaagggcaagctctctgaacagctcaaacattgtaacgggattctcaaagagctgctctcaaaaaaacatgcagcctacgcatggcccttttataagcccgtcgatgcgtctgcccttggactccacgattaccacgacatcattaagcaccctatggatctgagtacggtaaaacgtaagatggaaaatcgagactaccgcgatgcccaggaattcgctgctgatgtgcgcttgatgtttagcaattgttataaatataaccctcctgaccacgatgttgtagccatggcccgaaaactacaggacgtgtttgagttcagatacgccaaaatgccggacgagcccttggagcccggtcccctgcccgtgtcaaccgctatgccaccaggtctggctaaatcgtcatcagaaagcagctctgaagaatcctcctctgaatcctcttccgaggaggaagaagaggaagatgaggaagacgaggaggaggaagagagcgagagtagcgacagtgaggaggagcgagcccacagacttgctgagctgcaagagcagcttagagcagtacacgagcagctggctgcactgagccagggccctataagcaaaccgaaaagaaaacgtgagaaaaaggagaaaaagaaaaagcggaaggcggaaaaacaccggggtagggccggagctgatgaagatgacaagggccctcgggcaccaaggccaccccaaccgaaaaaaagcaagaaggcttctggaagcggtggtggctctgctgctttgggcccatcagggtttgggccatctgggggaagcggcacaaagctgcaggctggagtgcagtggcgagacctcggtttgctgcagccaccactgctgggtttcaagagatttagctgcctgtcactcccttccagtcagaactatcgtctgcccaaaaaagctactaagactgctcccccagcgcttccaactggctatgatagtgaagaagaggaagagagcagacctatgtcttacgacgaaaagcggcaactttcccttgatatcaataaactgccaggagaaaagctgggccgagtggtccacatcattcaggctagagagccttcactcagagactctaaccctgaagagatcgaaatagatttcgagacactgaaaccgagcactctgagagagttagagcggtacgtgctgtcctgcctgagaaagaagccgaggaaaccctacacgattaagaagcccgtggggaagaccaaggaggagctggctctggaaaagaaaagggagctcgaaaaacggctccaagacgtgagcggccagcttaactctacgaagaagcctcctaagaaagctaacgaaaagacagaaagctcaagcgctcaacaggtggccgtgtcaaggctgagcgccagttcaagttcatcggactcatctagcagcagtagctcaagcagtagctctgatactagtgattcggatagtggatag

SEQ ID NO: 216232 - DNA, 2265 bp, synthetic construct
  misc_feature 1..2265: note = Description of Artificial Sequence: Synthetic coding sequence
  source 1..2265: mol_type = other DNA
atggcgtccgtgcccgctctgcagctgaccccggctaatccaccaccacctgaggtgtccaatcctaagaagccgggtcgggtcacaaaccaactccagtatttgcacaaggtggtgatgaaggcattatggaagcaccagtttgcctggcctttcagacagccagtggacgccgtcaaactgggactgccagattaccataaaatcatcaagcagcccatggacatgggaaccattaaacgcagattggaaaataactattattgggcggcaagtgagtgtatgcaggactttaacaccatgttcacaaactgctatatctataataagccaaccgatgacatcgtgctcatggcccaaactctggaaaaaatctttctgcaaaaggtcgcttcaatgccacaggaagagcaggagctcgtcgtgacaatccctaagaacagtcacaaaaaaggggcaaagcttgctgccctgcagggatccgtaactagtgcacaccaggtacctgccgtgagctcggtatctcacaccgcactgtacactccccctcctgaaataccgacgaccgtcttgaatatcccacatcccagtgttatctctagccctctgcttaagtctttgcactccgccggacctccactgctggccgtcactgcggcaccccctgcccagcccttggcgaagaagaaaggcgtaaagagaaaggccgataccacaactccaacacctaccgccatcctggcgccaggtagccccgcttcccctcctggtagcctggagccaaaagcagccaggctgcctcctatgagacgagaaagcggaaggcctataaagccaccgcgaaaggatctgccagacagccaacagcagcatcagtccagtaagaaaggcaaactgagtgaacaactgaaacattgtaatggaattctcaaagagctactatctaagaaacacgcggcttacgcctggccattttataagcctgtggatgcctctgctctagggctgcatgactaccatgacattataaaacacccaatggacctgtcgactgtcaagcgcaagatggagaatcgcgactacagggacgcccaggaatttgccgcagacgtgcgattaatgttcagcaattgctacaagtataacccgcctgatcacgacgtggtcgccatggcacgaaagctgcaggatgtctttgagttcagatacgcaaaaatgccagacgagcctttagaaccgggaccactccccgtttcaacggcgatgccacccggattagcgaagtccagttcggagtcctctagcgaagagtccagtagtgaaagctcctcagaagaggaagaggaggaggatgaagaggatgaagaggaggaagagtccgagtcttccgattccgaagaggagcgggcacatcggctcgccgagctacaggagcaacttagggcagtgcacgagcaactcgcggcactttctcagggaccaatctccaaacccaagcgaaaaagggagaagaaggagaagaaaaaaaagcgtaaggccgagaagcatagaggacgcgctggagcggacgaagatgacaaaggccctcgggctcctcgacccccacagcccaaaaagtccaagaaggcttcaggctctggagggggaagtgcagcccttggaccaagcggcttcggcccttctgggggatcaggaacgaaactgcccaaaaaggcgactaagacagcccctcctgcactccctacagggtatgacagcgaggaagaggaggaatctcgccctatgtcttacgacgagaagcggcagctctccctagatattaacaaactgccaggagagaaactgggacgcgtggtgcacatcatacaggcacgagaaccgtcactccgggactcgaaccccgaggagatcgagatcgactttgagactctcaaaccatccactctacgagagttggaacggtacgttcttagttgtctgaggaaaaaaccccgtaaaccctatacaattaaaaaacctgtaggcaagacaaaggaggagctggcactggaaaaaaaacgtgaactcgagaagaggctacaagatgtgtctggacagcttaacagcaccaagaaacccccaaaaaaagcaaatgaaaagaccgagagctcttccgcacagcaggtcgccgtttctaggctgtcagcatctagctcctctagcgactcatccagctcaagcagtagcagttcttcttccgacacatccgacagcgacagtggatag

SEQ ID NO: 216233 - DNA, 2406 bp, synthetic construct
  misc_feature 1..2406: note = Description of Artificial Sequence: Synthetic coding sequence
  source 1..2406: mol_type = other DNA
atgttgcaaaatgtcacaccccacaataaactgcctggtgagggcaatgcaggcctcctgggcctggggcctgaggctgccgctcctggtaaaaggatcagaaaaccctccctgctctacgaaggtttcgaaagcccaactatggcctctgtccccgctctacagctcactcccgctaacccacctccaccagaggtctcaaatccaaagaaacctgggcgtgtcacgaaccaacttcaatatctacacaaggtggtcatgaaagccctgtggaagcaccagttcgcctggcccttccgacaacctgtggacgcagtcaaattaggactgcccgattaccacaagatcatcaaacagccaatggatatgggcactatcaagagacgactggagaacaattactattgggcagccagcgaatgtatgcaggattttaacacaatgtttaccaactgctacatctacaacaaacccaccgacgatatcgtcctgatggctcagactctcgagaaaatctttctgcagaaggtggccagcatgcctcaagaggaacaggaacttgtcgtgacgatcccaaaaaatagtcacaagaaaggagcaaaactggccgctttgcagggaagcgtcacatctgcccaccaggtgccagcagtgtcatcggtatctcacacagctttgtacacgccacccccagaaatccctaccaccgttctgaatatcccacaccccagtgtcatctctagtccactccttaagtctcttcattccgccggtccaccacttctggctgtgactgccgctccccctgcacagcccttagccaaaaagaagggtgtgaagcggaaggccgataccacaacacccactcctacagcaatcctcgcccctggcagcccagcgtccccccctggcagcctcgagcccaaggccgctcggctacctcctatgaggcgggaatctggaagaccgatcaaaccgcctcggaaggacctgccagacagccagcagcagcatcagagctccaagaaaggaaaactgtcagagcagttgaaacattgcaatggaatcctcaaagagctcctcagtaaaaaacatgccgcttacgcttggcccttctataaacccgtagacgcttcagcactgggcttgcacgactaccatgacatcatcaagcacccaatggatctctccaccgtaaaacgcaagatggagaatcgggattaccgcgacgcacaggagtttgctgccgacgtcaggcttatgttctcgaattgctataagtacaatcctccagatcatgacgtggtggcaatggccaggaagctgcaagatgtgttcgagttcagatacgctaagatgcctgatgagccactggaacctgggccactgccagtgtctaccgccatgccccctggactcgccaagagttcctccgagtcaagttccgaagaatctagcagcgaaagcagttccgaggaggaggaggaggaagacgaggaagatgaggaagaggaggaatccgaatcctccgatagtgaggaggaacgtgcccaccgattggccgaattgcaggagcagctgcgggcagtgcacgaacagcttgcagccctctctcagggcccaataagtaagcctaagcgaaagcgggagaagaaggagaaaaagaagaagcgcaaagctgaaaagcaccggggacgcgctggcgctgatgaggatgacaaggggccaagggcacctaggcccccacaaccaaagaaatcaaaaaaggccagcggctccggcggaggtagcgccgctctcgggccaagcggattcggaccaagcgggggatctgggaccaagctccctaagaaagccaccaaaacagcccctcctgcgcttcccaccggctacgactccgaagaagaagaggagagcagacccatgagttacgacgagaagagacaattaagcctagacatcaataagcttcccggagaaaaactgggtagggtcgtgcacataatccaagcaagggaacccagcttacgagatagcaaccctgaggagattgagatcgattttgagacattgaaaccgtccactctccgggagttggagcgctatgtcctgtcctgcctgcggaaaaagccacgaaagccatacaccatcaaaaagcccgttggaaagacaaaggaggagctcgccttagaaaagaagcgagagttggagaaaagactacaggatgtcagcgggcagctcaattctaccaaaaaaccgccaaaaaaagcgaacgaaaagactgaaagctcatctgctcagcaagtggctgttagtaggctgtcagcttcaagtagctcatctgactctagttcctccagctcctcaagcagcagctccgataccagcgacagcgattctggttag

SEQ ID NO: 216234 - DNA, 2046 bp, synthetic construct
  misc_feature 1..2046: note = Description of Artificial Sequence: Synthetic coding sequence
  source 1..2046: mol_type = other DNA
atggacatggggactataaaacgacgtctggagaataattactattgggccgcttctgaatgcatgcaggacttcaatactatgtttactaactgctacatctacaataaacccactgatgatatcgtgctgatggcacagactctggagaagatcttccttcagaaagtagcctcaatgccgcaagaggaacaagagctcgtggtgacaatcccaaagaattcacacaagaaaggagctaagctcgctgcccttcaggggtccgtcaccagcgcgcatcaggtgcctgctgtttcaagcgtctcccacactgcgctgtatacgccacctccggaaatcccgactacggtactaaatatcccacatccctcagtgatttctagtcctctactgaaatctttgcactctgccggacccccacttctggcagtcaccgccgctccaccagcacagccactggctaagaaaaaaggcgtgaaacgcaaggccgacactacaacaccaaccccaacggcaatcttagcccctggcagccctgcttccccacctggaagcctggagcccaaggccgctcggctacctccaatgcgccgtgaaagtgggaggccaataaagcccccacggaaggatcttccagactcccaacagcagcatcagagctcaaaaaagggcaagcttagcgaacagttgaagcattgcaacggcatcctcaaggagttgttaagcaagaaacatgccgcttatgcctggcctttttataaaccagtggacgcgagcgccttgggcctccacgactaccacgacattataaaacatcctatggacctctctacggtgaagcggaagatggagaatcgagactaccgcgatgctcaagaatttgccgcagacgtccggctaatgttttcaaactgctacaagtataatccccctgaccacgacgtcgtggcaatggcaagaaaactgcaggacgtatttgagtttcgatacgctaaaatgccagacgaaccactggaaccagggccactgcccgtcagcacagccatgcctcctggcctcgctaagtcttccagcgagtctagctctgaggaatcgtcatccgagagttcaagcgaagaggaggaggaggaagatgaggaggatgaggaggaggaggagagtgaatcatctgattccgaggaggagagggcccaccggctggcagagctgcaggagcagctgcgagccgtgcacgagcagctagcagccctgagccaaggaccaatatctaagcccaaaagaaagagagagaagaaagagaaaaagaaaaaaaggaaggccgagaagcatcgtggacgggcaggcgctgacgaagatgataagggtcctcgggctcccagaccgccacaacccaaaaaaagtaagaaagctagcgggagcggtggagggtccgccgctctaggccctagcggcttcggtcctagtggcggatccggaactaaacttcctaaaaaagccaccaaaacagccccacctgccctccccacgggctacgacagcgaggaagaagaggagagccggcctatgtcgtatgatgagaaacggcaactgtcactggatatcaacaagctgccgggtgagaagctgggaagagtggtccatattatccaggcacgtgaaccgtctttgagagattcaaacccagaggaaatagaaatcgatttcgagactctcaaacccagcacccttagagaactcgagcggtacgttctgagttgcctgaggaagaaacccaggaagccttacactattaagaagcccgtgggcaagactaaggaggagctagccctggagaagaaaagagaactggagaagaggctgcaggatgtttcgggccagttaaatagcaccaagaaaccgccaaagaaagctaatgaaaagacggagtcctcttccgcacaacaggtcgccgtaagccgactgtctgcatcctcctcctcttccgactcctcatctagctcctcaagctcatccagctcagacactagcgattcggacagtgggtag

SEQ ID NO: 216235 - DNA, 4089 bp, synthetic construct
  misc_feature 1..4089: note = Description of Artificial Sequence: Synthetic coding sequence
  source 1..4089: mol_type = other DNA
atgtccgccgagtcggggcctgggacccgtctacgaaatctccccgttatgggggatgggctggagacaagccaaatgagtactacccaggcccaggcacagccacagccagctaatgcggcatccactaaccctcctccaccagaaacatctaacccgaataaacctaaacgccagactaatcagcttcagtacctcctgagggtggtgctgaagactctgtggaaacaccaatttgcgtggccatttcaacagcccgtggacgccgtgaaactgaacctacccgactactacaaaattataaaaactcctatggacatgggaaccataaagaagcgattggaaaacaattattactggaatgcgcaggaatgtatccaagacttcaacaccatgtttacaaattgttatatctataacaaaccaggagacgacattgtgctgatggccgaggctttggagaaactattcttgcagaagattaatgagttaccaacagaggagaccgagattatgatcgtccaggcgaaagggaggggaaggggaaggaaggagacagggacggcaaagccgggtgtgtccactgtgccgaatacaacacaagcgtcaaccccacctcagacacagacaccccagcctaatccacctccggtgcaggccacgcctcatccctttccagccgtcaccccagacctgattgtacagaccccggtgatgacagttgtgcccccacagcctctccaaactcctcctcctgtgcctccacagccacagccgccacctgcccctgcacctcaaccagtgcagtctcatccacccattattgcagccactcctcagcctgtgaagaccaaaaaaggcgtcaaaagaaaagccgacaccacaacccctaccaccattgatcctatccatgagcctccatcgttacccccagagccaaagaccaccaagttgggacagcgccgagaatcttcacgacccgtaaaacctccgaaaaaggacgtgcccgacagtcagcagcaccctgcgcctgagaagagctcgaaagtgtcagagcagctcaaatgctgctctggcatcctgaaggaaatgttcgcgaaaaagcacgcggcttacgcctggcccttttataaacccgtggacgtggaagcattggggttgcatgattactgcgatatcatcaaacaccccatggatatgagtacaataaagtctaagctcgaggcaagggaataccgcgatgcccaggagttcggcgctgatgtaaggttgatgttttcaaattgctataaatataacccccctgatcacgaggtcgtggcaatggccaggaagcttcaggatgtgttcgaaatgagatttgcaaagatgccagatgagcccgaagagccagtggttgcggtctcatcccctgcagtgcctcccccaaccaaggtcgttgcacccccttccagtagcgacagctcttctgactcctcctccgatagcgattcatcgacggatgacagtgaagaagaaagagctcagcggctggccgagctacaagagcagctgaaggctgtgcacgagcagctcgcagctctgtcccagccccagcagaataaaccaaagaaaaaggagaaagataagaaggaaaagaaaaaggaaaaacacaagcgaaaagaggaagtggaggagaacaaaaagtccaaagccaaggagccacctcccaagaaaacaaaaaagaacaattcatcaaattccaacgtttccaagaaggaacccgctcccatgaagtctaaacccccacccacctatgaaagtgaggaagaggacaaatgtaaaccgatgtcctacgaagagaagaggcagctatccctggacattaacaagctacccggtgaaaagcttggccgtgtggtacatatcatacagtccagggaaccttctcttaaaaattctaatcctgacgagattgaaatcgacttcgagactctcaaaccgagcacactcagggagctggagcgctatgtgacaagctgtctgaggaagaagcggaaaccccaggctgaaaaggtagacgtgatcgccggttcaagtaagatgaagggtttttcatcatcagaatccgaatcttcctccgaaagctcatcctcagactcagaggattccgagacggagatggcgcctaaatctaaaaaaaaagggcacccaggccgtgagcagaagaagcatcaccaccatcaccatcagcaaatgcagcaggcaccagcccctgtgccccagcagcctccgcctccccctcagcagccgccacctcctcctccccctcagcagcaacagcagccaccccctccacctccccctccatccatgcctcagcaagcagcccctgcaatgaagtcaagcccccctccgtttatcgccacccaggtacctgttctcgagcctcagctgccaggctctgtgtttgatccaatcggtcactttacccagcccattttacacctcccgcagcccgagttgcctccacatctgcctcagcctccagagcactcaactccgccacatctcaatcagcacgctgtcgtatctcccccagccctccataacgcattacctcagcaacctagcaggccgagcaaccgcgctgctgcactacctcccaaacctgcccgaccgcctgcagtcagcccagctctaacgcaaacgccccttctcccgcagccccctatggcacagccgccacaagtattattagaggacgaagagccacccgctcccccactcacctcaatgcagatgcagttgtacctgcagcagttgcaaaaagtccagcccccaactccccttctgccctctgtcaaagtccagtcacagccccctccgcctctcccaccccctccacaccccagtgtacaacagcagctccagcagcaacctcccccaccaccgccaccccagcctcagccgcctcctcagcaacaacatcagccacctccgagacccgttcacctacagcccatgcagttcagtactcacattcaacagcctcccccacctcaagggcagcagccacctcacccacccccaggccagcaaccaccacctccacagcccgctaaaccccagcaagtgatacaacatcatcacagccccagacatcacaagtccgatccatacagtacgggccatttacgtgaagccccttctcctctgatgatccactctccccagatgtcacaatttcaatcactcacccatcagtccccacctcagcagaatgtgcagccgaaaaagcaggaactacgggctgccagcgttgtccagccacagccactggttgtcgtgaaagaggagaaaatccactctcccattattagatcagaaccctttagccctagtctcaggccggagcctcctaagcacccagaatctataaaagcaccagtgcatcttccccagcgccctgagatgaaacctgttgatgtggggagacccgtgattaggccacccgagcaaaacgccccaccacctggagcccctgacaaggacaaacagaaacaggaaccaaagacaccggttgccccaaagaaagaccttaagatcaaaaatatggggagttgggcatctctcgtgcagaagcacccgacaactccatcttctaccgccaagtcatcgagtgactcatttgaacagtttcggagggccgcacgggaaaaggaagagagggagaaggcattgaaggcacaggccgaacacgctgaaaaagagaaggagcgcctgaggcaggagcggatgaggtctagggaagatgaagatgccctcgagcaggccaggcgtgctcacgaagaggctagacgaagacaggagcagcaacagcagcagcggcaggagcagcagcagcagcagcaacagcaggctgctgccgtggccgcagccgcaaccccccaggcgcaaagcagccagccgcagagtatgctggatcaacaacgcgagcttgcgaggaagcgagaacaagaaaggcgtcgacgggaggctatggctgccacaattgacatgaattttcaatctgatctgctcagcattttcgaagagaatttgttctag

SEQ ID NO: 216236 - DNA, 2385 bp, synthetic construct
  misc_feature 1..2385: note = Description of Artificial Sequence: Synthetic coding sequence
  source 1..2385: mol_type = other DNA
atgagtgctgagtctgggccaggtacaaggctgagaaaccttcctgtcatgggtgacggtttagagacttcccagatgtcgaccactcaggcccaagctcaaccacaacccgcaaatgctgcaagcactaatccgccacccccagaaacaagcaacccaaacaagcccaagcgtcagacgaatcaacttcaatatcttctgcgcgtggtgctgaagacgctgtggaagcatcaattcgcttggccattccagcagcctgttgatgcagtgaaactgaaccttccggattactacaaaatcatcaagaccccaatggacatgggtacgattaaaaaacgtcttgaaaataactattattggaacgcccaggaatgcatccaggactttaatacaatgttcacaaactgctacatatacaataaaccgggagatgacatagtattgatggccgaggcccttgagaagctttttctccaaaagatcaatgagctacctactgaggagaccgaaattatgatagtgcaggccaagggacgtggaaggggtaggaaagaaaccggcaccgctaagcctggagtgagcactgtgcctaacactacacaggcctctacccctccccagacccagacgccccagcccaatccccctccagtccaggctactccccatccattccccgcagtgacgcccgatttgattgttcaaactcctgttatgacagtagtgcccccacagccgttgcagacaccaccgcctgtgcccccacagccgcagccccctcccgctcctgcacctcagcccgtgcagagtcatccacctatcattgcggcaaccccacagcccgttaaaaccaagaagggagtgaagcgcaaggctgacacaacaacacccaccacaattgaccccatccatgagcccccatccctaccgccagaacccaagaccactaagctggggcagaggcgcgagtcttcaaggccagtgaaaccccctaagaaggacgtgcctgattcacagcagcatccggctcctgaaaagtctagcaaggtctccgagcagttgaagtgctgctctggcatcctgaaagagatgtttgcgaagaagcacgctgcttacgcctggccgttctataaacctgtcgacgtggaggccctcgggctccacgattattgtgacatcataaagcaccccatggacatgagcaccatcaagtccaagcttgaggccagggaataccgcgatgcccaggagttcggggcagacgttaggcttatgttttctaactgctacaaatacaaccccccagatcacgaggtggtcgccatggcccgaaaacttcaggacgtatttgagatgcgcttcgccaaaatgccagacgagcctgaggaaccagtcgtagccgtgagctcgcccgctgtacccccaccaaccaaagtggtcgcgccaccatccagctctgattctagcagtgactcttccagcgactccgatagcagtaccgacgattcagaggaggaaagagcacagcgcctggccgagctccaggagcagctgaaagctgtccatgaacagttggctgcgctctcccagcctcagcagaacaaacccaagaaaaaggagaaagataaaaaagagaagaagaaggagaagcataagcgcaaggaggaggtggaggaaaacaaaaaaagcaaagctaaagagccccctccgaaaaagacgaagaagaataacagtagtaatagtaacgtgtccaaaaaagaacccgcaccaatgaaatccaagcccccaccaacctatgagagtgaagaagaagacaaatgtaaacccatgtcttacgaggagaagaggcagttaagcctggacattaataaactaccaggggagaagctcggacgtgtggtgcatataattcagtctcgcgagccaagcctgaagaatagtaatcccgacgagattgaaatcgactttgaaaccttgaagccctccaccctaagagaactcgaacgctacgtcacctcctgtctgcgcaaaaaacgaaagccccaggctgaaaaggtggacgtaatcgccggaagctcaaaaatgaaaggattttctagttccgaaagtgaatcatccagtgagagttcctcctcagactcggaagactccgagacggctttttgcactagcggagacttcgtgtcacctggaccttcaccctaccacagccacgtgcagtgtgggagattccgggagatgctgcggtggttcctggtcgacgtcgaacagaccgccgcagggcagccccaccgacagtccgctgctggaccagcaatcacctgggcaccagccatcgcctatccctctcctgagtgcgcgaggtgttgtgtcggatgcagttag

SEQ ID NO: 216237 - DNA, 2169 bp, synthetic construct
  misc_feature 1..2169: note = Description of Artificial Sequence: Synthetic coding sequence
  source 1..2169: mol_type = other DNA
atgtccgcagaaagtgggcctggcactcggttaaggaatttgcccgttatgggcgacggattggagacctcacagatgagcacaacgcaggcacaggcccagcctcagccggctaatgctgcatccacaaaccctcctccccctgaaacgtcaaaccccaataagccaaaaaggcagacaaatcagttgcagtacctgctgagggtcgtccttaagaccctctggaaacatcaattcgcgtggccctttcaacagccagtggacgcagtcaagttaaatcttcctgactactataagatcataaaaacccctatggacatgggcacaatcaagaaacggttggagaacaattactattggaacgcacaggaatgcattcaggattttaacacgatgtttacaaattgctacatttataataaaccgggagatgatattgtgctaatggccgaagctctggagaagctctttctgcagaaaattaatgaactgcccaccgaggaaacagagattatgatcgtccaggccaaggggcgaggtagaggaaggaaggagactggaactgctaagccgggtgtctctaccgtgccaaatactacgcaggccagtactccacctcaaactcagaccccccaaccaaatccacctcccgtccaggcgactccacacccatttcctgcggtgacccctgacctcatcgtccagactcccgtcatgaccgtggttccgccacagcccttgcagacacctccaccggtgccccctcagccacagccacctcctgcccctgcgcctcagcctgttcagtcacatcccccaatcattgccgctaccccccaacccgttaaaaccaaaaagggggtgaagagaaaagctgacaccacaacacccacaactatcgaccccatccacgagcctccttcactgccacctgaacccaagaccacaaaactaggccagagacgcgagagttctcgacccgttaaacccccaaagaaggatgtgcccgatagccagcaacatccagccccagaaaagagctcaaaagtgagtgaacagctcaaatgctgcagcggaatcctgaaggagatgtttgcaaaaaaacacgcagcctacgcctggcctttttacaagccagtggatgtggaagcacttgggctgcatgattattgtgatattatcaagcatcccatggacatgtccaccatcaaatccaaactggaagcaagagaataccgcgacgcacaggaatttggagccgatgtgaggttgatgttctctaattgctataaatacaatcctccagaccacgaagtggttgctatggcaagaaaactgcaggatgtgttcgagatgcgttttgcaaaaatgcccgacgagccagaagagccagtggtggccgtatcttctcccgctgtaccaccgcctacaaaagtggtagcacccccaagctcttccgactccagctctgactcctcttcagactcggatagcagtacggacgacagcgaagaagagcgtgcccagcggttggccgagctgcaggaacagctgaaagctgtccacgagcaactagctgccctgtcccagcctcagcagaataagccaaagaaaaaggagaaagataaaaaggagaagaaaaaagaaaagcacaagcgaaaagaagaggtcgaggagaacaagaagtctaaagccaaagaaccaccaccaaagaaaactaagaagaataactcatccaactccaatgtgtcaaagaaagaacctgctcctatgaagagtaaacctccgcctacctatgagtcagaggaggaggataagtgtaaaccaatgagctatgaagagaagcgccagctttctctcgacattaacaagcttccgggagagaagctgggccgtgtcgtgcatatcatccaaagcagagaaccttcccttaagaattctaatcccgatgagatagagatcgactttgagacactgaaaccttcaactttgcgagaactagagagatacgttacaagctgtcttcgcaagaaacggaagccacaggccgagaaagttgatgttatcgctggctcctccaaaatgaagggcttcagcagctccgaatctgagagcagctcagagagcagctcctccgactccgaagatagcgagaccggacctgcgtag

SEQ ID NO: 216238 - DNA, 2625 bp, synthetic construct
  misc_feature 1..2625: note = Description of Artificial Sequence: Synthetic coding sequence
  source 1..2625: mol_type = other DNA
atggacttgaacacgatcaagaagcgtttagagaacaagtactacgctaaggccagcgaatgcattgaggattttaatacaatgttttccaactgctacctgtacaacaaacctggggacgatattgtgctgatggcccaggcactagaaaagctattcatgcagaaattaagccaaatgcctcaggaagaacaagtggtgggtgtcaaggaacgcatcaagaaaggcacgcagcaaaatatagctgtcagttcagccaaagagaagagctccccctccgccaccgagaaagtctttaaacaacaggaaatcccctccgtttttcctaagacctcgatctcccccctgaatgtagtgcagggagcgtccgttaactcatcctcccagacagccgctcaggtgaccaaaggcgtgaagagaaaggctgataccaccaccccagcaaccagtgccgtgaaagcttctagcgaatttagcccaacgttcactgaaaaatcagtcgctctgccgcctatcaaagaaaacatgcccaagaacgtgcttcctgattctcagcagcagtacaatgtagtgaagaccgtgaaagtgactgaacagcttaggcactgttcagaaatcctgaaggaaatgctcgcaaaaaaacatttctcttatgcgtggccgttctacaaccctgtggacgtgaatgcgttaggcctgcataactactacgatgtcgtgaagaatccaatggacctcggtacaatcaaagagaagatggataatcaagagtacaaagacgcgtataagttcgcagccgatgttcgcttgatgtttatgaattgttataaatataatccccctgaccatgaagtggtcactatggcaaggatgcttcaggatgtctttgaaactcacttcagcaagataccaatcgagccggtcgaatccatgcctctctgctacattaagactgatatcacggagaccaccggtagagaaaataccaatgaagcaagcagcgaaggaaactcctcagatgacagcgaggacgaacgggtgaagcgtctcgccaagctgcaagaacagctgaaagcagtgcaccaacagttacaggtgttaagtcaggtgcccttcaggaaactgaataaaaagaaagagaaaagcaaaaaggagaaaaagaaggagaaggttaataactcaaacgaaaaccctcggaagatgtgcgaacagatgcggctcaaggaaaaatccaaacgaaaccagccgaagaagaggaagcagcaatttattggtctcaagtctgaggacgaagataacgctaagccaatgaattacgacgaaaagcgtcagctgtccttaaacatcaacaagttgccaggagacaagttaggtagagtggtgcatattatacagagccgggagccctctctgtctaactcaaacccagatgagattgagatcgactttgagacactgaaagcctctacattaagggagctggaaaagtacgtttctgcttgtctccggaagaggccactgaagccccctgccaagaaaattatgatgagcaaggaagaactccacagtcagaagaaacaggagctggaaaagaggttacttgacgtgaacaaccaactgaacagcagaaaaaggcagaccaaatccgataagacgcagcctagcaaggctgttgaaaacgtcagccggctgagtgaaagctctagttcgtcgagcagctcttccgagtccgaaagttcttcatctgaccttagctcatccgactccagcgatagcgagagcgaaatgttccctaagttcaccgaggttaagcccaatgattcccctagcaaggagaatgtcaaaaaaatgaagaatgagtgcatccctccggagggaagaacaggtgtgacacagatcggctactgcgtgcaggacacaacgtctgccaataccaccctcgtgcatcagactacgccatcgcatgtaatgcccccaaaccatcaccagctggcttttaattatcaagagttagaacacctccaaacagtaaagaatatctctccactgcagattctgcccccttctggcgattctgagcagctttctaacggtatcaccgtgatgcaccctagcggagactccgacactaccatgctcgagagtgagtgtcaagcccctgtgcaaaaggacatcaagattaaaaacgctgactcttggaagtccctcgggaaacctgtcaagcctagcggggtgatgaagagcagtgatgaattgtttaaccagtttcgcaaggcggctatcgagaaagaagtcaaggcccgaacgcaagaactgatacggaaacacttagagcaaaatactaaggagctgaaggcatctcaggaaaatcagagggatttgggtaacgggctcacagtggaatcattctcgaacaagatccaaaataagtgttcaggggaggaacagaaagagcatcagcaatcaagcgaagcccaggacaagagcaagctttggcttttaaaggacagggatctcgccaggcagaaagaacaagagcggagaagaagagaggcgatggtggggaccatcgacatgacattacagagcgacatcatgactatgtttgaaaacaactttgattag

SEQ ID NO: 216239 - DNA, 45 bp, synthetic construct
  misc_feature 1..45: note = Description of Artificial Sequence: Synthetic coding sequence
  source 1..45: mol_type = other DNA
atgtcgctgccctctaggcagacagctatcatagtaaatccatag

SEQ ID NO: 216240 - DNA, 2844 bp, synthetic construct
  misc_feature 1..2844: note = Description of Artificial Sequence: Synthetic coding sequence
  source 1..2844: mol_type = other DNA
atgagtctgccctctcgccagacagccatcattgtgaatccgcctccacctgagtacatcaataccaagaaaaacggtagattgaccaaccagcttcagtacctgcagaaagtagtgctgaaggatctgtggaagcatagtttcagctggcctttccagaggccggtggatgcagttaagctccagttgcctgattactataccatcatcaagaacccaatggacctcaacaccataaagaagcgtctggagaacaaatattatgccaaagccagtgaatgcattgaagactttaataccatgttttctaattgctacctatacaataaacccggagacgatatcgtacttatggctcaggcactggaaaaacttttcatgcagaaactatcccagatgccacaagaggagcaagtagtgggagtaaaagaacgaatcaagaaaggaacgcagcagaatatcgctgtctcttcggccaaagaaaagtcgagcccctccgcaacggagaaggtgtttaagcaacaggaaatcccctcggttttccctaagacaagcatttcccccctgaacgtggtccagggtgccagcgtcaatagctcgtcccaaactgccgcacaagttaccaaaggcgtaaaaagaaaagccgacaccacgacacccgctaccagcgcagtgaaagctagcagcgaattctctcctaccttcaccgaaaaatcggttgcactcccgcctatcaaagagaacatgccaaaaaacgtgctgcctgattcacagcagcaatataacgttgttaagaccgttaaagtcacggaacagctgcgccactgtagtgagatactgaaagaaatgctggctaaaaagcacttcagttacgcctggccattctacaatccagtggacgtaaacgcgctgggtttgcacaactactatgacgtggttaaaaacccgatggacttgggcacaatcaaagaaaagatggacaatcaggagtataaagatgcatacaagttcgcagctgacgtgaggctcatgtttatgaattgctataagtataacccaccagaccacgaggtggtaacaatggcacgtatgctccaagacgtgtttgagacgcacttctcaaagattccaatcgaacccgtagagtctatgcctctgtgctatataaaaaccgacatcactgaaacaactggccgagaaaacactaatgaggcctcttccgagggtaacagctctgacgacagcgaggatgaacgggttaagcgcttggccaagctgcaggaacagcttaaagcagtccaccagcagctccaggtcctgagccaagtcccattccgtaaactgaacaaaaagaaagaaaaatctaagaaggagaaaaaaaaggagaaggtgaataatagcaatgaaaatcccaggaaaatgtgcgagcagatgagattaaaagagaaatccaagaggaatcagccaaagaaacggaaacagcagtttatcggcctcaagagcgaggacgaggataatgccaaaccaatgaactacgatgaaaagcgccagctgtcactcaatattaataagttgcccggtgacaagctgggtcgtgtggtgcacattattcagtcgcgggagccttccctgagcaactccaatccagatgaaatagagattgatttcgaaaccctcaaggcatcaactctgagagaactggaaaaatacgtttcagcgtgtctgaggaagcggccacttaagcccccagccaagaagattatgatgagtaaggaagagttacacagtcagaaaaagcaggaactggagaagcgcctgttggatgtgaacaatcagctgaactctaggaagcggcagaccaagtcagacaagacacagccttcgaaggctgtggagaatgtctcccgtctaagcgaatcctcgagttctagcagctctagcagcgaatcagagagcagttcttctgacctgtcatccagcgatagttccgattcagaaagtgaaatgttcccaaagttcactgaagtgaagcccaatgatagcccatccaaggaaaacgtgaagaaaatgaagaatgagtgtatacccccagaagggagaacaggggttacacaaatcggatattgtgtccaggataccaccagtgctaacacaacgttagttcaccagactacccccagtcatgtgatgccacctaaccaccatcagttggccttcaactaccaagagttggagcatctccaaaccgtgaagaatattagccccctgcagatcttgcccccaagtggtgattccgaacagctgtctaacggcataaccgttatgcatccatcaggtgactccgatactacaatgctggaaagtgagtgtcaggctcctgttcaaaaggacattaagatcaaaaatgccgattcatggaagtctcttggcaagcccgttaagccctcaggagtaatgaaatcttccgatgaactgtttaatcagttcaggaaagcagcgattgagaaagaggtgaaggctcgcacacaagagctgataaggaagcatttggaacagaacaccaaagagttaaaagctagtcaagaaaatcaacgagacctgggaaacggcctgaccgtcgagtctttctcaaacaagatacagaacaaatgttccggcgaagaacaaaaggaacaccagcagagctccgaagctcaggataagtccaaactgtggcttttgaaggatcgggacctggccaggcagaaggaacaggagcggagaaggagggaagcaatggtcggtaccatagatatgaccctgcagtccgatattatgaccatgtttgagaacaacttcgactag

SEQ ID NO: 216241 - DNA, 2706 bp, synthetic construct
  misc_feature 1..2706: note = Description of Artificial Sequence: Synthetic coding sequence
  source 1..2706: mol_type = other DNA
atgtcattgccctctcggcagactgctatcattgtgaaccctccccctccggaatacatcaatacaaaaaaaaatggtagactgaccaaccagttgcagtacctccagaaggtagtgctaaaggatctgtggaagcacagcttttcatggccatttcaaaggccagttgatgcagtcaagttgcaattgcccccaggggatgacatcgtgctcatggctcaagcactggagaagttattcatgcaaaaattatctcaaatgccccaggaggagcaggttgtaggcgtcaaagaacgcatcaagaaggggacccagcagaatatcgctgtcagttcagcaaaggaaaaatcctcaccatctgctactgagaaggtgtttaagcagcaagaaatcccgtcagtgttccctaaaaccagcatatctccgttaaacgttgtgcaaggggcttcagttaattcaagcagccagacagcagcacaagttacgaagggagtaaagagaaaggcagataccaccacccctgcaaccagtgcagtgaaagcaagtagtgagttctctcccacctttacggagaagagcgtagccctgccccctatcaaggagaatatgcccaagaatgtactccctgactcacaacaacaatacaatgtcgtgaagaccgttaaggtcactgagcagttaaggcactgcagtgagatcctaaaggagatgctggctaagaaacacttcagttacgcctggcctttttataacccggtggatgtcaacgccctgggactgcataactattacgacgttgttaagaatcctatggacctgggcactatcaaagaaaaaatggacaatcaggaatacaaggatgcgtataaatttgctgccgatgtcagattgatgtttatgaattgttataagtacaaccctccagaccacgaggtagtcacaatggcccgaatgctccaggacgtgttcgaaactcatttttctaagattcccatcgaacctgtggagtctatgccactctgctacataaaaacggacattaccgagacaactggcagggaaaatactaacgaggcatcctcagaaggaaactcctccgacgactcagaagatgaaagagtgaagcggctggccaagctgcaggagcagcttaaggctgtccaccagcagctgcaggtcctcagccaggttcccttccggaagctgaacaaaaaaaaagagaagtctaaaaaggagaaaaaaaaggaaaaggtgaataacagcaatgagaacccgcgtaaaatgtgcgagcagatgaggttaaaggaaaagtcaaaacggaaccagcctaaaaagcgtaaacagcagttcattggcttaaagtccgaggatgaggacaacgccaagcccatgaactacgatgaaaagcgccagctgagcttgaacattaataagctgcccggtgacaagctgggccgagtggtgcatatcatccagtcccgcgagccctccctgtcaaactccaatccggatgagatcgaaatcgattttgagaccctcaaagcctccacccttagagaacttgagaagtatgtgagcgcctgcctcaggaagagacctctgaagccaccagcaaagaaaatcatgatgagcaaagaagagctgcactcacagaagaaacaggaactggaaaaaaggctcctcgacgtaaacaaccagctcaatagcagaaagcgtcagaccaaaagtgacaagacccagccaagcaaagccgttgagaacgtgtctcggctgagcgagtcatcaagctcttcttcctccagcagtgaaagcgaatcaagttccagcgacctttctagtagcgacagctccgactccgagtccgagatgtttccaaagttcacggaggtcaaacctaacgactcaccttctaaggaaaatgttaagaaaatgaagaatgaatgtatccctcccgagggacgcacaggggtcacccagattggttactgcgtacaggacaccacatccgcaaacactaccctcgtgcatcagactactccctcgcacgtgatgccccctaaccaccatcagttggccttcaactaccaagaactcgagcaccttcaaaccgtcaaaaatatttccccattgcagatactgcctcctagtggcgactctgagcaactgtccaatggaattacagtcatgcatccctctggagactccgacacgactatgttggagagtgagtgccaagcccctgttcagaaagatatcaagattaagaatgccgattcctggaagtctctcggcaagcccgtgaaacccagtggagttatgaagtcatctgacgagctatttaaccagttcagaaaagcagcgatcgagaaggaagtcaaagcgaggactcaggaactgatccgaaaacatctcgagcagaacactaaggagctaaaagctagtcaagagaaccagcgcgacctcggcaacgggcttacggttgaaagtttctcaaataagattcagaataagtgcagcggtgaagagcagaaagagcatcagcaatcttcagaagcacaggacaaatccaagctgtggcttctgaaagatcgcgatctggccaggcagaaagagcaggaacgccgtaggagagaagccatggtcggaacaattgatatgaccctgcagtccgacataatgaccatgttcgagaacaacttcgattag

SEQ ID NO: 216242 - DNA, 2844 bp, synthetic construct
  misc_feature 1..2844: note = Description of Artificial Sequence: Synthetic coding sequence
  source 1..2844: mol_type = other DNA
atgtccctcccatctcgacagactgcgattatcgtgaacccccctcccccagaatacattaacaccaagaagaacggcaggctgaccaaccaactgcaatacctgcagaaggtcgtgctgaaggatctatggaaacattccttctcgtggcccttccagcggccagttgatgccgttaagctgcagttaccggattactacactataatcaagaaccccatggacctgaacacgattaaaaaacgactcgaaaacaagtattacgcaaaagcctccgaatgtatcgaagattttaatactatgtttagtaattgttacctgtacaataagccaggcgatgacattgtcttaatggcccaagccctcgaaaaactgtttatgcagaagttatcacaaatgccacaggaggagcaggttgtgggggtcaaggaacggatcaagaagggcacccagcaaaatatcgccgtaagctctgcaaaggagaagtcttctccctccgccaccgagaaggtgttcaaacaacaggaaattccctcagttttcccaaaaacttctatatctcctttgaatgtcgtgcaaggggcttctgtgaacagctcatcacagactgccgcacaggtgacaaaaggggtgaagcgcaaggccgataccactactccagccacgtcagccgtcaaggcttcttcagaattcagccccactttcaccgaaaagagcgtggccctccctccaatcaaggagaatatgccgaaaaacgtcctgcccgacagtcagcagcaatacaatgtggtgaagactgttaaggtgactgagcaactgaggcattgcagtgaaatcttgaaagagatgctggctaagaaacatttttcatatgcttggccattctacaatcccgtggatgtgaatgcccttggtttgcacaactattacgacgtggtgaagaaccctatggatctgggaacgataaaagagaagatggacaaccaagaatataaagacgcatataaatttgctgccgacgtgcgcctgatgttcatgaattgctataaatataaccctcccgatcatgaggtcgtaacaatggctagaatgcttcaggatgtgtttgagacacacttcagtaagattccaatcgaaccagtcgagagcatgcctttgtgttacattaaaactgatattacagagactacaggtcgggaaaacaccaacgaggcaagctctgaaggtaatagcagcgacgactcagaggacgagagggtcaaacgccttgcgaaactgcaggaacagctcaaagccgtgcaccagcagttgcaagtgctgagtcaggtaccctttaggaaactgaacaagaaaaaggagaaaagcaagaaagaaaaaaagaaggaaaaagtaaataactcaaatgaaaatcctcggaaaatgtgtgagcagatgagattgaaagaaaaatctaagagaaatcaacccaaaaagaggaagcagcagttcattggcctgaaatccgaggatgaagataatgctaaaccaatgaattacgacgaaaagaggcagctgtccttaaatatcaacaaactgccaggtgacaaactgggaagagtggtgcatattatacaatcgagagagccaagcctttcgaacagcaatcctgacgaaatagaaatcgatttcgaaacactcaaagcctctacactccgtgagctggagaagtacgtatcagcctgcttgcgtaagcgcccactcaaaccacctgcaaagaaaatcatgatgagcaaggaagagctgcactcccagaaaaagcaggagctcgaaaaacgtctgctggatgtgaacaaccagctcaactcacggaaaaggcagactaaatctgataagacacaacctagcaaagcagtcgagaacgtctctcggctatcggagtcatcaagcagttcctcctcctcttcagaaagcgaatccagctctagcgacctgtcgagcagcgactcatctgactccgagagtgaaatgttccccaaattcaccgaggtgaaaccgaacgacagccccagcaaggagaacgtcaaaaagatgaagaacgagtgcatacccccagaaggaagaaccggggtgactcaaatcggctactgtgtgcaagataccacatcagccaataccaccttggtgcaccagaccacaccgtcacatgtgatgcccccaaatcatcatcagctcgcattcaactaccaggaacttgaacacctccaaacggttaagaatatctcgccactgcagatactaccaccgtccggcgacagcgagcagctctccaacggaatcaccgtcatgcatccttctggcgattcagatacaacaatgctggagagcgagtgccaagcgccagtgcagaaggacatcaaaatcaagaacgccgattcttggaaaagcctggggaagccggtgaagccctccggggtcatgaagtcctcagacgagctgtttaaccagttcagaaaagccgcaatcgaaaaggaggtaaaggccagaacgcaggagctcattcgcaagcacctcgagcagaacactaaggagttgaaggccagccaggagaaccagagggaccttgggaatgggctgactgtggagtcttttagcaacaaaatccaaaataagtgtagtggcgaggaacagaaggagcatcagcagagctcagaagcccaagacaagtctaaactgtggcttctgaaagaccgggacctggccagacagaaagaacaggaaaggaggcgccgtgaagccatggttgggacaattgatatgacactgcaatcagacatcatgaccatgtttgagaacaacttcgattag

SEQ ID NO: 216243 - DNA, 2844 bp, synthetic construct
  misc_feature 1..2844: note = Description of Artificial Sequence: Synthetic coding sequence
  source 1..2844: mol_type = other DNA
atgagcctgccctctcgacagactgcgatcatcgtaaacccaccacccccagagtatatcaacacaaagaagaatggcaggctcaccaatcagcttcaatatctgcagaaggtggtgttaaaggacctctggaaacatagtttctcatggccatttcagaggccggtggacgccgtgaagttacagctgcccgattactacactattatcaaaaatcccatggatttgaacactattaaaaagcgactggagaataaatattacgctaaagccagtgaatgtattgaggacttcaatactatgttctctaattgctatctgtataacaagcctggcgatgatatcgtgctgatggcgcaggccctggaaaaactctttatgcagaaattgagccagatgccgcaggaggagcaggttgtgggggtgaaggaacgcataaaaaaggggacgcagcagaatatcgcggtcagctcagccaaggaaaaaagtagcccaagtgcaacagaaaaggtgtttaagcagcaggagatccccagcgtctttccaaagaccagtatatccccactaaatgtcgtgcagggagcctccgtgaattcctccagccagacggccgctcaggtgacaaagggagtgaaacgtaaagctgacaccaccacaccggcaacaagtgcagtaaaagcctctagtgagttctcccccacattcacagagaagagcgttgcgctgcctcccatcaaggaaaatatgcccaagaacgtgctgcccgacagccagcaacagtacaatgttgtgaagaccgtgaaagtcaccgaacaacttcggcattgcagcgaaattttaaaagagatgctggcaaagaagcatttttcatatgcctggcccttttacaatccagttgacgtgaacgctcttggattacataactactatgacgtcgtgaaaaaccctatggacctcggcaccattaaagaaaaaatggacaaccaggaatacaaggatgcttataagttcgctgccgacgtcagactgatgttcatgaattgttataagtataatccacctgatcatgaagtggtgacaatggcgaggatgcttcaagatgtttttgaaactcactttagcaagatcccgatcgagcctgtcgaaagtatgcctttgtgttacattaaaacagatatcaccgaaaccaccggaagagaaaacactaatgaggccagcagcgaagggaactcaagcgacgacagcgaagacgagagagtgaagaggctggccaaattacaggaacagctgaaggccgtgcatcaacagctccaagttctctctcaagtcccctttcgaaaacttaacaaaaaaaaggagaagtcgaaaaaggagaagaaaaaagagaaggtgaataacagcaatgaaaacccaagaaaaatgtgtgaacagatgcggctgaaggaaaaaagcaagagaaaccaaccaaaaaaaagaaaacagcaattcattggcctcaagagtgaggacgaggataacgcaaagcccatgaattacgacgagaaaagacaactctctctgaatatcaacaagctgccgggtgataagttaggccgtgtagttcatatcattcagagccgtgagccgagcttatcaaatagcaaccctgatgagattgagattgatttcgagacattgaaagcgtctactttgagggagctcgaaaaatatgtgagcgcctgccttagaaaacggccactgaagcctccagctaagaagatcatgatgagcaaggaggaactgcacagtcaaaagaaacaggagctggaaaaacgactcctcgatgtaaataaccagttaaatagtcgcaagcggcagacaaagtccgacaagacacagccctctaaagccgtcgaaaacgttagtaggctgagcgaatcttcttctagtagctcttccagcagcgagtcagaaagcagtagcagtgacctgtcatcgtctgatagctccgattccgagtccgaaatgttccccaaattcaccgaggtcaaaccaaatgacagtccttcaaaagagaatgtcaagaagatgaaaaatgaatgcattccccctgaaggaagaaccggtgtcacacagattggctactgtgtgcaggatactacctcggccaacacgactctggtgcatcagacaacgccttcacatgtcatgcccccaaaccatcatcagctcgcctttaactatcaggagctggaacatctccaaacagtgaagaacatatccccactgcagatccttcctccctccggagatagcgagcagttgtccaatggcataaccgtaatgcatccaagtggagattccgatacaaccatgctcgaaagcgagtgccaggcccctgtgcagaaggacatcaagattaaaaatgccgactcctggaagagcctgggtaagccagtgaagccgagcggggttatgaagagttcagacgaactgtttaatcagtttagaaaggctgccatcgaaaaggaggtgaaagctcgtacacaggaactgatcagaaaacatctggaacagaataccaaagaattgaaagccagccaggagaatcagcgcgacttgggaaatgggctgactgtggagagcttctccaataaaattcagaacaagtgcagtggcgaggaacagaaggagcaccagcaaagctccgaggcccaggataaaagtaaactgtggctccttaaggatcgcgacctcgcacgtcagaaggaacaggagagacgccgaagagaagctatggtcggcaccatcgacatgactttacagtctgacatcatgaccatgttcgaaaataacttcgactag

SEQ ID NO: 216244 - DNA, 531 bp, synthetic construct
  misc_feature 1..531: note = Description of Artificial Sequence: Synthetic coding sequence
  source 1..531: mol_type = other DNA
atgtccctacccagccggcaaacagcaattatagtaaatccacctccccctgaatacatcaacactaagaagaacggccgactcaccaaccaacttcagtatctgcagaaggtggtgctgaaggacttgtggaagcatagctttagttggccgttccagaggccggtggacgcagttaagctacaactgcccgactattacaccatcatcaagaacccaatggacctgaatacaatcaagaagcgcctggagaataagtattatgccaaagcttccgaatgcattgaagactttaatactatgttcagtaactgttacctgtataacaagcctggcgacgacatcgtcctgatggcacaggccttggagaagcttttcatgcagaaactcagtcagatgcctcaagaggagcaggtagtcggtgtcaaagaacgaatcaagaaaggtacccagcaaaacatcgcggtgtctagtgcgaaggaaaagagttcaccgagtgctaccgaaaaagttttcaagcagcaagagtag

SEQ ID NO: 216245 - DNA, 1389 bp, synthetic construct
  misc_feature 1..1389: note = Description of Artificial Sequence: Synthetic coding sequence
  source 1..1389: mol_type = other DNA
atgagcctgccatccaggcaaaccgccattatcgtcaaccctccacccccagagtatattaacacaaaaaagaatggcagactcacaaatcagctccagtatctgcagaaagtggtgttgaaggatctgtggaagcacagcttcagttggccctttcaacgaccagttgatgccgttaagttgcagctgcctgactattataccattatcaaaaaccctatggatctgaatactatcaagaaaagactggaaaacaaatattacgccaaggcttcggagtgcatcgaggattttaacacaatgttctcaaattgctacttatacaataaacccggtgatgatatcgtgctcatggcccaggccttggagaagctttttatgcagaaattatcacagatgccccaggaagaacaggtggttggggttaaggagaggatcaagaagggtacacaacagaacatcgcagtttctagcgccaaggaaaaaagcagcccttctgccacagagaaagtcttcaaacagcaggagataccgtccgtatttcccaagacatctattagcccgctgaatgtggtccagggcgcatctgtgaattcttcttcacaaaccgcagctcaggtgactaagggggtcaagagaaaggctgacactaccacgccagcaacctcggctgtgaaagccagtagcgagttcagtcccacatttacagagaagtctgtggccctacccccaatcaaggaaaatatgccaaaaaacgtgctcccagatagccagcagcaatataatgtagtgaagactgtaaaggtgaccgagcagttacggcactgtagcgaaatcctgaaggagatgctggcgaagaagcacttttcgtacgcatggcctttctataatcctgttgatgtgaatgcattagggctccataattactatgatgtggtgaaaaatccgatggatcttggtaccataaaggagaaaatggataaccaggagtataaggatgcttacaaatttgcagccgacgttcgccttatgtttatgaactgttataaatacaatccgcctgatcatgaagttgtgactatggcgaggatgcttcaggatgtctttgagacacacttctccaagattcccatagaaccggtcgagtccatgccgctctgttacatcaagacggatattactgagaccaccggcagggagaacaccaatgaagcgtcgtctgaaggaaattcttccgatgattccgaggatgagcgcgtcaaacggttggcaaagttacaggaacaacttaaagccgtgcaccagcagctgcaggttttgtctcaggtacccttccggaaactcaataagaagaaggagaagtctaaaaaggagaagaaaaaagagtag

SEQ ID NO: 216246 - DNA, 468 bp, synthetic construct
  misc_feature 1..468: note = Description of Artificial Sequence: Synthetic coding sequence
  source 1..468: mol_type = other DNA
atgagcctgccatccagacaaacagccatcatcgtgaaccccccaccacccgagtacataaacaccaaaaaaaacggtcgtcttacaaatcagctccagtacctgcagaaagtggtgcttaaggacttgtggaaacactctttctcctggcccttccagcgaccggtggatgctgtaaagctgcagctgcccgattactataccatcatcaagaacccaatggatcttaatacgattaagaagagactggagaacaaatattatgccaaggcgtctgaatgcattgaagactttaatactatgttctctaactgctacctatataataaacctggggacgatatcgtattgatggcccaggcactggagaagctcttcatgcagaagttgtcacaaatgccacaagaagagcaagtcgtgggggtaaaggaaaggataaaaaaggggacccagcagaatatcgcctag

SEQ ID NO: 216247 - DNA, 603 bp, synthetic construct
  misc_feature 1..603: note = Description of Artificial Sequence: Synthetic coding sequence
  source 1..603: mol_type = other DNA
atgtcgctgccatctagacaaacagccattatcgtgaatcctcccccaccggaatacattaatacgaaaaagaacggtcgattgactaatcagctgcagtacctgcagaaggtggtgttaaaggatctgtggaaacattcttttagctggcccttccagcgcccagtggacgcggtgaagctccaactgccagattattatacaatcatcaagaaccctatggatttgaacactattaagaaacgtctggaaaacaagtactacgctaaagcctcagaatgtatcgaggacttcaacacgatgttctcaaattgctatctgtacaacaaacccggagatgatatcgttcttatggcccaagcattagagaagctctttatgcaaaaactgtcgcagatgcctcaggaggagcaggtcgtcggtgtgaaagagcggataaaaaaggggacacagcagaacatcgccgtcagtagcgctaaggagaaaagcagtccctcggcaaccgaaaaggtgttcaaacaacaggaaatcccgagtgtattcccgaagacatctatcagtccactcaatgtagtacagggggcaagtgtgaactcttcatag

SEQ ID NO: 216248 - DNA, 468 bp, synthetic construct
  misc_feature 1..468: note = Description of Artificial Sequence: Synthetic coding sequence
  source 1..468: mol_type = other DNA
atgagcttaccctctcgccaaactgctattatcgtgaaccctccccctcccgagtacatcaataccaagaagaacggcaggctgaccaatcaattacagtatctacagaaggtggtactcaaagacttatggaagcactcgtttagctggccattccaacgaccagtcgacgcggtgaaactccaattacctgactattacacaattataaagaaccctatggacctgaacaccattaagaagcgactggaaaacaaatactatgcaaaggcgtcggaatgcatcgaggacttcaacactatgttttccaattgttacctatataacaaacctggcgatgatatcgtgctgatggcccaggcactggaaaaactgttcatgcaaaagctgtcacagatgccccaggaagagcaagtcgttggcgtgaaggagagaattaagaaggggacgcagcaaaacatcgcctag

SEQ ID NO: 216249 - DNA, 159 bp, synthetic construct
  misc_feature 1..159: note = Description of Artificial Sequence: Synthetic coding sequence
  source 1..159: mol_type = other DNA
atgagcctgcctagcagacaaactgctattattgtgaatccgccaccccctgaatacatcaataccaaaaaaaatggacggttgacgaaccagctccagtacctccaaaaagtcgtactcaaggacctttggaagcactccttcagttggcctttctag

SEQ ID NO: 216250 - DNA, 291 bp, synthetic construct
  misc_feature 1..291: note = Description of Artificial Sequence: Synthetic coding sequence
  source 1..291: mol_type = other DNA
atgagcctgcccagtcgccagacagctatcatagtaaatcctccccctccggaatacataaataccaaaaagaatggaaggttgactaaccagcttcagtacctccagaaggtggttctgaaggatctctggaagcacagctttagctggccgtttcagcggccagtggatgcagtcaaactgcagcttcccgattactacaccatcatcaaaaacccaatggacctcaatactatcaagaagcgactcgagaacaaatattacgcgaaggccagcgaatgtattgaatag

SEQ ID NO: 216251 - DNA, 99 bp, synthetic construct
  misc_feature 1..99: note = Description of Artificial Sequence: Synthetic coding sequence
  source 1..99: mol_type = other DNA
atgagtctgccctcccgccaaactgccatcatagtcaaccccccaccacctgaatatatcaataccaaaaagaatggcaggctcaccaatcagctctag

SEQ ID NO: 216252 - DNA, 1398 bp, synthetic construct
  misc_feature 1..1398: note = Description of Artificial Sequence: Synthetic coding sequence
  source 1..1398: mol_type = other DNA
atgtcacttccatccaggcagaccgcaattattgtgaatccaccccctccggagtacataaatactaaaaagaatggccgactgacaaaccagttgcagtacctgcagaaggttgtgctaaaggatttatggaagcactcattcagctggccgttccagcgccctgtggacgctgtcaagctccagctcccggattattacaccataatcaagaatccgatggacttgaataccatcaagaagcgccttgagaataagtattacgcgaaggcctccgagtgcattgaggatttcaataccatgttttctaactgctatctgtacaataaaccaggggatgacattgttttgatggcgcaggcattggagaagctgtttatgcagaaactcagtcagatgccacaggaggaacaagtcgtaggcgtgaaggagagaattaagaaaggcacacagcaaaacatcgcggtttccagcgcaaaggagaaaagcagccccagcgcaaccgagaaagtgtttaagcaacaggagataccttccgtattcccaaaaacatccatctccccattgaatgtagtccagggcgcaagcgtgaattctagctctcaaactgcagcccaggtcacaaagggcgtcaagagaaaggcagatacaacaacaccggctactagtgccgtaaaggcttcctctgagttttcacccacttttaccgagaaatctgttgcccttccacctattaaagagaatatgcccaaaaacgtgcttcctgactcgcagcagcaatacaacgtggtgaaaacagtgaaagttactgaacagttaagacactgctccgaaatattgaaggaaatgctggctaagaagcacttctcatacgcttggccattctataatccagttgacgtgaacgcattgggcttgcataactattacgatgtggtgaaaaacccaatggaccttgggacaattaaagagaagatggacaatcaagagtacaaagatgcttacaagtttgctgccgacgttagacttatgttcatgaattgttataagtacaaccctccagaccacgaagtggtgacgatggctcgcatgctccaggacgtgttcgagactcatttctcaaaaatcccgattgaacctgttgaaagcatgcctctgtgctacattaagactgatattacagaaaccaccggtagagagaacacaaatgaagcctcatcagagggcaattccagtgacgactccgaggacgaacgagtgaagcgattggctaagctgcaggagcagctgaaggctgtgcatcaacagttacaggtcctgtcacaagtgccatttcggaagcttaacaagaagaaggaaaagtcaaagaaggaaaaaaaaaaagagaaaaaaaaatag

SEQ ID NO: 216253 - DNA, 303 bp, synthetic construct
  misc_feature 1..303: note = Description of Artificial Sequence: Synthetic coding sequence
  source 1..303: mol_type = other DNA
atgtctctgccttcccggcagaccgctatcatcgttaatccaccacccccagagtatatcaataccaagaaaaatggcaggcttacaaatcagctgcaatatctacagaaagtcgttttgaaagacctgtggaaacactcattttcctggccttttcagaggccagtcgatgccgtaaaattgcaactccctgactactacacaattattaaaaaccccatggatctcaacacaattaaaaagcgactggaaaacaaatactatgctaaggcctctgagtgcattgaggatttcaatacatag

SEQ ID NO: 216254 - DNA, 5550 bp, synthetic construct
  misc_feature 1..5550: note = Description of Artificial Sequence: Synthetic coding sequence
  source 1..5550: mol_type = other DNA
atggcagtgtctaggttggacaggcttttcattctcctagacactgggaccacacctgtgaccagaaaagctgccgctcagcaactgggggaagtggtgaaacttcacccacatgaactcaacaacctgctgagtaaggtattgatataccttcggtcggctaactgggatacgcgcatcgctgccggacaagcggtcgaggccatcgtgaagaatgtgcccgagtggaacccagtgccacgcactaggcaggagcctacctctgaaagttcaatggaagacagcccaacaactgaaaggttgaatttcgatcggttcgatatctgcaggctcctccagcatggcgcatcgttgcttggaagcgctggagcagagtttgaggtgcaagatgagaagtccggggaggtggatcccaaagaaagaatagcacgccagagaaaattgctccagaaaaagctgggcctcaacatgggggaagctatcggcatgagcactgaggaattattcaatgacgaggacctggactacacccccactagtgccagcttcgtgaacaaacaacccaccctgcaggctgcagagctaatcgactccgagttcagagcaggaatgtccaataggcaaaagaacaaagctaaacgcatggcgaagctgtttgctaaacaaaggagcagggatgccgtcgaaacaaacgagaaatctaacgattccactgacggggaacccgaggaaaagcggagaaaaattgccaatgtcgtgatcaaccagtcagctaacgactcaaaggtgttgatcgacaacatcccagattctagttctttaattgaggaaaccaacgagtggcccctggaatcattttgtgaagaattgtgtaatgacttatttaacccttcatgggaggtgcgccacggggcaggcaccggtttgcgggagattctcaaagcacatggtaagtctgggggaaaaatgggggactctacgcttgaagaaatgatccagcagcaccaggagtggctcgaagatctcgtcatacgactgttatgcgtgttcgcgctcgataggttcggcgactttgtgtcggatgaggtcgtcgctcctgtccgtgagacatgcgctcagaccctgggagtcgtgttaaaacacatgaatgagacaggcgtgcataagaccgtggacgtgctcttgaaactgcttactcaggagcagtgggaagttcgacacgggggattactgggcatcaagtacgccctcgcggtgcggcaagacgtcataaataccctgctgcccaaggtcttgacacgtataatcgaaggcctgcaggacctggatgatgatgtgagagcagtggccgctgccagcctcgtgcctgttgtggagtctttggtctacctgcagacgcaaaaggtgcctttcatcatcaataccctctgggacgctctactcgaactggatgatcttacggcctctactaactctattatgacactgctcagctccctccttacttacccacaagttcagcagtgttctatccagcaatccctgaccgttctggtgccacgggtgtggcctttcctccaccacaccattagcagtgtgaggagggccgctctggaaactcttttcaccctacttagcacacaggatcagaacagcagttcttggctcattcccatcctgccggacatgcttcgacatatttttcagttctgtgttttagaatctagtcaggagattctggatctgatccacaaagtttggatggagctgctcagtaaggcttccgtccagtatgttgtggccgctgcctgcccttggatgggggcatggttatgtctgatgatgcagccctcccatttgcccatcgatctgaacatgctgctggaagtgaaggcccgagccaaagagaagacagggggtaaggtgcgccagggccagagtcagaacaaagaagtattacaggagtatatcgctggtgccgacaccatcatggaagaccctgccaccagggattttgttgtaatgcgggcacggatgatggctgcaaagcttcttggagccctatgctgctgtatttgcgacccaggcgttaacgttgtcacacaggagattaaacccgcagagtctctgggccaactcctgctgttccatctaaacagtaaaagtgccctccagagaattagtgtcgccctggtgatttgtgaatgggcagctcttcagaaagagtgtaaggctgtgactttggcagtgcagccaagactactggatatcctgtctgaacatctgtattacgacgaaatagccgtcccctttaccaggatgcagaacgagtgtaagcagcttatttcttctctcgcagacgtgcatattgaagtgggcaatagagtgaacaacaatgtccttaccattgatcaggcatccgatcttgtaaccacagtctttaacgaagccacaagttccttcgatctgaatcctcaagtgcttcagcagcttgattctaagcgtcagcaggtgcaaatgactgtgacagaaaccaaccaggaatggcaggtcctccagctgcgcgtgcacacattcgccgcatgcgcagtggtgtccctccagcagcttccagagaagctgaaccccatcataaaacccttgatggaaacgattaagaaggaagagaacacccttgtgcagaattacgccgctcagtgtatcgccaaactactgcagcagtgcactacccggacaccctgcccaaacagtaagattataaaaaatctgtgttcaagcttgtgcgtcgacccctacctaaccccatgtgttacttgtcccgttcctacgcagagtggtcaggagaactccaaaggaagcactagtgagaaggatggaatgcaccatacagtgacaaagcatcgtggcataattaccttatatagacaccagaaggccgcatttgccatcaccagtaggagaggcccaacacccaaggccgtaaaagcccagattgcagaccttcctgcgggatctagcgggaacatcctggttgagttagacgaagcccaaaaaccctatttggtgcagaggaggggggcagagtttgcattgactacaatagtgaaacactttgggggagaaatggctgtcaaactcccccatctctgggacgccatggtgggccctttgcggaatactatagatatcaacaattttgatgggaaatctcttctggacaagggcgatagtcctgcgcaggagcttgtaaatagtctgcaggtgtttgagacggcagccgcttccatggattcggaattacacccattgctcgttcagcacctacctcacctctatatgtgcctgcaatacccatctactgccgtgagacacatggccgcaaggtgcgtaggagtgatgagcaagatagcgactatggagaccatgaacatttttctagagaaggttttgccttggctgggcgcaatcgatgacagcgttaagcaagagggggcaatcgaggcccttgcctgcgtgatggagcagcttgatgtgggtatcgtcccttacatcgtgctgctggttgtaccagtgctcgggaggatgagtgaccaaactgatagcgtacgttttatggctacacagtgctttgcaactctgattcgcctgatgccactcgaagccggaatacctgacccccctaatatgtcagctgaactgatccagctgaaggccaaggagagacatttcctcgagcagctgctggacggaaagaaactggaaaattacaaaataccagtgcctattaacgcagagttacgtaaataccaacaggacggagtgaactggctggcattccttaacaagtacaagctccacggcatcctatgtgacgatatgggtttgggcaagacgttgcagtccatctgcatcctagcgggagaccattgtcatcgcgcacaggagtacgctagaagcaaactggctgagtgcatgccgctgccaagcttagttgtctgccctccgaccctcacaggccactgggtcgatgaggttggaaagttctgcagcagggaatatctcaaccctttgcactacactggccctcccactgaacgaatccgcctccaacatcaggttaaaaggcataatttgatagtcgcctcttacgacgtggtccggaacgacatcgactttttccgaaacattaaattcaattactgcattctggatgaaggtcacgttattaagaacggcaaaaccaaactgtcaaaggcggtgaagcagctcactgctaactacaggatcattttatctggcacacccatacagaataatgtgttggaattgtggagtttattcgatttccttatgcccggatttcttggcactgagcggcagtttgccgctcgatatggtaagccaatcctcgcgagtagggacgcacgatcaagctcccgcgaacaggaggccggtgtgctggccatggatgccctgcatagacaagtgttgcccttccttctcagacgaatgaaggaggacgtgctccaagacctaccccctaaaatcattcaggactactattgtaccttgagccctctgcaggtacaattgtatgaggacttcgccaagagccgcgcaaaatgcgacgtcgatgaaactgttagtagcgccaccctttcagaggaaacagaaaagccaaagttgaaagctactgggcatgtcttccaggcactgcagtacttacgaaagctgtgcaatcatcctgccttggtcctcacacctcaacatcctgagttcaaaaccacagctgaaaagctggctgtccaaaacagctcactgcacgacattcagcacgccccaaagttgagcgctcttaaacagctgttgctagactgtggcctaggaaacggctctacatctgaatctggtaccgaatccgtggtggcacagcacaggattttaatcttctgccagttgaagtcgatgttggacatcgtagagcatgacctcttgaaaccccatcttccttcagtgacttacctgagactcgatggtagcattccgcctgggcagaggcattctattgtgtcccgctttaataatgatccttctatcgacgtgctcctattaacgacacacgtgggcggtttgggattaaacctgaccggtgcagataccgtagtctttgtggaacatgactggaatccaatgcgcgacctccaggcaatggatagagcccatcgaatcgggcagaagagggtggttaatgtctatcgactcattaccaggggtaccttggaagaaaaaatcatgggcttgcagaagttcaaaatgaacattgcaaacacggtcatttcccaggaaaattcctctttgcaatcaatgggcacggaccagctgctggacctgtttacattggataaagacggcaaggcagagaaggcagatacttccacatccggcaaggcctctatgaaaagcattctcgagaacctgtccgacctctgggatcaggaacagtacgattcagagtattcactggagaacttcatgcattccctgaagtat

SEQ ID NO: 216255 - DNA, 2100 bp, synthetic construct
  misc_feature 1..2100: note = Description of Artificial Sequence: Synthetic coding sequence
  source 1..2100: mol_type = other DNA
aagctgtggttcaaaaataccgaggactacaggcgcacagcgcttacccggctgacaagtggggtgatggagcagctcgacgtgggtattgtcccctacatagtgttgctagtggttccggttctgggcaggatgtctgaccagacagattccgtacgctttatggcgacacagtgctttgcaaccctcatacgcctgatgccacttgaggctgggatccctgatcctcctaacatgtccgcagaactcatccaactgaaggctaaagagcgacatttccttgagcaactgctcgatgggaaaaagctggaaaactataagatccccgttcccatcaacgcggaactcagaaagtaccagcaggacggggtaaactggctggcatttctcaacaaatacaagctgcatgggattttgtgtgatgatatggggcttggaaagaccctgcagagcatatgtattcttgctggcgatcactgccaccgggctcaggaatacgctcgttccaaacttgccgaatgcatgcctctcccaagtcttgttgtgtgtccacccacactgaccggccattgggtcgatgaggttgggaagttctgcagccgcgagtatcttaatccactgcactacaccggtcccccaacggagcgcatccggttgcagcatcaggtgaagaggcataatctcatcgttgccagttacgacgtagttcggaacgatatcgattttttccgaaatataaagttcaattattgtatcctggacgaaggacacgtgattaagaacggaaaaacaaagctgtccaaagccgtaaagcagctcactgcaaattataggatcatcctgagcggcacgccgatccagaacaacgtcctggaactctggtctctgtttgacttcttaatgcccggattcttgggcacggagaggcaattcgctgcccgttatgggaagcccatcctggcgtctagggatgctagaagttccagcagggagcaggaagccggagtgctggcaatggacgctctgcaccgccaggtgctccccttcctgttaagaaggatgaaggaagacgtactgcaagacctgcccccaaaaataatccaggactattactgtacactaagcccactgcaagttcaactgtatgaagacttcgcaaagtcacgagcaaagtgcgacgttgacgaaaccgtctcgtccgccacgctctcagaggagacagaaaaaccgaaactgaaggctaccggccacgtgttccaggccctccagtatctgcgtaagctgtgcaatcacccagcactcgtcctcacaccccagcatccagagttcaaaaccaccgcagagaagctggcagtccagaactcaagcttgcatgacatccagcacgcccctaagctgtcagcgctgaagcagctgctgctggattgtggcctcggtaatggatccacctccgaatcagggactgaaagcgtggttgcacagcatcgcatcctgattttctgccagctgaagtctatgctggatattgtcgaacacgacctgctaaagccccacctcccgagcgtgacatacctacgcctggatgggtcaataccgcctggacaaaggcattccattgtcagcagattcaacaatgatccctctattgatgtattactgctgactacccatgtcgggggacttggactgaaccttaccggagctgacaccgtggtgttcgttgaacacgattggaaccccatgcgcgacctccaggccatggatcgggctcacaggataggacagaaaagggtggtcaatgtttaccgcctgatcacacggggtactctggaagagaaaatcatggggctccagaagtttaagatgaacattgcaaacacagtcatttctcaggaaaactctagcctgcagagcatggggacagatcagctcctcgacctgttcaccctggataaggacggtaaagccgagaaggcggacacctccacgtccggcaaggcgagcatgaaatccatcttagaaaacctaagcgacctgtgggaccaggagcaatacgattccgagtactcactggagaacttcatgcattctctgaagtag

SEQ ID NO: 216256 - DNA, 2034 bp, synthetic construct
  misc_feature 1..2034: note = Description of Artificial Sequence: Synthetic coding sequence
  source 1..2034: mol_type = other DNA
atggaacaacttgatgtgggcatcgtgccgtatattgtcctactcgtcgtccctgtcttggggagaatgtccgatcaaaccgactccgtgcgtttcatggccacccagtgtttcgccacactgattcgcctgatgccccttgaagctggaatcccagacccgcctaatatgtcggctgagctaattcaacttaaagcaaaggagcgccatttcttagaacaactgctggacggtaagaagttggaaaattacaagattccggtcccgatcaacgccgagctaaggaagtaccagcaggatggcgtgaattggctggcttttctcaacaaatataaattgcatggaattctttgcgacgacatgggcctggggaagaccctgcagtccatctgtatcctggccggtgatcactgccaccgggcacaggagtatgccagaagcaaactcgctgaatgtatgcccctcccttcacttgtggtctgtcctcctactctgaccggacattgggttgatgaagttggcaaattctgctctcgcgaatacctgaatccccttcattatacgggccctcctactgaacgcataagactccagcaccaggtgaaacgccacaatttgatcgtcgcaagttatgatgtggtacggaacgatatcgatttttttagaaacatcaagttcaattactgtatcctagatgaggggcatgtaatcaaaaacggcaaaaccaaattgtcaaaggccgtgaagcagctgacagcgaactatcgcattatcctgtccggcacgcccatacagaataatgtcctggaattgtggagcctgttcgacttcttgatgcccggttttctgggaaccgaacggcagttcgctgctagatatgggaagcctatccttgcatccagagatgctcgatcctcctctcgggagcaggaagccggagtccttgccatggacgctttgcaccgccaggtcctgccttttctcctccgcaggatgaaggaggacgtcctgcaggatctccctccaaaaattatacaggattactattgcaccttgtccccgttacaagtccagctgtacgaggacttcgcaaaaagccgcgcaaagtgcgacgtggacgagactgtgtcctctgccacactgagtgaggagacagaaaagcccaagctcaaagccacagggcatgtgttccaggccctgcagtatctgcggaaactctgcaatcacccagcacttgttttgactcctcagcacccagagttcaaaactaccgccgagaaattagcggtccagaatagtagcctgcatgatattcagcacgctcctaagctgtccgccttgaagcagcttctcctggactgcggcctgggaaacggctccacaagtgaatctggcacagagtctgttgtcgcgcagcatagaattctgatcttttgtcagttaaaaagtatgctcgatatagtggaacacgatctcctgaaaccacacctgccctctgtgacctatttgagactcgacggatctattccacctggtcagcgccattccatcgtgtcccgatttaataacgacccttccatcgacgtcctgctgctcacgacacacgtgggtggcttgggcctaaaccttaccggagctgataccgtggtctttgtggaacatgactggaatccaatgcgggacctccaggccatggacagagcacataggattggccagaaaagggtggtgaacgtttaccgtttgatcacgaggggaacactcgaggaaaagataatggggctccagaagttcaaaatgaacattgcaaataccgtgatttcacaagagaattctagcctacagagcatggggactgaccaacttttggatcttttcactctggacaaggacggcaaggcagaaaaggcagacacaagcacttctggtaaggcaagcatgaagtctattctcgagaacttatctgatttgtgggatcaggagcagtatgacagtgaatacagtcttgagaatttcatgcactccctgaagtag

SEQ ID NO: 216257 - DNA, 1233 bp, synthetic construct
  misc_feature 1..1233: note = Description of Artificial Sequence: Synthetic coding sequence
  source 1..1233: mol_type = other DNA
atgggggcaaacgcctccaactacccccactcttgctcacccagagtcggcggtaattcacaggcccagcaaacgttcattggaacttccagttacagtcaacaggggtatggctgtgaaagtaagctgtatagcttggaccatggtcacgagaagcctcaggacaagaaaaagcgaacctctgggctggcgacacttaaaaagaaatttatcaagcgccgaaagagcaaccgctccgccgatcacgcgaagcagatgagggaactgctgtccggatgggacgtgagagacgtgaatgctctcgtcgaggagtacgaaggaaccagcgcgcttaaagaactgagtttacaggctagcttggccaggcctgaagccaggaccttgcaaaaagatatggctgatctctatgaatacaagtattgtaccgacgtcgacctgatttttcaggagacctgctttccggtgcatagggcaatattggctgctaggtgtccattttttaagacccttctgtctagctcgcctgagtatggcgctgaaattataatggatattaacactgccggaattgatatgccgatgttctccgctctgttacattacctctacacgggtgagtttggcatggaagattcgcgcttccagaatgtcgacatcctggtgcagttaagcgaagagtttggcacaccaaattccctggatgtggatatgagaggactcttcgattacatgtgttactatgatgttgtactctccttttcgtcggattctgaactcgtggaggcatttggtggcaatcagaattgtctggacgaggagcttaaggctcacaaagctgtcatttccgccagaagcccatttttcaggaatctgctccagcggagaatcaggaccggagaagaaattaccgaccgcactctgagaacacctactagaattatcctggatgaatctatcattcccaaaaagtatgccaccgtcattcttcactgcatgtacacagatgtggtagacttgagcgtgttgcattgctctcccagcgtgggctcattaagtgaagtgcaggctttggtcgccggaaaacctaatatgaccagggctgaggaggcgatggagttgtaccacattgctctcttcttggagttcaacatgctcgcccaggaggaaactaccgtgattcgccctgcttgcgccgcagaactctccaattcttgcttattgcctcagtcctag

SEQ ID NO: 216258 - DNA, 3399 bp, synthetic construct
  misc_feature 1..3399: note = Description of Artificial Sequence: Synthetic coding sequence
  source 1..3399: mol_type = other DNA
atgggagcgaatgccagcaactatcctcacagctgcagccctcgcgtcgggggtaacagccaggctcagcagacgttcataggaacctcttcatatagccaacagggctatggttgtgaatcaaaactgtacagcctggaccacggccacgagaaaccacaggataagaaaaaaagaacttctgggctggcgactctcaaaaagaaattcatcaaaaggaggaaaagtaatcgcagcgccgaccacgccaaacagatgagagaactgttgtctgggtgggatgtacgagacgttaatgcgctggttgaagaatatgaaggaacctccgccctgaaggaactgtccctgcaggcaagcctggcgagacctgaggcacgtacgctccagaaagatatggcagacctctacgaatacaaatattgtaccgacgttgatctgatcttccaagagacctgctttcccgtacacagagcaatactggctgcacgatgtcctttcttcaagactctcctgagttcttcacctgaatacggagccgaaataattatggacattaacactgcagggattgatatgccaatgttttccgccttgctacattacctgtataccggggaattcggaatggaggatagccggttccagaacgtggatatcctggttcagctttctgaggaatttggtacacccaatagcttagacgtagatatgcgcggactgttcgattatatgtgttactacgacgttgtgctgtcattctcgtctgactctgaactggttgaagccttcggtggcaatcaaaactgtctggacgaagaactgaaggcccacaaagcagtgatctcagccagatctccgttcttcaggaacctcctgcagaggcgcattagaactggagaggaaattaccgataggactttacgcacacccacccgaattatcctggacgaaagtattatccctaagaaatatgccacggtcatcttgcattgcatgtatacagacgttgttgatttgtctgtgctccactgttctccatcagtgggaagcctcagtgaggtgcaggccctagtagcaggtaagccaaacatgacacgggcagaggaagccatggaactctatcatatagcgctgtttctggagttcaatatgctcgctcagggctgcgaggatatcatagcagagtcgattagcctggacacactaattgcgatcctgaagtggagttctcacccctatgggtctaagtgggtccaccgccaggctttacacttcttgtgtgaggagttttcccaggtgatgacatcagacgtgttctacgagctcagcaaggatcacctactgacagctattcaaagcgattatttgcaggcatccgaacaggacattctgaaatacttgatcaaatggggcgagcaccagctgatgaaaaggattgccgacagagagcctaacttgctcagcggtacagcccactcagttaataaaagaggagtcaagagacgtgatctggacatggaggagctcagagaaattttgtcatccctgcttccgttcgtccggatcgagcatatactgcctatcaacagtgaggtgttgtccgatgcaatgaaacgagggttgatatcaacgccaccatccgatatgctgcctacgaccgagggaggaaagagtaacgcctggttgcgacagaagaatgcaggtatctacgttaggccaagactatttagtccctatgtggaggaggccaaatcagtgctcgacgaaatgatggtcgagcagacggacctggtgaggctaagaatggtgcggatgtcaaatgtaccagacacattatatatggtgaataacgcggtcccccaatgttgccatatgatttcccatcaacaaatttcctcaaaccagtcctcaccaccctccgttgttgccaacgagatccccgttcctagattacttataatgaaggacatggtgagacgactccaagagttgaggcacacagagcaggtccagagggcgtacgccctcaactgtggagaaggcgcaacagtgtcatatgaaattcagatacgtgttctgcgggaattcggactcgcagatgctgcagcagagctcctccaaaacccgcacaaatttttccctgacgagaggttcggggatgaatcaccactcctgaccatgcgtcagccaggtcgttgccgcgtgaacagcactccccctgctgaaactatgttcacagatctggactcatttgtcgcattccacccacccctcccccctccgccacccccataccacccgcctgccacccctattcataaccagttgaaagcagggtggaagcagcgccctcccagtcaacacccatccaggagcttttcctatccatgtaaccacagtctattccacagccgcaccgccccaaaggctgggcctccacccgtctatctgcccagcgtcaaagctgctccaccagactgcaccagcactgcgggattggggcgtcagacagtcgccgctgccgcagcaaccaccacctcaacagcaaccgccgcagccgcagccgcatctgaaaaacaagtacgcacccagccagtcctaaacgacttgatgcccgatattgccgtgggcgtcagcactctaagcctcaaagaccggcgtctgcctgaacttgccgtagataccgaacttagccagtccgtgtccgaagcaggccctggacccccacaacacctgtcttgtataccccagcggcacacacatacctcacgtaaaaagcatactttggagcaaaaaacagacactcgggagaatccacaggagtatcctgatttctacgattttagcaacgccgcttgtcggccttcaacgcccgcactgagccgaagaactcctagcccctcacagggaggatattttggacccgatctttactcccacaataaggcgtctcccagtgggctaaaatccgcatacctcccaggacagacttcaccaaagaaacaggaggaggctagacgggagtatcctctgtcacctgatggccacctccatcgccagaagaacgagccaattcaccttgacgtggtggaacagcctcctcaaaggtctgatttccccctggccgcaccagagaacgctagcaccgggccagctcacgtacggggtagaaccgcagtagagaccgatcttaccttcgggctaaccccaaacaggccgtcactctccgcctgtagctcagaggctcccgaggagaggtcggggcgaagactcgcagactccgagagcctgggacatggcgctcaacgcaacacagacctcgaaagagaggactcgatcagtcgcggaaggaggtctcccagtaagccagatttcctttacaagaagagcgccttatag

SEQ ID NO: 216259 - DNA, 2121 bp, synthetic construct
  misc_feature 1..2121: note = Description of Artificial Sequence: Synthetic coding sequence
  source 1..2121: mol_type = other DNA
atgtataccgacgtggttgacctgtccgtattgcattgttcaccatccgttggttctctgtcggaagttcaggccttagtcgccggtaaacccaacatgaccagagccgaggaggccatggaattgtaccacatcgctctgtttttggagttcaacatgttggcccaggaaccaaatctcctcagcggtactgcacactccgtgaacaagcgtggagttaagcgacgggacttggatatggaggaactgagagaaatcctcagctctctgttgccctttgtccggatagaacatatcctccccatcaattcagaggtgttatcagacgctatgaagcgtggtttgatttcaaccccaccaagcgacatgttgcctaccacagagggtggcaagtccaatgcctggcttagacagaagaacgcaggaatttacgtaaggcccagactgttcagtccttatgtagaagaggcaaaaagtgttttggatgaaatgatggtggagcagactgacctggtacgtctgcggatggtgaggatgtctaatgtccctgatactctttatatggtgaacaatgccgtgcctcagtgttgtcacatgatctcacaccaacagatctcttcaaatcagtctagccctccgtctgtcgtggctaatgaaatccccgtgcctaggctcctgattatgaaggacatggtgcgcaggcttcaggaattgcgacacactgagcaggtgcaacgtgcctatgctttgaactgtggagaaggcgctacggtgagctacgagatccaaataagagtcctccgggaatttggtttagcagacgctgctgccgaactactgcaaaatccccataaattcttccctgacgaaagattcggcgatgaatctccgcttctcaccatgaggcaaccaggcaggtgcagagtgaattccacccctcccgctgaaaccatgtttaccgacctggactctttcgtggccttccaccccccacttcctcctcctcccccaccctatcatccgccagccacccctattcataaccagctcaaagctgggtggaagcagcggcctccttcccaacacccgagcaggagctttagctatccctgtaaccatagcctgttccactccaggacagcccctaaggctggtcctcctccagtgtatctgccaagcgtcaaggcagccccacctgactgtacttccacagccggtctggggcgacagacagtcgccgctgcagcggctacgactacctccacggcgacagccgcagccgctgccgcttcagagaaacaagttcgtacccagcccgttctaaacgacctcatgcctgacatcgccgtgggggtgagcaccctttctttgaaggataggaggctgccagagctggctgtggataccgagctgtcccagtccgtgtccgaggccggaccgggacctccacagcatctctcctgcatcccacagaggcatactcacacatcccgcaagaaacacaccctggagcaaaaaaccgacaccagggaaaacccccaggagtacccagacttttacgatttctccaatgccgcttgccgcccatccacaccagctcttagccgaaggacccccagtccaagccagggcggatactttggcccagatctttacagccataacaaggcatcaccgtctgggctcaagagtgcctatctgccaggccagactagccctaaaaaacaggaggaagccaggcgtgagtatcctctatcccccgacgggcatcttcacaggcaaaagaacgaaccaatccacctggacgttgtggaacagccacctcagagatcagatttcccgctggcagcacccgagaacgccagcaccggccctgctcacgtaagagggagaacagctgtggaaacagatctgacatttgggctgacccctaaccggccttcactcagcgcatgttctagcgaggctcccgaagagagaagtggtcggcgtctcgcagactccgagagcttgggacatggcgctcagaggaatactgacctcgaaagagaggactcaataagccggggacggcgaagcccaagtaaacccgattttctttacaagaagtcggccctctag

SEQ ID NO: 216260 - DNA, 2346 bp, synthetic construct
  misc_feature 1..2346: note = Description of Artificial Sequence: Synthetic coding sequence
  source 1..2346: mol_type = other DNA
atggccggtggcgctggcgcaggcgcagatggtggcgctggcggagggggtggcggtggcgatggatcagggccatctggctccagcagcggtggcagaagccttaggggatgcgaagatatcatcgccgaatctatctcgctggatactctgatcgcaatcctgaagtggtcttcccatccatacggctcaaagtgggtgcatagacaagccttgcactttttatgtgaggaattttcacaggttatgacctcagacgtgttctacgagctttccaaggatcacctgctgaccgccatacagagcgactatctccaggctagtgagcaggacattcttaagtatcttattaagtggggcgagcatcaactgatgaagcgcatagcggatagggagccaaaccttctgtctggcacagcacactctgtgaacaagcgcggtgtgaagaggcgagatctggacatggaggagctgcgcgaaatcctttctagtcttctcccatttgtccggattgaacacatcctgcctattaacagtgaggtccttagtgatgctatgaagcggggtctgattagcactcctccctcggatatgctgcctaccactgaggggggtaagtccaacgcatggctgaggcaaaagaatgccggaatttatgttcggcctcgtctcttctcgccctatgtagaagaggccaaaagcgtgctcgacgagatgatggtggagcagactgacctggtcaggttgcgtatggtgcggatgtccaacgtacctgacacgctgtatatggtgaataatgctgtgccacaatgctgtcacatgatcagccaccaacagattagcagtaatcaatcatcaccgccttccgtagttgcaaatgaaatccccgtacccaggctcctcattatgaaagacatggtgagacgacttcaagagcttcgtcacacagaacaggtgcagcgcgcttatgctctgaactgcggagagggagctactgtatcctatgagatccagatcagagtgcttcgtgaatttggcctggcagacgccgcagctgagttgctccagaacccccataagttttttccagatgagaggtttggggatgagtcacccttgctgaccatgcgccaaccagggagatgccgggtgaactccacccctcctgctgagacgatgtttaccgacttggatagctttgttgcctttcatccaccgctcccgccaccgccacctccataccaccctcccgcaacccctatccacaatcagttgaaagccggttggaagcaaaggcccccatcccagcaccccagtcggtcattctcttatccatgtaatcactcccttttccactctcgaacggcacccaaggcaggaccaccccctgtgtacttaccctccgtcaaggcggcaccgccagattgtacgagcactgctgggctgggccgtcagaccgtggcggcagcggcagcaactactacttccacggctactgccgctgctgctgccgcttctgagaaacaggtccgaacccagccagtccttaacgatctcatgcccgacattgctgtcggcgtgtcaactctgtccctgaaggaccgacgtctgcccgaacttgcggtggacactgaactgtcacaatccgtgtcagaggctgggccaggccctccgcagcatctatcttgcattcctcaaaggcacacccacaccagtaggaagaagcacacacttgaacaaaagacggacacacgcgaaaacccccaggagtatccggatttctatgatttcagtaatgcggcatgccggccttccacaccagccttatcacgcagaaccccctcccctagccagggaggctatttcggtcctgatctgtacagccacaataaggcatctccttccggactaaagagtgcctatttgcctggccaaactagcccaaaaaagcaagaggaggcgaggcgcgagtatccattaagtccagacggacacttgcacaggcaaaagaatgagcccatccatttggacgtcgttgaacagccaccacagcgtagcgatttccctctggcagcgcctgaaaacgcctccacaggacctgcccatgtccgcggacgaactgccgtggaaaccgacctgacatttggcctgactcctaatcgtccctccctttcagcttgttcgtccgaggctcctgaagagagaagcggcagacgccttgcggatagcgaatccctcggtcacggggctcagaggaacactgatctggagcgcgaagactctatctcccggggtcgtcgctccccatctaagccagatttcctgtataagaagtctgctttatag

SEQ ID NO: 216261 - DNA, 168 bp, synthetic construct
  misc_feature 1..168: note = Description of Artificial Sequence: Synthetic coding sequence
  source 1..168: mol_type = other DNA
atgggagctaatgcgagcaattatcctcactcatgcagcccaagagtggggggtaactcacaagcccagcagaccttcatcggcacctcaagctacagccagcagggctacggctgtgagtctaagctatactccctggaccacgggcacgagaagccccaggactag

SEQ ID NO: 216262 - DNA, 1635 bp, synthetic construct
  misc_feature 1..1635: note = Description of Artificial Sequence: Synthetic coding sequence
  source 1..1635: mol_type = other DNA
atgagggaatcccaacccgaagctgagattcctctccaagatacaactgctgaggcctttacgatgctgcttaagtatatatatacagggcgagctactctgacagatgaaaaggaggaggtgctgctggacttcctatcactggcgcacaaatatggcttccctgaactcgaggattcgaccagtgagtacctgtgcactatccttaatatccagaacgtgtgcatgactttcgatgtggcttctctctacagtctgcctaagctgacctgtatgtgctgtatgttcatggatcgcaatgcacaggaggtcctgtcatccgagggattcctgtccctcagcaagaccgccttgcttaatattgttctccgggactccttcgccgcacccgaaaaagacatcttccttgctctgctcaactggtgcaagcacaacagtaaggaaaaccacgctgaaataatgcaggcagtccggctgcctttgatgagcctgacagaactgctcaatgtagtcagaccctcagggcttctttcccctgatgccattctggacgctattaaagtccgttccgaaagcagggatatggatttgaactatcggggaatgctcattccagaggaaaacatagcaacaatgaagtacggcgcacaagtggtcaaaggtgagttaaaaagtgcgctcctggacggagatacacagaactacgatcttgaccatggattcagccggcaccctatcgacgacgattgccgatccggaatcgagatcaagctagggcagccgtcaattatcaaccacatcaggatcttattatgggatagagacagccgatcctacagctatttcatagaggtgtcaatggacgaactcgactgggtgcgtgtcatcgaccatagtcaatacctttgccgctcatggcagaagctttacttccctgctagagtgtgccgctatatccgcatcgtgggaacccataataccgtgaacaaaatttttcacatagtggctttcgagtgcatgttcactaacaaaacctttaccttagagaagggccttatcgtgcctatggaaaatgtggccactattgcagattgtgccagtgtgatagagggtgtgtcgaggtcccgtaacgccttgctgaacggcgacactaagaattacgactgggacagcgggtacacgtgtcaccagctagggagcggggctattgtcgtgcagctggcccagccttacatgatcggcagcattcgcttattgctctgggattgcgatgaccggagctattcttattatgtcgaggtctcaaccaatcagcaacagtggactatggtggccgacagaacgaaagtttcctgtaaatcctggcaatccgtgacttttgaacggcagccggctagtttcatcaggatcgtgggaactcacaacaccgccaacgaagtgttccattgtgttcatttcgaatgcccggagcaacaatccagccagaaagaggagaacagtgaggaaagcggaaccggggatacctctctggccggtcagcagctggattcccacgcacttcgcgctcctagcggaagctcactgcccagctcgccaggcagcaatagcagatcacctaaccgccagcatcaatag

SEQ ID NO: 216263 - DNA, 1839 bp, synthetic construct
  misc_feature 1..1839: note = Description of Artificial Sequence: Synthetic coding sequence
  source 1..1839: mol_type = other DNA
atgagcaactcacacccactgaggccattcacggccgttggggagattgatcatgttcacatactgtctgaacacataggtgcgctcttgatcggagaggagtacggcgacgtgaccttcgtggtcgagaagaagcgcttcccggcacatagagttattttagccgctagatgtcaatactttcgcgctctcctctatggtgggatgcgggagtcccagccagaagcggaaataccattacaggataccactgccgaagcttttaccatgctcttgaagtatatctacacaggcagagccactctcacagacgaaaaggaggaggtgctcttagattttctgagcctggcgcataagtacggctttcctgagttagaggactcgacatcagaatatctctgcaccatattgaacatccagaacgtgtgtatgacattcgacgtcgcctcactttattcactgccgaagctgacgtgtatgtgctgcatgttcatggacaggaacgcacaggaagtgctttcatccgagggcttcctgtccctgagcaagaccgctctcctgaatatcgtgctaagggattccttcgcagcccctgagaaggacatcttcctggctctgttgaactggtgcaaacataattctaaagaaaatcacgcagagatcatgcaggcagtgagactgcccctaatgtccttaacagaactcctgaacgtcgtgagaccaagtggacttcttagcccggatgccattctggacgccattaaggtccgctctgagtcacgcgatatggacctgaactatagggggatgctgatcccagaggagaatatcgccaccatgaagtatggagcccaggtggtgaagggggagctgaagagcgccctgctagacggggacactcagaattacgacctggatcatggcttctcacggcaccccatagacgacgactgcaggtccggcatcgaaatcaaattggggcagccctccatcatcaaccatatcagaattttgctctgggaccgcgactcaagaagctattcttactttatagaggtgtcaatggacgaattggactgggtcagagttattgatcatagccagtatctgtgccggagctggcagaagctgtattttcccgcaagagtctgtagatatatacgcatcgttggaacccataacacagtaaacaagatcttccacatcgtggcattcgagtgtatgtttaccaataagacgtttactctagagaaaggactcattgtgcccatggagaatgtagctactatcgccgactgcgcttccgtcatcgaaggagtttcccgtagccgaaacgcgctgctcaacggggacactaaaaattacgattgggacagcggctacacttgccaccagttgggtagtggagccattgtggtccagcttgcacagccatatatgattggcagtataaggttactgctatgggactgtgatgataggtcttactcctattacgtcgaagttagtactaaccagcagcaatggaccatggtcgccgaccggactaaggtctcttgtaagagctggcagtccgtgacttttgagcgccagccggcatcatttattaggatcgtcggtactcacaacacagccaacgaggtgttccattgcgttcactttgaatgtcccgagcagcagagctcccaaaaggaggaaaattcagaggagagcggcacaggcgacacttcgttggctggacagcagctggactcccacgccctccgtgccccttccggctcatccctcccgtcctcacctgggagcaacagtagatccccgaatcggcagcaccaatag

SEQ ID NO: 216264 - DNA, 1635 bp, synthetic construct
  misc_feature 1..1635: note = Description of Artificial Sequence: Synthetic coding sequence
  source 1..1635: mol_type = other DNA
atgcgggagagtcagccagaggcagagatcccactgcaggacactacagctgaggcttttacgatgctgctgaagtacatctacactgggagggccactttaacagacgagaaggaagaggtgctcttggatttcctttccctggcgcacaagtatggcttccctgagcttgaggatagtacatcagaatacctgtgcacaatcctcaatattcagaacgtgtgcatgacattcgatgtggcctctctgtatagtctaccaaagctcacctgtatgtgctgcatgtttatggacaggaacgctcaggaagtgctgagttctgaggggttcctctccttaagcaagacagctctgttaaacattgtgctccgcgactcattcgccgcaccagagaaagacatcttcctagcccttctcaattggtgcaaacacaactctaaggagaaccacgccgaaatcatgcaggccgtccgcttgcctctgatgtctctcactgagttgctgaacgtagtgcgcccttctggactcttatcacctgacgccattctggacgcgatcaaggtaagatctgaaagccgggacatggacctcaactaccgaggtatgttaatcccagaggaaaatattgctacgatgaagtatggggctcaggtcgtaaagggagaactgaaatccgcgctcctggatggagacacccagaattacgatctcgaccatggctttagtcggcacccaattgacgatgactgccggtccggcatcgagattaagctgggccagcctagcataattaatcacatcaggattctgctctgggatagagacagccgcagttactcctattttatcgaggtgtctatggatgagcttgactgggtaagagtcatcgatcatagccagtacctgtgcagatcgtggcagaagctttactttcctgcgcgagtctgtcgttacatcaggattgtcggaacacataataccgttaataaaatcttccacatcgtggccttcgagtgcatgttcactaacaaaactttcacactcgaaaaaggactgatagttccaatggagaatgttgcaaccatagctgactgtgcgagcgtcattgaaggcgttagcaggtcaaggaacgctttacttaacggcgataccaagaattatgactgggatagcggatatacctgccaccaactgggaagtggcgctatcgtagttcagctggcccagccatacatgatcggctctatcagacttctgctgtgggactgcgacgaccggtcttattcatactatgttgaagtctctactaatcagcagcagtggactatggtggccgatcgtacaaaggtgtcgtgcaaatcatggcagtccgtcacttttgaaagacagccagccagctttatccgcattgttgggacacataacaccgctaatgaggtctttcactgtgtgcacttcgaatgcccagagcagcagtcttctcagaaagaggaaaattccgaggaaagcggtacaggcgacacctcacttgccggacagcagctagactctcacgcactaagggcaccaagcggctcaagcttaccaagttccccaggatccaatagcagaagccccaatcgccaacaccagtag

SEQ ID NO: 216265 - DNA, 1839 bp, synthetic construct
  misc_feature 1..1839: note = Description of Artificial Sequence: Synthetic coding sequence
  source 1..1839: mol_type = other DNA
atgtctaattctcatccactccgacccttcaccgcagtgggagagatcgatcacgtgcatattctgtcagagcacatcggagcactcttgatcggggaggagtatggcgacgtcacatttgtggtggagaagaaacgctttcctgcccatcgcgtgattcttgctgccagatgccagtacttccgggctctgctgtatggcggtatgcgggagtcgcagcctgaggcagaaatccctcttcaggatacgacagctgaagcttttacaatgctgctgaaatacatctacacgggccgtgcaactctcactgatgagaaagaagaggtgttgctggacttccttagcctggctcacaagtatggattcccagagttggaggattctacatctgaatatttatgcaccatactgaatatacagaatgtttgtatgaccttcgacgtggcttctctgtattccctaccaaagctaacctgcatgtgctgcatgtttatggataggaacgctcaggaggtgctctcctccgagggcttccttagcctgtcaaaaacggccctgctgaatatcgttcttagagattcattcgccgcaccagaaaaggacatctttcttgctctgctgaattggtgcaagcataactctaaggaaaaccatgcagagattatgcaggccgtgcgcctgcctctgatgtcactcaccgaacttttaaatgtggttcggccatctggcctcctgtctccagacgctatactggacgcgattaaagtccgaagcgagtcccgcgatatggacttgaactacagaggtatgttaatcccagaggaaaacattgctacaatgaaatacggagcacaggtggtcaaaggggagctcaagtcagccctgctggacggagatacccagaattacgacctggatcatggcttcagccgacaccccatcgacgacgactgccggtctgggatcgagattaaactgggccaaccgagcataataaaccacatccgtattctgctctgggatcgagactctaggtcctattcctattttatcgaagtgtcaatggacgagctggattgggtcagggttattgatcatagtcagtacttatgccggagctggcagaagctgtactttccggctcgtgtgtgcaggtacattcgaatcgttggtacccataataccgttaataaaatattccatatcgtcgcctttgagtgcatgtttacaaataagactttcaccctggaaaaagggctgattgtgccaatggagaacgtcgccaccattgccgattgcgctagcgtcatcgaaggggtgtcaaggtcacgcaatgcactccttaatggggatacaaagaactatgactgggacagcggctacacctgtcaccagctgggctcgggggctatcgtggtgcagctggcccagccctacatgattggctccatacgactgctcctgtgggactgcgacgataggtcgtattcctattacgtggaggtgtcgaccaaccaacaacaatggacaatggtggctgaccggacgaaggtgtcatgcaaaagctggcaatccgtgacattcgagagacagcctgccagttttatccgcattgtggggacacataacaccgccaacgaagtctttcattgtgtacacttcgagtgcccagagcagcagtcgtcccagaaagaagagaacagcgaggagagcgggacaggggacacctctctggcagggcagcagttagatagccacgccctcagagcaccgagcggaagctctctccccagtagcccaggcagtaacagtcggagtccaaatagacagcaccagtag

SEQ ID NO: 216266 - DNA, 279 bp, synthetic construct
  misc_feature 1..279: note = Description of Artificial Sequence: Synthetic coding sequence
  source 1..279: mol_type = other DNA
atgtccaacagccaccctcttcggccattcacagccgttggagaaattgatcacgtgcatatcctatcagaacatattggagcactgctcattggagaggagtatggcgacgtcacatttgtggtcgaaaaaaagcgctttcccgctcacagggtgatcctcgccgctaggtgccagtattttagggccctgctgtacggcggaatgcgggagtcccaacctgaggcagagattcccttgcaagataccacagctgaagcttttacaatgctcctgtag

SEQ ID NO: 216267 - DNA, 1749 bp, synthetic construct
  misc_feature 1..1749: note = Description of Artificial Sequence: Synthetic coding sequence
  source 1..1749: mol_type = other DNA
atgtgccgagctctactttacggtgggatgagggagagccaaccagaggctgaaataccactccaggacaccaccgccgaagcattcaccatgttgttgaagtacatttatacgggtagagccaccttaacggatgagaaggaagaagtcctcttagactttctttctctggcacacaaatacggctttcccgagctcgaggatagcactagcgaatatctttgtaccattctcaacatccagaacgtgtgtatgacgttcgatgttgccagcctgtattccttaccaaagctcacatgtatgtgctgcatgttcatggatcggaatgcccaggaggtgctgtccagtgaggggtttctgtccctgtccaaaacagccctgcttaacatcgtactccgcgatagcttcgccgctcccgagaaagacatctttctagccctactgaactggtgtaagcataactcaaaggagaaccatgctgaaattatgcaggccgtcagattgccactgatgtctctcaccgaactcctgaatgttgttaggccatcagggcttctcagccctgatgcaatcctggacgctatcaaagtcaggtccgagagtcgcgacatggatctgaactaccggggaatgctgattcctgaagaaaatattgccactatgaagtacggtgctcaggttgtaaagggcgagctgaagtcagccttactggatggcgacacccagaattatgaccttgaccacggcttttcccggcatccaatagatgacgactgtaggagcggcattgagatcaagctgggccagccctcaattatcaatcacattcgcatcctgctatgggaccgagatagtcgtagctattcttattttattgaggtgtccatggatgaactcgactgggtgagggtgatcgatcactcacagtacctctgtcgctcttggcagaaattgtattttccagcgagggtgtgctctggcgacggggtgagcctttggtgtccgctctggtcgcggacacccgagcttaagcaatcctccctgttaggtttgcctaaatgtaggtatattcgaattgtgggcacacataacaccgttaataagatttttcatattgtggcatttgagtgcatgttcaccaacaagacgtttactctcgagaagggtctgatcgtgcccatggagaatgtcgcaaccatagctgactgtgcctcggtcattgaaggcgtgtctcgctctcgcaatgccctgctgaatggagacaccaaaaactacgactgggactccggatacacatgccatcaactggggagcggagctatcgtggtccagctcgcccagccttatatgatcggaagcattaggctgctgttgtgggattgcgatgaccgatcatactcatactatgttgaggtgtcaactaaccagcagcagtggacgatggtcgctgataggactaaggtgagttgcaagagttggcagagcgtgaccttcgagcggcagcctgcatcgtttatcagaatagtggggactcacaatacagccaacgaagtgtttcactgcgtccattttgagtgtccggagcagcagagtagccagaaagaggaaaactctgaggagtccgggacaggggacactagcctggccggacagcagctcgactctcatgcgttgcgggcaccttctggctcatctctgccttccagtcccggaagcaactctagatcaccaaacagacagcatcaatag

SEQ ID NO: 216268 - DNA, 2211 bp, synthetic construct
  misc_feature 1..2211: note = Description of Artificial Sequence: Synthetic coding sequence
  source 1..2211: mol_type = other DNA
atgagtctgagcgaaaatagtgtattcgcctatgaatcaagcgtccattctacgaacgttttgctgtctcttaatgatcagcgcaagaaggacgttctgtgcgatgtaaccatcttcgtagaggggcagagattcagggctcataggtccgtactggccgcttgctcgagttacttccactcccggatagtgggacaggccgacggcgagctgaatattactctgcccgaggaggtgacagtcaaaggcttcgagccccttatacagttcgcttacacggccaagctcattcttagcaaggaaaatgtcgacgaggtctgcaagtgcgttgaattcctctcagtgcacaacatagaggagtcatgctttcagtttctcaaattcaagttccttgacagcactgccgaccagcaagaatgcccaagaaaaaaatgcttttcctcacattgtcagaagactgatctcaaattgtccctcctggaccagagggatttggaaacggatgaggtggaggagtttctagagaacaaaaatgttcagacaccgcagtgcaaacttaggagataccagggaaacgctaaagccagtcctcctttacaagactcagcctctcagacctacgaaagcatgtgtttagaaaaggatgccgcactggcattgccaagcctctgccccaagtacagaaaattccaaaaagccttcggtactgatcgggtgagaactggcgagagctctgtaaaggatattcatgccagcgtgcagcccaacgaaaggtctgagaacgagtgtcttggcggagtgcccgagtgcagggatctacaggtgatgctgaagtgcgacgagtccaagctagccatggagcccgaggaaacgaagaaggaccccgctagccagtgcccgacagagaagtctgaagtcacccccttcccacacaactcctccatcgatccccacggactgtattcgttgagccttttacatacctacgatcagtacggagacctgaactttgcaggcatgcagaacaccacagtactcacagagaagcccctttctggcacggatgtgcaggagaaaacatttggagagtctcaggacctccctttgaagtctgatctgggcacccgtgaagatagctccgttgcgtcctctgatagatcctcagttgagcgcgaggttgctgagcatttagcaaaaggcttttggagcgatatctgctcaacggacacaccatgtcagatgcagctgtcccctgctgtcgctaaggacgggtcggaacagattagccagaagcgcagcgagtgtccttggctgggaatacgaattagcgaaagtcctgaacccggtcagcggacattcacgacactgtcaagcgtgaactgccccttcatcagtactttgagcacagagggctgcagctctaacttggaaatagggaacgatgattatgtgtcagagccacagcaggagccgtgtccctatgcctgcgtaatttcgcttggtgacgacagtgagacggatactgaaggcgacagtgaaagttgctccgctcgcgaacaagagtgcgaagttaaactgccattcaacgctcagagaataatctctctttctagaaatgactttcaaagcctgctgaagatgcataaattgacccccgagcagttggattgcatacacgatatccgaaggcgctctaaaaacagaatagcagcccaacggtgtagaaagcgcaagctcgattgcattcaaaacctggaaagtgagatcgagaaactgcagtctgagaaagaaagcttgctcaaggagagagatcacatcttgtctacacttggcgagaccaagcagaacctgacggggctatgccagaaggtctgcaaagaagctgccctcagtcaggagcagatacagatcctggctaagtattctgctgccgactgccctctgagttttcttatcagcgagaaagataaaagcacacccgatggagagctggcgttaccatccatcttcagcctgtcagacaggccaccggctgtcctgcccccatgcgctagagggaactcggagccaggatatgcccgaggtcaggaatcacaacaaatgtcaaccgcgacaagtgagcaagctggacctgccgagcagtgccgtcagtccggcggaattagtgacttctgccagcaaatgactgacaagtgtaccacagacgagtag

SEQ ID NO: 216269 - DNA, 2211 bp, synthetic construct
  misc_feature 1..2211: note = Description of Artificial Sequence: Synthetic coding sequence
  source 1..2211: mol_type = other DNA
atgagcctctcagagaacagcgtcttcgcatacgagtctagtgtgcacagtactaacgtgttgctctctctgaatgaccaaagaaagaaggatgtcctctgcgatgtgactatatttgtggagggtcagagatttagggcacatagatcggtactggcagcctgcagcagctactttcattctcgcatagtgggtcaggcggacggggaactaaacatcacgctcccggaggaggtcacagtcaagggtttcgaacccttaatccaatttgcgtacactgccaagctgatcctgtccaaggaaaacgttgatgaggtttgtaagtgtgtggagttcttgtcggtgcacaatatcgaggaaagctgttttcagttcctaaagttcaagttcttggactctacagctgatcagcaggaatgcccacggaagaagtgcttctcgagtcattgtcagaaaaccgacctgaaactctctcttttggatcagcgcgatctggagaccgacgaagtggaggagttcttagagaacaaaaacgtacagactccacagtgcaaactgcgcagataccaagggaatgctaaagctagcccccctctccaagattctgcatctcagacatacgagtccatgtgtctcgaaaaggatgccgctcttgctttgccttccctatgcccaaaatataggaaattccagaaggcttttgggacagacagggtgcgcaccggtgagtcgtctgtcaaagatattcacgcttctgtgcagcccaacgagcggtctgagaatgagtgtctcgggggagttcctgaatgtcgggacttacaagtgatgctaaaatgcgatgagtccaagctggccatggagccagaggagacaaaaaaagatccagcctcccagtgtccaacagagaaatcagaagtcacaccattcccacataacagctcaatcgacccacatggcttgtattccctgtccttgctgcacacctacgatcagtatggagatctcaacttcgcagggatgcagaacacgactgtgctgacagagaagcccctgtcagggaccgatgtgcaggaaaaaacttttggcgagtcccaggacttacctctgaaatcggatcttggtacccgggaggatagttccgtagcctcttccgaccgatcttccgtagaacgggaggtcgcagagcatctcgcaaagggcttttggtccgacatttgttccaccgacactccttgtcagatgcagctatcccccgctgtggccaaggacggtagtgagcagatctctcagaagcggagcgaatgtccctggctgggcattcgaatcagcgagtcccccgaacccggacagcgcactttcactaccctcagtagtgtcaactgtcctttcataagtacactgtctaccgaaggttgcagcagtaatctagaaataggcaacgacgattacgtgagtgagccacagcaagaaccctgtccatacgcatgcgtgatcagtctgggcgacgacagcgagactgacactgagggagattccgaaagttgttcagcccgagaacaagagtgcgaggtcaaactgccctttaatgctcagcgcatcatcagcttatcccggaatgacttccagagtctgctcaagatgcacaaactgacgccggagcagctggattgtatccacgacatacgccgtcgcagcaaaaataggatcgccgcacaacgctgccggaagagaaaactggattgtattcaaaatctggaaagtgagatcgaaaagctgcaatccgagaaggagagcctgttgaaggaacgcgaccatattctatcgaccctcggggagacaaagcagaatttaacagggctctgtcagaaagtctgtaaagaggcagcccttagtcaggagcagatacaaatcctggctaaatacagtgcagccgattgtcccctaagctttcttatttccgagaaagataaaagcacccccgatggggagctggctctgccatcaatcttctctctatcagatcgtccccctgctgtgctgcccccttgtgccagggggaattccgagccgggatacgctagaggccaagagtcacagcaaatgtcaaccgccaccagcgaacaagctggcccagccgagcagtgccggcaatctggcggtattagcgacttctgccagcagatgaccgacaaatgcactacagacgagtag

SEQ ID NO: 216270 - DNA, 513 bp, synthetic construct
  misc_feature 1..513: note = Description of Artificial Sequence: Synthetic coding sequence
  source 1..513: mol_type = other DNA
atgagtctaagtgaaaactcagtgttcgcctacgagtctagcgtccacagcaccaatgtactgctctcgctcaacgaccagagaaagaaagatgtcctctgcgatgtgaccatcttcgtggaaggccaacgattccgagcccaccgctccgtgctcgctgcctgctcaagttactttcattcccggatcgttggccaggcagacggggaactcaacatcaccttgccagaagaagtgacagtcaaggggtttgaacctctgatccagttcgcttacacggcaaagctgatcctgtccaaagagaacgtggacgaggtgtgtaaatgtgtcgagttcctgtccgtgcacaatatcgaagaaagttgttttcaattcttgaagttcaagtttctggactctacagccgaccagcaggagtgtccaagaaagaaatgtttttcttcccactgtcagaaaaccgatctaaaactgtcgcttctggaccagcgggacctcgagactgacgaggtgtag

SEQ ID NO: 216271 - DNA, 663 bp, synthetic construct
  misc_feature 1..663: note = Description of Artificial Sequence: Synthetic coding sequence
  source 1..663: mol_type = other DNA
atgagcctttccgaaaactccgtttttgcttatgaatcctccgtgcacagcacaaatgtcctgctttctctcaatgaccagcgcaagaaagacgtgctgtgcgacgtgactatttttgtcgaaggacagaggttcagagcacacagatccgtgctggctgcctgtagctcctactttcactctcgcatagtgggccaggcagatggagagcttaacatcactctgcccgaagaagttactgtaaagggatttgaacccttaatacagtttgcctacacggctaaacttattctgtctaaagaaaatgtggacgaggtgtgcaagtgcgtggagtttctgtcggtacacaacattgaagagtcatgtttccaatttctcaagttcaagttcctagactctacagcagatcagcaagagtgtccgagaaaaaagtgtttctcatcccactgccaaaagaccgacctgaagctctctctcttagaccaacgcgacctggaaactgatgaagtggaggagttcctcgaaaacaagaacgtacaaacaccacaatgcaaacttaggcggtatcagggaaacgctaaggcatccccacccctccaggattcagcctcacagacttacgaatccatgtgtctggaaaaggatgctgctctggccctgtag

SEQ ID NO: 216272 - DNA, 678 bp, synthetic construct
  misc_feature 1..678: note = Description of Artificial Sequence: Synthetic coding sequence
  source 1..678: mol_type = other DNA
atgtccttgagtgagaattccgtgtttgcctacgaatcttccgtgcactccacaaacgtccttctctcgctgaatgatcaaagaaaaaaagacgtgctctgcgacgtgacaatcttcgtggaggggcagcgcttcagggctcatcgctctgtcttagcggcttgcagcagctatttccactcacggatagtgggccaggcagacggcgagcttaacatcacactcccggaagaggtgactgtcaagggttttgagccattaattcagtttgcttacactgccaagctgattctctcgaaggagaacgtggacgaagtgtgtaaatgcgtcgagttcctctcagttcacaacatcgaggaaagctgttttcaatttctgaagttcaaatttctggattccacagccgaccaacaagagtgccctcggaagaaatgtttctcctcccactgtcagaagacagatctaaagctatctctgctcgaccaaagggatctggagactgatgaggttgaggagttcttggaaaacaagaacgtgcaaacacctcagtgtaaactgcgtaggtaccagggaaacgccaaagcgtctcctcccctccaagactctgcatcccagacatacgaatccatgtgtcttgagaaagacgcagccctagccctgcctagcttatgcccttag

SEQ ID NO: 216273 - DNA, 78 bp, synthetic construct
  misc_feature 1..78: note = Description of Artificial Sequence: Synthetic coding sequence
  source 1..78: mol_type = other DNA
atgagcctgagcgagaactcggtatttgcctacgagagttccgtgcattctactaacgtgcttctcagtttaaactag

SEQ ID NO: 216274 - DNA, 78 bp, synthetic construct
  misc_feature 1..78: note = Description of Artificial Sequence: Synthetic coding sequence
  source 1..78: mol_type = other DNA
atgtcgctatccgagaactcggtgtttgcctacgagtctagcgttcattccactaacgttttactgtccctgaattag

SEQ ID NO: 216275 - DNA, 78 bp, synthetic construct
  misc_feature 1..78: note = Description of Artificial Sequence: Synthetic coding sequence
  source 1..78: mol_type = other DNA
atgtcgctgtctgagaatagcgtgttcgcttacgaatcaagcgtgcattccactaacgtgttgcttagtcttaattag

SEQ ID NO: 216276 - DNA, 78 bp, synthetic construct
  misc_feature 1..78: note = Description of Artificial Sequence: Synthetic coding sequence
  source 1..78: mol_type = other DNA
atgagcctctcagaaaattcggtcttcgcgtacgagagcagcgtgcactcaaccaacgtactcctgtctttaaactag

SEQ ID NO: 216277 - DNA, 78 bp, synthetic construct
  misc_feature 1..78: note = Description of Artificial Sequence: Synthetic coding sequence
  source 1..78: mol_type = other DNA
atgagcttatccgaaaattccgtcttcgcctacgaatcctccgtgcactctactaatgtgcttctgtctttgaactag

SEQ ID NO: 216278 - DNA, 2526 bp, synthetic construct
  misc_feature 1..2526: note = Description of Artificial Sequence: Synthetic coding sequence
  source 1..2526: mol_type = other DNA
atgagcgtcgacgagaagccagatagtcctatgtatgtctacgagagcaccgttcattgcactaatatcctgttgggcttgaacgatcagcgcaaaaaagatattctgtgtgatgtcacgttgatcgtggagaggaaggagttcagggcacatcgggctgtcctggctgcttgctcagaatatttttggcaggccctggtaggacaaaccaagaatgatctcgttgtatctctgccagaggaagttacggctcgtggatttggaccgctgcttcagttcgcttacacagccaagctgcttcttagcagagagaacatcagagaggtcatcagatgtgcagaatttttgagaatgcacaatctggaagattcctgtttctctttcctgcagacccagttgctaaactcagaagatggtcttttcgtctgtagaaaggacgcggcatgtcagcgaccccacgaagattgcgagaattccgccggtgaggaggaagacgaggaggaagaaactatggactccgagactgcgaagatggcatgcccacgagaccagatgctgcctgaaccaatttccttcgaggcagctgctatccctgtcgccgagaaagaagaggcccttttgccagaacctgatgtgcctacggacactaaggagagctcggagaaggatgcgctcacgcaatatccccgttacaaaaagtatcaactcgcctgcaccaagaatgtttacaacgcctccagtcatagtacatctgggttcgcaagtacattcagagaggataatagcagcaactcccttaagcccggactggccagaggacagattaaatccgagccaccgtccgaggaaaacgaagaggaaagtatcactctgtgcctgtctggagacgagcccgacgcaaaggatcgcgcaggcgacgttgaaatggaccgaaagcagccgtcgccagctcccacccctactgccccagcaggcgcagcttgcctggaaagaagtaggagcgtagccagccctagctgcctgcgatccctgttcagcatcaccaagagtgttgagttgtctgggttgcctagcacatcccagcaacactttgcccgaagtcccgcttgcccctttgataagggaatcacccaaggcgatttgaagacagactacacccccttcacaggcaactatgggcagcctcacgttggacaaaaagaagtctcgaacttcaccatgggctctcccttgaggggccctggcctggaagccctgtgcaagcaggagggcgagttggaccggaggagtgtaatcttttcatccagtgcttgcgaccaagtgtcaacttccgttcatagctattccggtgtgtcctctctcgataaggatctgtccgagcctgtacccaaaggactctgggtgggggctgggcagagcctgcccagctctcaggcatatagccacggcggtctgatggccgatcatctgccgggtcgcatgcgtcccaacacctcttgccccgtgcccataaaagtgtgccccagatccccccctctggaaaccagaacacgtacatccagttcttgctcatcctacagctatgctgaagatggcagtggaggatccccttgcagtcttccgctttgtgaattcagtagctccccgtgttcgcagggcgctcggttcctggccacggaacaccaggagcccggactgatgggggacgggatgtacaatcaagtaagaccccagattaaatgtgaacaaagctatggtacaaatagttctgacgagtccggcagtttcagcgaagcagatagtgaatcctgccccgtgcaggatagaggccaggaagtgaagctgccctttcccgtggaccagatcacagatttgcccagaaatgactttcaaatgatgatcaagatgcacaaacttacatcggagcagttggaattcattcatgacgtccgccgtaggagcaagaatcggatcgcggcacaaaggtgccggaaacgaaaactcgattgtattcagaatctagagtgcgagatcaggaagttagtgtgcgagaaagagaagctgctgagcgagcgtaaccagctcaaggcctgcatgggggagctgctcgacaactttagttgcctgagccaggaggtttgtcgggacattcagtctcctgagcaaatccaggcattgcacaggtattgccccgtgctgcggccaatggatctcccaaccgcttcaagtatcaatcccgctccgctgggagcggagcagaatatcgcggcttcgcaatgtgccgtcggcgaaaatgtgccctgctgtctcgaacccggagctgccccaccaggaccaccatgggcaccgagtaatacatcagagaactgcacaagtggcaggcgcctggagggcactgacccaggaacttttagcgagaggggtccaccccttgagccaagatcccagaccgtaaccgtcgacttctgccaggagatgactgacaaatgcaccaccgatgagcaacctcgaaaggactatacctag

SEQ ID NO: 216279 - DNA, 2526 bp, synthetic construct
  misc_feature 1..2526: note = Description of Artificial Sequence: Synthetic coding sequence
  source 1..2526: mol_type = other DNA
atgtctgtagatgaaaaaccggatagtcccatgtacgtgtatgaatctacagtgcattgtacaaacatactgctggggctgaacgatcaacggaagaaggatatactttgcgacgtcactctaatcgtggaacgcaaagaatttcgcgctcaccgagccgtgttggccgcttgcagcgaatacttctggcaagcgctggtggggcagaccaagaacgacttggtggtgagtctcccagaggaagtaaccgccagagggttcggcccattgcttcagtttgcatatacagcaaagctgcttttaagccgcgagaatataagagaggtgattaggtgcgcagaattcctgcgcatgcacaatttagaggacagctgtttctcatttctgcagactcaactgctcaacagcgaagacggactgttcgtctgtcgcaaggacgcagcctgtcaacgccctcacgaagattgcgagaatagtgctggtgaagaggaggatgaagaagaggagaccatggattctgagaccgccaaaatggcatgtcctcgggaccaaatgctgcccgaaccaattagttttgaagcagctgcgatcccagtcgctgaaaaggaagaggcactgctgccagagccggatgtacctacggacacaaaggagagttctgagaaagacgcactgacacagtatcctcgctataagaagtaccagcttgcgtgtaccaagaacgtttataatgccagctctcatagcacgtccggatttgcgtcgacatttagagaagataattcgtctaactcgcttaagccgggtcttgcacgcggtcaaatcaagtccgaacccccttccgaggagaatgaggaggagagcattaccctatgcctgagtggagacgaacccgatgcgaaagatagggctggggacgttgaaatggataggaagcaacctagtcccgcacctacccctaccgctcccgctggcgctgcttgtctcgagcgtagtagatccgtggcctctccctcctgtctccgctccctgttctctattactaagtccgtggaactatccgggctgccaagtacctctcagcagcactttgcgagaagtccggcatgcccatttgataaaggaatcacccaaggggatctgaaaacagattatacccctttcacaggcaactacggccagcctcacgtgggacaaaaggaagtaagcaatttcactatggggtccccactgcgtggaccaggcctggaagccttatgtaaacaggaaggtgagctcgatcgcaggtcagtgattttttcaagcagcgcttgtgatcaggtcagcaccagtgtccacagctactctggggtcagcagcctggacaaagacctaagtgaaccagtgcctaagggcctgtgggtcggtgcaggacagtcgctaccatcatcccaggcctactcccacggaggcctgatggccgatcatctgcccggtcgtatgagaccaaatacctcttgcccggtacccatcaaagtatgtccaaggtctcctcccttggagacacggacccggaccagttcatcttgttcatcctacagttacgctgaagacggctctggcggttccccatgcagcctcccgctgtgtgaattctcatcaagtccctgcagccaaggagcacgattcctggccactgagcatcaagaaccaggcctcatgggggatggcatgtacaaccaggtccgtcctcagatcaagtgcgaacaatcatatggcacgaattcctccgacgagtctggaagctttagtgaagcggattccgagtcctgtcctgtgcaggaccgtggccaagaggtgaagctgccattccctgtggaccagatcacagatctgccacgcaacgacttccagatgatgatcaaaatgcacaaactgaccagtgaacagttagagtttatccacgatgtgaggcgcagatccaagaaccgcatcgcggctcagcgttgtagaaaacgtaaactggactgcatacagaacctggaatgcgagattcggaaattagtatgtgagaaggaaaagttactaagtgaacgcaatcaactgaaggcctgcatgggcgagttgctggacaacttcagctgtctcagccaggaagtttgcagagatattcagtcccctgagcagatccaagctttgcacagatactgcccagtactgaggccaatggatctgcccaccgcctcctcaattaatcccgcacccctgggcgctgaacagaacatagcagcctcccaatgtgccgtcggagaaaacgtgccctgttgtctcgaacctggcgctgccccacctggcccaccgtgggccccttctaacacgagcgaaaactgtacctctggcaggagactcgaggggactgaccccggaactttctcagagagaggtcctccactggagccacgtagccagaccgtcaccgtggacttttgccaggaaatgactgataaatgcaccaccgatgagcagcccagaaaggactatacctag

SEQ ID NO: 216280 - DNA, 246 bp, synthetic construct
  misc_feature 1..246: note = Description of Artificial Sequence: Synthetic coding sequence
  source 1..246: mol_type = other DNA
atgagcgtggacgagaaacctgattctcccatgtacgtttacgagtccacggtgcactgtaccaatattctcttgggacttaacgatcagcggaagaaagacatactctgtgatgtgacactgatagtggaacggaaagagttccgcgcacaccgcgctgtcttggcggcatgctcagagtacttttggcaggcattggtcgggcagacgaaaaatgatctcgtcgtgtctttgccggaggagtag

SEQ ID NO: 216281 - DNA, 246 bp, synthetic construct
  misc_feature 1..246: note = Description of Artificial Sequence: Synthetic coding sequence
  source 1..246: mol_type = other DNA
atgtcagtcgatgagaagcccgacagccctatgtatgtgtacgaatccactgtccactgtactaacatcttgctagggctgaacgatcagaggaagaaagatatcctgtgtgacgtgacattgattgttgagagaaaggaattcagagcacatagagccgtgctggccgcatgttcagagtatttttggcaggcactggtcggtcagactaaaaacgatctcgttgtctctctgcccgaggaatag

SEQ ID NO: 216282 - DNA, 2526 bp, synthetic construct
  misc_feature 1..2526: note = Description of Artificial Sequence: Synthetic coding sequence
  source 1..2526: mol_type = other DNA
atgagtgtggacgaaaagcccgactcccccatgtacgtgtatgagtccacagtccactgcactaatattcttctcggtctgaacgaccagcgaaagaaggacattttgtgtgatgtaaccctgattgtcgagcggaaggaattccgcgctcatcgagcagtgctggccgcttgcagcgaatacttttggcaggcactggtgggccagacaaaaaatgatctggtggtgtctcttcctgaagaggtaactgccaggggattcggtcctcttctccagtttgcctacaccgcaaagttgctcctgagccgggagaatatacgcgaggtcatccgctgcgccgaatttctgcgcatgcacaacttagaagattcgtgcttcagcttcttgcagacccaactgctgaatagcgaggatggacttttcgtgtgtcgaaaagacgccgcatgtcagaggccacatgaagactgcgaaaattccgctggggaggaggaggatgaggaagaagaaactatggactccgagacagcaaaaatggcttgccctcgggatcagatgctgccagagccaatcagcttcgaggctgccgctatccccgtcgccgaaaaagaggaggccctcctacccgagcccgatgtccctaccgacacaaaagaatcaagcgagaaggacgctctgacccagtaccctagatataaaaagtaccagctggcttgtacaaaaaacgtatacaatgcaagttcccactccaccagcgggtttgcttctaccttcagagaggacaactcttcaaactcactgaaacctggcctcgccagagggcaaatcaaatcagaaccgccttctgaggagaacgaagaggagagcatcaccctttgtttgtccggagatgagccagatgctaaggatcgcgcaggagacgtcgagatggacaggaaacaaccgtctcctgccccaactcctactgccccagccggtgctgcctgcctagagcggtcccgctctgtggcttctccgtcttgtctgcgtagccttttctccataactaagtccgtggagcttagtggactgccatcaacatcgcagcagcattttgctcgctcaccggcttgtccatttgacaaaggaattacacagggcgaccttaaaaccgattacacaccctttacggggaattacggacagccgcatgtcggccagaaagaagtctcaaatttcaccatggggtcaccattgcgtggtccagggcttgaggccctttgcaaacaggagggcgagttagatcggagatccgtgattttctcttctagtgcgtgcgaccaagtctcaacaagcgtccactcctacagcggagtctcctccctggacaaggatttgtccgagcctgtgcccaaaggcctgtgggtaggtgcaggtcagagcctccccagttcccaggcctatagccacggcggtctgatggccgaccaccttccagggaggatgaggccaaatacctcctgtcccgtgcccataaaggtttgtccgagatccccaccccttgagactcgaactcgaactagctcctcttgcagttcgtacagctatgctgaggatggcagtggagggagtccttgtagtctccccctgtgcgaatttagcagttctccctgttcccagggtgccaggttcctggctactgagcaccaagaaccgggactcatgggggatggtatgtacaaccaagtgcgtccgcagatcaagtgcgagcagtcttacggcaccaattcttccgacgaatccggttcattcagtgaagctgatagcgagtcatgcccagtccaggaccgcggtcaggaggtgaagctgccctttcccgtggaccagatcaccgatctccctcgtaatgatttccagatgatgatcaaaatgcacaagcttacctcagaacagcttgagttcattcatgatgttcggcgtcgctcaaagaatcggatagcggctcagcggtgtaggaagcggaagctggactgcatccagaatctcgagtgcgagattagaaagttggtctgtgaaaaagagaaattgctgagcgagcggaatcagttaaaagcttgcatgggtgagctcctggataattttagttgtctcagtcaggaagtttgcagggacattcagtcccccgaacagatccaggcactgcatcgctattgcccagttctccggccaatggatctaccaacggcatcatctatcaatccagccccacttggggctgagcagaacattgctgcatcccaatgcgcagtgggggagaatgtgccttgctgtttggagccaggcgcagctcctcctggacccccatgggccccttctaacacatcagaaaattgcacttccggcagacggttggagggcacagacccaggcacgttcagcgaacgcggacccccattagagccacgctcccaaacagtcaccgttgatttctgccaggagatgacagacaagtgtacaacagatgagcaacctcggaaagattacacatag

SEQ ID NO: 216283 - DNA, 477 bp, synthetic construct
  misc_feature 1..477: note = Description of Artificial Sequence: Synthetic coding sequence
  source 1..477: mol_type = other DNA
atgagtcacggcaaagggaccgacatgctccctgagatagccgcagctgtgggattcctgagctcactgctgcgtactcgcggatgcgtatccgaacagagacttaaggtgttttctggagctctacaagaagccctgaccgaacattataaacaccattggtttcccgaaaagccgtccaaaggatccggctatcgctgtatccggatcaaccataagatggatcccataattagccgggtggctagccagatcggtctgagtcagccccagctgcaccagctcctgccatctgaactgaccttgtgggtggacccctacgaggtgtcctaccgcataggggaggatggcagcatttgtgtattatacgaggaggcgccacttgcagccagctgcggcttactgacgtgcaaaaaccaggtacttctgggccgatcctccccgagtaaaaactatgtcatggctgtgtcgagctag

SEQ ID NO: 216284 - DNA, 3258 bp, synthetic construct
  misc_feature 1..3258: note = Description of Artificial Sequence: Synthetic coding sequence
  source 1..3258: mol_type = other DNA
atggatacacccgagaacgtactgcagatgttggaggctcacatgcagtcctataagggaaacgatccgttaggcgagtgggagagatatatccaatgggtggaggaaaactttccggaaaacaaagagtatctgattactctgctggaacacctgatgaaagagtttctggacaagaaaaaataccacaatgaccccagatttatctcttactgcttgaagtttgccgaatataacagtgacctgcaccaattctttgagtttctctacaaccatggtatcggtaccctttcaagtcctttgtacatagcctgggcaggacatctggaggcccaaggcgagttgcagcacgcgtcagctgtgttgcagagggggatacaaaaccaggcggagcctcgagagttcctccaacagcagtaccgcttatttcaaacacgcctgacggaaacgcatctgcccgctcaggctagaacttctgaacccttgcacaatgtgcaggtacttaatcagatgataacatcaaagtccaatccagggaataacatggcctgcatatccaagaaccagggcagtgaactgagtggggttatctcctctgcttgcgacaaagaaagtaatatggagcggagagttataacaatcagtaaatctgagtattctgttcatagtagccttgcaagcaaagttgacgtggaacaagtcgttatgtactgcaaggagaagctgattcgaggtgaatctgagttttcatttgaggagcttagagcccagaagtacaaccagaggcgaaagcatgagcagtgggtgaatgaggaccgccactacatgaaaaggaaggaagctaatgccttcgaagagcaacttttaaagcagaagatggacgaactccataagaaactgcaccaagtggtagaaacaagccatgaggacctgccagcttctcaggagcgcagcgaggtgaaccctgccagaatggggccttccgtgggatcccagcaggagcttagagcaccatgtttacccgtgacttaccaacagactccggtaaatatggaaaagaatcccagagaggcccctcccgtcgttcccccacttgcaaacgccatttccgccgctctcgtcagtcctgcaacctctcagtccatcgctccccctgtgcccctcaaagcccaaacagttaccgattcgatgtttgccgtcgcttcaaaagatgccggttgtgtgaacaaaagcacccacgaatttaaacctcaatcgggcgcagagatcaaagaaggatgtgaaactcataaggtggctaacacaagttcatttcatacaaccccgaacaccagcctcggtatggtgcaggccactccatccaaggtccagccatcgcccactgtccataccaaagaggcattaggttttattatgaacatgtttcaagcaccaacgctcccagacatttcagacgataaggatgagtggcagagcttggatcaaaacgaagacgcattcgaggctcagttccagaagaatgtgcggagctctggagcctggggagtgaataaaattatctcttccctcagtagtgcttttcacgtgtttgaggacgggaataaagagaattacggcctcccgcaaccaaagaataagccaacaggggcaaggaccttcggagagcggagcgtctctagactcccttcaaaacctaaggaagaggtgcctcacgcagaagaatttctggatgattctaccgtttggggaatccggtgcaataagactcttgctcctagccctaaatctcccggtgactttacctcggccgcacaactcgcctctacccccttccacaaactgcccgtggagtctgttcacatcttagaagataaagaaaacgtggttgctaaacagtgcacacaggctaccctcgattcgtgtgaagaaaacatggttgtgccaagtcgtgatggcaagttttctccaatccaagagaagagtcccaagcaggccctgtctagtcacatgtattccgctagccttctgagattgtcacagcccgcagccggaggagtgctaacatgtgaggccgaactgggagtggaagcttgccgactcacagacactgatgcagccatcgccgaagatcctccagacgccatcgctggtctacaggctgaatggatgcagatgtcctccctcggcacagtcgatgcgcctaatttcatcgtcgggaatccctgggacgataaactaatatttaagcttttgtcagggttgtctaagcctgtttctagttacccaaacaccttcgagtggcaatgtaaactccccgctatcaaacccaagacagagttccagttggggtcaaaacttgtgtatgttcatcaccttctcggagagggtgctttcgcccaggtttatgaagccacccagggtgacctcaacgatgccaagaacaagcagaaattcgttcttaaagtgcaaaaaccagctaatccctgggaattttacatcggcacccagctcatggaaagacttaaacctagtatgcagcacatgttcatgaaattctacagtgcccacctgttccagaacggtagcgttcttgtgggagagctgtactcttacggcaccctgttaaatgccatcaatttgtataagaacacccccgagaaagttatgccgcagggtctggttatctcttttgccatgcggatgttatacatgatcgagcaggtccacgactgcgaaataatccatggcgacattaaacccgataattttatactgggcaatggctttttagagcaggatgacgaggatgatttaagcgccggtctggccttaattgatcttggacagtcaatcgatatgaaactcttcccaaaggggacaatctttaccgctaaatgtgagacaagtggtttccaatgtgtggagatgttgagcaacaaaccttggaactatcagattgattactttggagtagccgcaacagtgtattgtatgctgttcgggacctatatgaaggtcaaaaatgaggggggagaatgtaaacccgagggccttttccgacgactgcctcatctggacatgtggaacgagttctttcacgtcatgctcaatattcccgattgccatcacttgccaagcctcgatctactgaggcagaagctcaaaaaggtgttccagcagcattacacaaacaaaataagagccctgaggaatcgcttgatcgtgcttttgttagaatgtaagcggagcagaaagtag

SEQ ID NO: 216285 - DNA, 3087 bp, synthetic construct
  misc_feature 1..3087: note = Description of Artificial Sequence: Synthetic coding sequence
  source 1..3087: mol_type = other DNA
atggacacgcctgagaatgtcctgcagatgttagaggctcatatgcagtcctataaggggaatgaccctctgggggaatgggaacgctacatccagtgggtggaggagaattttccggagaacaaagagtatctgatcacgcttctcgaacatttgatgaaggaattcctggacaagaagaagtatcacaacgatcccaggtttataagttactgtctcaagtttgccgaatacaatagcgacttgcatcagttctttgagtttctctataatcacgggatagggactctcagttctcctttatacatagcttgggcgggtcacctggaggcccaaggagagctacaacacgcctccgctgtgctgcagcgagggatacagaaccaagctgagccccgtgagttccttcagcaacagtaccggctgttccaaaccaggctaactgagacccatcttcctgcccaggcccgtactagcgaacccctgcataacgtccaagtgttgaatcagatgatcactagtaagagcaatccaggtaacaacatggcttgcatctccaagaatcaaggcagcgagctgtcaggagttatctcaagtgcatgcgacaaggagtctaacatggaaagaagagtgatcactatttccaagagcgagtattctgtgcattcctctctggcctctaaagttgatgtggagcaggtggtgatgtattgtaaggagaaactgattcgtggggagtccgaattcagtttcgaggagttacgggcacagaaatataatcagcggagaaaacatgaacagtgggtgaacgaagatcggcactatatgaagcggaaggaagccaacgcattcgaagaacaactgctgaagcaaaagatggacgagcttcacaaaaagctccaccaggtcgtagagacatcccacgaggacttgcccgcatcccaggaaagaagcgaagttaaccccgcacggatggggccttctgtaggatctcagcaggaattgagagccccttgtttgcccgtaacctatcagcagactccagtgaacatggagaagaaccctcgggaagcccctccagtagtgcctccactagcgaatgccataagtgctgctctcgtatcccctgccacctcccagtcgatcgcaccccctgtcccactcaaggcccagacagtaacggatagcatgtttgctgtggccagtaaggatgcaggttgcgtgaataaatccacacacgagttcaaaccccagagtggagccgagatcaaggagggctgcgaaacacataaggtggcaaatacctcctcatttcatacaacaccaaatacaagtttgggcatggtccaagctactccgtccaaagttcagccgtcgcccacagtacataccaaggaagctcttggctttatcatgaatatgtttcaggcccctaccctccccgatattagcgacgacaaggatgagtggcagagcctcgatcagaatgaggacgcctttgaagcacagttccaaaagaacgtgcgaagctctggggcttggggggtgaataaaatcatcagtagccttagcagcgcctttcacgtattcgaggatggcaacaaggagaattacggactcccacagccaaagaacaagcctacgggcgctcgaacgttcggggaaagatcggtgtcaaggctgcctagtaaacctaaggaagaggtaccacatgcagaggaattcctcgacgattctacggtatggggcatcagatgcaacaagaccctggccccttcacccaagtctcccggtgacttcaccagcgcagcgcagctcgcgagtacaccttttcacaagttgcctgttgagagtgtgcatattctcgaggacaaagaaaacgttgtggctaagcagtgcacacaggctactctggattcatgcgaggagaatatggtggtgccgagccgggatggcaagttttctccgattcaggagaagtctcctaaacaggctctgtcctcgcatatgtattcagcgagtctgttaaggctgtcccagccagcggctggtggggtgcttacttgcgaagcagagctgggcgtagaggcatgtcggctaactgacaccgatgctgcaatcgctgaggacccacccgacgccattgccggtctacaggctgagtggatgcaaatgtccagtctgggtacggttgatgcccctaacttcatcgtcggcaatccatgggatgacaagttgattttcaaactgctgtcgggactgtcaaagcccgtgtcatcttatcctaatacgttcgagtggcagtgtaaactgcccgcaatcaaaccaaaaacggaattccagcttggcagcaagcttgtctacgtgcatcatttactgggcgagggtgctttcgcccaggtgtacgaggcaacacagggggatctgaacgacgcaaaaaataagcagaaattcgtccttaaggttcagaagcccgctaatccatgggagttttatatcggaacccagcttatggagaggctcaagccttctatgcaacacatgttcatgaagttttacagcgcacacctcttccaaaatggcagcgtgttggtgggagaactttacagctacgggaccctcctcgacgacgaggatgacctgtccgcaggcctggcactgattgatcttggccaatcaatcgatatgaagctattccccaaaggaactatattcacggcaaaatgcgaaaccagcggcttccaatgcgttgagatgctgtccaacaagccttggaactaccagattgactactttggcgtagcagcaaccgtgtattgcatgctattcgggacatatatgaaggtgaagaatgagggaggagagtgcaaacctgaaggactatttcggcgtctaccccacctcgatatgtggaacgagttctttcatgtgatgctgaacatccctgactgccaccacttaccctccctcgacctgttgcgacaaaagctgaagaaggtatttcaacaacactatacgaataaaattagggccttgaggaaccgactgattgtcctcctgctggagtgcaagaggtcaagaaaatag

SEQ ID NO: 216286 - DNA, 3198 bp, synthetic construct
  misc_feature 1..3198: note = Description of Artificial Sequence: Synthetic coding sequence
  source 1..3198: mol_type = other DNA
atggatacaccagagaatgtcctgcagtacatccaatgggtcgaggaaaatttcccagaaaataaggaatatctaataactctcttagagcacctaatgaaggagtttcttgacaagaagaaataccataatgatcctaggtttattagctattgcctcaagttcgcagaatacaattccgatctgcatcagttcttcgaatttctgtacaaccacggtataggaacgctctcatccccactgtacatcgcctgggcgggtcatctcgaagcccagggggaactgcagcacgcctcagcggtcctccagagaggaatacagaaccaggccgagccgcgagagttcctccagcagcaatacagattattccagactaggctgaccgagacacatctgcccgctcaggcgcgaacatcagaaccactgcacaacgtccaggtactaaatcagatgatcacttcaaaatccaaccccggtaacaatatggcatgcatctccaaaaatcaaggatctgagctttccggagttataagttccgcctgcgacaaggagtcaaatatggagcggcgagtgattactatctctaagtctgagtatagtgtacactcctcactcgcgtctaaagtggacgtcgaacaggtggtcatgtactgcaaagagaagcttatcaggggggaatcagagttcagtttcgaggagctgcgcgctcaaaaatataatcagaggcgaaaacatgagcagtgggtaaacgaagaccggcactatatgaaaagaaaagaggccaacgcctttgaagagcagctgttgaaacagaagatggatgaactacataaaaaactgcatcaggtggtggagacgtctcacgaggaccttcccgcatctcaagagcgtagcgaggtgaaccccgcacggatgggaccctccgtgggttcacagcaagaattgagggcgccatgtctgcctgtaacttatcagcaaactccagtcaacatggaaaagaatccgagagaggccccacctgtagtgccccctctggctaacgccatatcagcagcccttgtgtccccagccacgagccagtctatcgcacccccagtgccattgaaagcccaaaccgtcaccgattccatgttcgccgttgcatcgaaagacgcaggatgcgtgaataaaagcacgcacgaatttaaaccacagagcggcgctgaaatcaaggaggggtgtgagacacacaaagtggccaacacctcaagcttccacaccacgccgaatacttctctgggtatggtgcaagctacccctagcaaggtgcagcccagccctactgttcataccaaagaggccttaggattcatcatgaacatgttccaagccccaaccttgcccgacatatctgacgataaggatgaatggcagagcctcgaccagaacgaagatgcattcgaggcacagtttcagaagaacgtgcggtcatccggagcctggggggttaacaaaattatcagcagcctctccagcgcctttcacgttttcgaggatggtaataaggagaactatgggcttccccagcctaagaacaaaccaaccggggctaggacattcggggaaaggagcgtgtcacgcctccccagcaaacccaaggaggaggtcccacacgcagaggaattcctcgacgattccacggtgtggggcatccgctgtaataagactctcgccccatcacctaagtctccaggcgattttacctccgccgctcagctcgccagcacgcctttccacaaattacccgtagaatcagttcacatcttggaggacaaggaaaatgtggtcgcaaagcagtgcacccaggctaccctcgatagttgcgaagagaatatggtcgtgccatcacgtgatgggaagttttctcctatccaggagaagagtccaaagcaggctctttctagtcacatgtacagtgcgtcactgttgcgactgtcccagcctgccgcaggcggagtgctgacatgcgaggctgagctgggcgttgaagcctgcaggctgacggatactgatgccgcaattgccgaggacccacccgacgctattgcgggactccaggccgagtggatgcaaatgagttcgctgggaacagttgacgcccctaactttatagtgggaaacccgtgggatgataagttgatcttcaaattactgtccggactttccaaaccagtctcatcatacccgaatacgttcgaatggcagtgcaaattgccagcaattaagccgaagacagaattccagttaggatccaagttagtatacgtgcaccatctgctgggtgaaggtgccttcgcacaggtgtatgaagcaacacagggggatctgaatgacgcgaagaataagcagaagtttgttctgaaggtgcagaaaccagcgaacccctgggagttttacattggaacccaactgatggagaggctcaagccaagtatgcagcatatgttcatgaaattctacagcgctcacctgttccagaacgggagcgtacttgtcggagagctatatagctacgggacactgttaaatgccatcaatctctataagaacacccccgaaaaggttatgccgcagggtcttgtcatctccttcgctatgagaatgctatacatgatcgagcaggtccacgactgtgagattatacacggcgatatcaaaccggataatttcattctcggcaacgggtttctggagcaagatgatgaggatgatctgagcgctgggctggccctgattgacctgggtcagtctatcgatatgaaactgtttcctaagggcacaatcttcacagccaagtgcgagacatctggctttcaatgtgttgagatgttatcaaacaagccctggaattaccagatcgattactttggcgttgccgctacagtctattgtatgctgttcgggacgtacatgaaggtaaaaaatgagggcggagagtgcaagcccgagggactgtttcggaggctgccccaccttgacatgtggaatgaattctttcacgttatgctgaacatacctgactgccatcatctgccttctctggacctgctgcggcagaagctgaagaaggtcttccagcagcattacacgaacaagattagggccctgcgcaaccggctaattgtgcttctcttggaatgcaaacgtagccggaagtag

SEQ ID NO: 216287 - DNA, 2475 bp, synthetic construct
  misc_feature 1..2475: note = Description of Artificial Sequence: Synthetic coding sequence
  source 1..2475: mol_type = other DNA
atggatactccagagaacgttctgcagatgctagaggctcacatgcagtcatacaaaggaaatgaccccctgggagagtgggaaagatacatacagtgggtagaggaaaatttccctgagaacaaggaatatctgattactctcctggaacacctcatgaaagagttcctcgacaagaaaaagtaccataatgatcctaggtttatttcgtactgtctcaaatttgccgaatataattccgacctgcatcagttttttgagtttctctacaaccacgggatcggaacactgagtagccccttatatatcgcatgggcgggtcacctggaagcacagggggagctccagcacgcatccgccgtgctgcagcgaggaatacagaaccaagcggagcccagagagtttttgcaacagcaataccgactgtttcagacgcgccttacggagacgcatcttcccgctcaggcaaggactagtgagccacttcacaacgtccaggtactgaaccaaatgatcacctccaagtctaaccctggaaacaatatggcctgcatttccaagaaccaggggagcgagctgagtggcgtcataagctctgcgtgcgataaggaatctaatatggaacggagagtgatcacaatctcgaaatcagagtattcagtacatagtagtttagcttctaaagtggacgtcgagcaagtagtgatgtactgtaaagaaaagctcataaggggagaatctgaattctctttcgaggagcttagagcccagaagtataaccaacggagaaagcacgaacaatgggttaacgaggaccggcactacatgaaacggaaggaggcaaatgccttcgaagagcagctcctcaagcagaaaatggacgagcttcacaagaaactgcaccaggtggtagagacttcacatgaagacctgcctgccagtcaggagcgatctgaagtcaacccggcaaggatgggtccgtcagtgggcagccagcaggaattaagagccccatgcttacccgtgacctaccagcaaactccagtcaacatggaaaaaaatcccagagaagcacctccagtagtacctccgctagctaatgctatcagcgctgctctcgtgtcccctgcaaccagtcagagcatcgccccacctgtgcctcttaaagcgcagacggtaaccgactctatgtttgcagtggcgtcaaaggatgctgggtgcgtgaataagtctacccacgagtttaagccccagagtggagcagaaatcaaagagggctgtgaaactcacaaggtcgctaataccagctcttttcatactacccctaacacatcactgggcatggtgcaggccacaccaagtaaggttcaaccttcccctactgtgcatacaaaggaagctcttgggtttatcatgaacatgttccaggcccctactctgcctgacatttctgatgacaaggacgaatggcagagtctcgaccaaaacgaggacgcctttgaagcccagtttcagaagaatgtgcgcagctccggagcgtggggggtgaacaagatcatcagctctctgagcagcgccttccacgtgtttgaagatggcaataaagaaaactacggcctgcctcagcccaagaataagccgactggggctcgaacttttggtgagcgctcagtgtctcgccttcccagtaagccaaaagaagaggtgccccatgccgaggaattcttggacgactcaacagtgtggggcattcgttgcaacaagaccttggcccctagcccgaagtcacccggagacttcactagtgctgcccaactagcatctaccccattccacaagctccctgtcgagtcagtgcacatcctggaggacaaggagaatgttgtcgctaaacagtgtacccaagctactttagactcttgtgaggaaaacatggtcgttccatcccgcgacgggaagttctctccaatacaggagaagtctcctaaacaggccctcagttcacatatgtactccgcctcactactgcggctgtctcagcccgctgccggaggcgtgctaacttgcgaagctgaactgggcgtcgaggcgtgtcggctcaccgacaccgatgccgctatcgcggaagatcctccagatgcgattgcagggctgcaggccgagtggatgcagatgtcatccctcggtacagtggacgctcccaacttcattgtgggaaacccatgggatgacaaactgatttttaaattgttatcaggtctgtccaaaccggtgagtagttatcctaacacctttgaatggcagtgcaaattacccgcaatcaagcccaagacagagttccagctcgggtccaaactcgtttacgttcaccacctgctgggcgaaggcgcatttgctcaagtgtacgaagccacccagggtgacctgaacgatgccaagaataagcaaaaatttgtcctcaaagtgaagtcttag

SEQ ID NO: 216288 - DNA, 981 bp, synthetic construct
  misc_feature 1..981: note = Description of Artificial Sequence: Synthetic coding sequence
  source 1..981: mol_type = other DNA
atgaccgggtccaacgagtttaagctaaatcagcccccagaagacggcatttcatcagttaaattttccccaaatacaagccagttccttctggtgagcagctgggacacaagcgttcggctgtatgatgttcctgccaactccatgcgcctaaagtatcagcataccggcgcagtgttggactgcgcattctacgatccaacccacgcttggtccggcggactggatcaccagctgaagatgcacgacctgaacactgatcaagaaaacctggtaggaacacatgacgcacctattaggtgtgtcgagtattgtcctgaggttaacgttatggtgactggaagttgggatcagactgtgaagctttgggatccacgcactccatgtaatgccggtacatttagccagccagagaaggtttacaccctgagcgttagcggcgatcgcctcatcgttgggaccgccggacgcagggtacttgtttgggatctgcggaatatggggtatgtccagcaacggcgtgaatcatcccttaagtatcagacgaggtgcatccgcgcattcccaaataagcagggttacgtgctttcctctatagagggacgggtcgcagtggagtatctcgatccatcaccagaggttcagaagaagaaatatgccttcaaatgccaccgcctcaaggagaacaacatagaacagatctaccctgtaaacgccatcagtttccacaatatacataacaccttcgcaactggaggcagcgatggttttgtgaatatatgggacccttttaacaaaaaacgactctgccagttccacaggtaccctaccagcattgcgtccctggcattctccaatgatggcacaacactcgccatagctagctcttacatgtacgagatggacgatactgaacacccggaggacggcatctttatccgccaagtcacagacgccgagaccaaacccaagtctacctag

SEQ ID NO: 216289 - DNA, 987 bp, synthetic construct
  misc_feature 1..987: note = Description of Artificial Sequence: Synthetic coding sequence
  source 1..987: mol_type = other DNA
atgacagggagcaatgaattcaaactgaatcaacctccagaggacggaatcagctccgttaagtttagccccaacacatcacagtttctgctcgttagtagctgggacacgagtgtgagactgtatgatgtccctgctaatagcatgcggttaaagtatcagcatacaggcgctgtactggactgtgcattttacgatcccactcatgcatggagcggaggcctggaccaccagctgaaaatgcacgacctgaacacagaccaagaaaatctggtgggaacccacgatgctcctattcgatgtgtcgaatattgtccagaggtaaacgttatggtcactggcagctgggaccagacagttaagttgtgggaccccaggactccttgcaacgctggtaccttttctcagcccgaaaaggtctacactctgtccgtatcaggtgatagactaatcgtgggcactgccggacgcagagttctggtttgggatctgagaaatatgggctatgtgcagcagcgccgtgaatcgagcctgaaataccagacaagatgcattagggctttccccaataagcaggggtatgtgctctccagtatcgagggcagagtggccgtcgaatacctggatccttctcctgaggtccaaaagaaaaagtacgcattcaaatgtcaccgactgaaagagaacaacatcgagcaaatatatcccgtaaacgccatttcattccacaacatccataacacctttgccaccgggggatcagacggctttgtcaacatttgggacccattcaataaaaagcgcctgtgccagtttcacagatatccaacctcaatcgcgtcactggctttttctaatgatggaactactctggcaatcgcttcatcttacatgtacgagatggacgatacagagcatcccgaagatgggatctttataagacaggtgacagatgctgagaccaaaccaaaatctccgtgcacctag

SEQ ID NO: 216290 - DNA, 747 bp, synthetic construct
  misc_feature 1..747: note = Description of Artificial Sequence: Synthetic coding sequence
  source 1..747: mol_type = other DNA
atgcatgatcttaatacggaccaagagaatctggtgggcacccatgatgctcccattagatgcgtggaatattgtcccgaagtcaatgtgatggtaaccgggagctgggatcagaccgtcaagctctgggatccacggacgccttgcaacgccggaaccttctcacagcccgagaaagtatacacactgagcgtcagcggcgataggctgatagtcggcactgcgggacggagggtcctcgtttgggacctcaggaatatgggttacgtacagcagagacgggaatccagcctcaaatatcagacccggtgcattagagcttttccaaacaagcagggctacgttttgtcctcgatcgaaggcagagtagccgtggagtatctcgatccatcccctgaagtccagaagaagaagtacgccttcaaatgtcaccgtttaaaggagaataatattgagcagatttatcctgtgaatgccattagttttcacaacatccataacactttcgctaccggagggtcggacgggtttgttaatatttgggatccctttaacaagaagcggctgtgccagttccataggtaccctacatctatcgcttccctagccttctcaaatgatggcacaacattggccatagcttcatcctatatgtacgagatggatgacacagagcatccagaagacgggatatttattcgccaggtcacggacgctgaaaccaagccgaagtccccgtgcacatag

SEQ ID NO: 216291 - DNA, 1164 bp, synthetic construct
  misc_feature 1..1164: note = Description of Artificial Sequence: Synthetic coding sequence
  source 1..1164: mol_type = other DNA
atggcctgtaccatccagaaggccgaggcattggacggcgcacaccttatgcagattctgtggtatgatgaagaagaatctctgtatccggcagtttggttaagagacaattgtccctgcagcgactgttatcttgactctgcaaaagctcggaagttgttagtcgaggcgctggacgttaacatcggaattaaaggactgatttttgaccggaagaaagtctatattacttggccagatgagcattactcagagtttcaggcagactggcttaaaaagcgctgtttttcaaagcaagcaagagccaagcttcagagagaactgttttttccggaatgccagtactgggggtcggagctccagctgccaacactcgatttcgaggacgtgctgcggtatgacgaacatgcttataagtggctctccactctcaaaaaggtgggcattgttaggttgacaggagcgtcggacaagccaggcgaagtttcaaagttagggaagcgcatgggttttctgtacctcactttttatggacatacatggcaagttcaagataagattgacgccaacaatgtcgcatacacaactggaaaactatcctttcacacagactatcccgcactccaccatccaccaggagtgcaactactgcattgcattaaacagaccgtgactggcggtgattcagagatcgtcgatggattcaacgtttgtcagaaactgaaaaaaaacaatccacaggcctttcagattctctcttccacatttgtggacttcaccgatatcggagtagattattgcgacttctccgtccagtccaaacataagattatcgagctggatgataaaggacaagttgtccggatcaatttcaacaacgctacaagggacacgatcttcgacgtaccagttgaaagggtgcagcctttttatgcagccttgaaagagtttgtcgacctcatgaactccaaagagtcaaagttcacatttaaaatgaaccccggagacgtgataaccttcgacaactggagacttctccacggacgacggtcgtacgaggccggaacagaaatcagccgacacttggaaggcgcatacgcggattgggatgttgtgatgagcaggctccggattttgaggcaacgggttgagaacggcaattag

SEQ ID NO: 216292 - DNA, 1164 bp, synthetic construct
  misc_feature 1..1164: note = Description of Artificial Sequence: Synthetic coding sequence
  source 1..1164: mol_type = other DNA
atggcttgcaccatccagaaggctgaggccttggatggtgcccacctgatgcagatcctctggtacgatgaagaagaaagtctgtaccctgccgtatggttgcgcgataactgcccatgttctgactgctacctggattctgctaaggccaggaagcttctagtcgaggctctcgatgtgaacatcggcattaagggcctaatcttcgaccgcaaaaaggtctatatcacttggcccgatgagcactacagcgagttccaagctgattggttgaaaaaacgatgtttttctaaacaagctcgtgcaaagctgcagagagaactctttttcccagaatgccaatattggggatctgaactacagttgccaacacttgactttgaggacgttctgagatacgacgaacatgcatacaagtggctgtcaacactgaaaaaagtcggcatcgttagattgacaggagcttctgacaaacccggagaggtttctaagctgggtaaaagaatgggcttcctgtatctcacattctacgggcacacatggcaggtgcaagacaaaatcgacgccaacaatgtagcctacacaacaggcaaactgagtttccataccgattaccctgcactgcatcacccacctggggtccaacttcttcattgcatcaaacagaccgtgaccggcggtgattccgagatagtagacgggtttaatgtgtgccagaagctgaagaagaacaaccctcaagccttccaaatcctcagctctacatttgtggatttcaccgacatcggcgtggattactgtgatttttcagtgcagtcgaagcacaagattatagagctggacgacaagggacaggtggttaggattaacttcaacaatgccactcgtgacaccatcttcgacgtcccagtggagcgcgttcagcccttttatgctgccctgaaggaattcgtggacctgatgaacagtaaagagagcaagtttacgtttaagatgaaccccggagacgtcatcacctttgacaattggcgacttcttcatgggaggcgtagctacgaagctggtaccgagatcagccgacatcttgaaggggcatacgcagactgggacgttgttatgtcccgattgagaatcttacgacagagggtcgaaaatggaaactag

SEQ ID NO: 216293 - DNA, 1164 bp, synthetic construct
  misc_feature 1..1164: note = Description of Artificial Sequence: Synthetic coding sequence
  source 1..1164: mol_type = other DNA
atggcctgcaccatccagaaagcggaggccctggatggagcccacctaatgcagatactttggtacgatgaagaggaaagcctctaccccgctgtgtggctccgagataactgcccctgctcagattgctatctagactcagcaaaagcgcgaaagctactggtggaggctcttgatgtgaatatcggaatcaaagggttgatttttgaccgtaaaaaggtatatattacctggccagatgagcattactctgagtttcaggccgactggctgaagaagagatgtttttcaaagcaagctagggctaagctgcagcgcgaattatttttcccagaatgccagtattggggtagcgagctgcagctgcccacccttgactttgaagacgtactccggtacgacgagcacgcctacaaatggctttcaacgctgaagaaggttggaatcgtgaggctcactggtgccagtgacaagcctggcgaggtcagtaagttgggaaagcgcatgggctttctttacctgaccttttacggccacacctggcaggtacaggacaagatcgatgctaacaatgtggcgtatacgaccggcaagctgagtttccatacagactacccggctctccaccatccccctggagttcagctgctgcattgcataaagcaaacagtgactgggggagacagcgaaatcgttgatgggttcaatgtgtgtcagaagctgaagaaaaataacccgcaggcctttcagatcctgtcctctacatttgtcgatttcaccgacatcggggtcgactattgcgatttttctgtgcaatctaaacacaagataatcgagctggacgacaagggccaggttgttagaatcaacttcaataatgctacgcgggacacaatattcgacgtccctgtagaacgtgtccagcccttctatgctgctctaaaggagtttgtggaccttatgaactcaaaggagagcaaatttacatttaaaatgaatcccggagacgtaattacatttgacaactggaggttgctacacggcaggcggtcgtacgaagcaggtaccgaaatttcacgccacctggaaggcgcttacgccgactgggatgtcgtgatgagtaggctgcggattttacgccaaagggtggagaacggcaactag

SEQ ID NO: 216294 - DNA, 1164 bp, synthetic construct
  misc_feature 1..1164: note = Description of Artificial Sequence: Synthetic coding sequence
  source 1..1164: mol_type = other DNA
atggcttgcactattcagaaggcggaagctctggacggcgctcacttaatgcagatcttatggtatgatgaagaagagagtctgtaccctgccgtatggctgcgcgacaattgtccctgcagtgactgctatttagatagtgccaaagcgagaaagctgctggttgaagcgttggatgtcaatattggcattaaggggttgattttcgaccgcaaaaaggtgtacatcacctggcccgacgaacattacagcgagtttcaggctgactggctgaagaagcgatgcttctcaaaacaggccagggccaaactacagcgagaactgttcttcccggagtgccagtactggggatcagaactacaattacctaccctggactttgaagacgtgctccggtatgacgagcatgcttacaaatggttgagtacactcaagaaagttggtattgtgcggctgacgggcgcttccgataaacccggagaggttagcaaattaggcaaacgtatgggtttcctgtacctgaccttttatggacacacctggcaagtgcaagataagatcgatgctaataatgtggcttacacaaccggtaagttatcctttcacaccgactatcctgccttgcatcatcccccaggagtgcagcttctgcattgcatcaaacaaaccgtgaccggcggtgatagcgaaatcgtggacggcttcaacgtttgccagaagctcaaaaaaaataaccctcaggcctttcagatactcagtagcacattcgtggacttcacagatatcggggtcgattattgcgactttagcgttcagtctaaacacaagattattgagctggatgacaagggccaggttgttaggatcaactttaacaacgctaccagggatactattttcgatgtgccagtcgaaagggtgcagccgttctatgcggctcttaaggagttcgtagatctcatgaacagcaaagagtcaaaattcactttcaaaatgaatcccggtgacgtgataaccttcgataactggaggctcctgcacggcagacggagctacgaggctggcacagaaattagccgccatcttgaaggggcttacgctgattgggatgtggtgatgtcccgactacggatactgcggcaaagagtggaaaacgggaattag

SEQ ID NO: 216295 - DNA, 207 bp, synthetic construct
  misc_feature 1..207: note = Description of Artificial Sequence: Synthetic coding sequence
  source 1..207: mol_type = other DNA
atggcatgcactattcagaaagctgaagcactagatggtgcgcatctgatgcagatcttgtggtacgatgaagaagagagcctttatccggctgtttggctgcgggacaattgcccctgctcagactgttacctggactccgcaaaggctaggaaactgctggtcgaagctctggatgttaacattggaattaagggtctaatttag

SEQ ID NO: 216296 - DNA, 771 bp, synthetic construct
  misc_feature 1..771: note = Description of Artificial Sequence: Synthetic coding sequence
  source 1..771: mol_type = other DNA
atggagcctgctgccgctctgcatttctccttacccgcaagcctgctgctcctgctgttattattgctcctatctctttgtgcgttggtctcagctcagttcacggttgtcggacctgcaaaccccatcctggccatggtaggggagaataccacactgaggtgtcacctgagtccggagaaaaatgctgaggacatggaagtccgctggtttagaagccagttttcacctgcagtatttgtgtacaaggggggacgagagcggaccgaagaacagatggaagagtatagaggcagaatcacctttgtgtccaaagatatcaaccgaggctctgtggcacttgtaattcacaatgttactgcacaggagaacggtatctaccgttgctattttcaagaaggcagaagttacgacgaagccatactgcggttagtagtcgctgagtcttttatgccctcagcatctccatggatggtagccctggctgtgatcctaacagcaagcccctggatggtcagtatgaccgtcattttggcggtgtttattatctttatggcagttagtatttgctgtattaagaagttgcagagggaaaagaagattttaagcggagagaagaaggtcgaacaggaggaaaaagagattgctcaacagctgcaggaagaattacgctggcgacgtacattcctgcatgctggttacgagttgcccggtatccgtggcccttcatggaagaggccactacatggggaaccgccttctgctttctag

SEQ ID NO: 216297 - DNA, 942 bp, synthetic construct
  misc_feature 1..942: note = Description of Artificial Sequence: Synthetic coding sequence
  source 1..942: mol_type = other DNA
atggagcccgctgcggcactgcatttctcgctgcctgcatcccttctgctgctcttattgctcctgctgctgagtttgtgtgccctggtcagcgaaagctttatgccatcagcatcaccctggatggtggcgcttgccgtgatcttaaccgcgtctccttggatggtatctatgactgttatactggcagtgttcataatctttatggccgtctcaatctgctgcatcaagaagcttcagagggagaagaagatactctccggagaaaagaaggtggaacaggaggaaaaggagatagcgcaacaactgcaagaagaactgcggtggcggagaacattcctgcacgccgcagatgttgtactagaccccgatacagcccacccggaactgttcctgtcagaggacaggcggtcagttcgaagaggaccttatcgccagcgggttcccgataatccagagcggttcgactcgcaaccctgcgtactcggctgggagtccttcgcatcaggtaagcattactgggaggtagaagttgagaacgtcatggtgtggaccgtgggggtctgtagacactctgtcgaaaggaagggtgaagttctactgattcctcaaaatggcttctggacactggaaatgttcggaaaccaataccgcgctctgagctcaccggagagaatcctaccacttaaggagtccctctgccgcgtgggagtctttctggattacgaagctggagacgtctccttctataacatgcgggacaggtcccacatctacacatgcccaagaagtgccttcactgtccctgtgcggcctttctttcgcctgggctccgacgattctccaatctttatctgcccagccctaactggcgcttcaggggtgatggtccccgaagaaggactcaagctgcacagggttggcactcatcagtccctatag

SEQ ID NO: 216298 - DNA, 1608 bp, synthetic construct
  misc_feature 1..1608: note = Description of Artificial Sequence: Synthetic coding sequence
  source 1..1608: mol_type = other DNA
atggtcggcgaggatgccgacctgccctgccacctcttcccaacgatgagcgctgagactatggaactgcgctgggtgtcgtcatcgctgcgacaagtcgtgaacgtgtatgctgatggtaaggaagtggaggaccgtcagagcgcaccctatcggggaaggacttcaattcttagagatggcatcacggccggaaaggccgcactgcgcattcacaacgttacagcctctgatagcggaaagtatctgtgttattttcaggatggcgatttttacgaaaaagcactggtggaacttaaagtggctgcactcggttccgatttacatatcgaggtcaaagggtatgaggatgggggtatccacctggagtgcagatccaccgggtggtatccccaacctcagatcaaatggtccgacacgaaaggagagaacatccccgctgtggaggctccagtcgtggccgatggggttggactgtatgcagtggccgcttcggtcatcatgagaggttctagcggcggaggcgtaagctgtattatccgcaactcccttctgggccttgaaaagacggccagcatttcaatcgcagacccattcttcagaagcgctcagccctggattgcggcacttgccggtacgcttcctataagcttacttctgttggcaggagcctcttactttctctggaggcagcagaaagagaagattgccttaagccgggagaccgagagggagagagagatgaaagaaatgggctacgcagccaccgaacaggaaatctctctccgggagtggaggaaaatacagtacatggccaggggtgagaaatcccttgcatatcacgaatggaaaatggccctgtttaagcctgctgacgtgatactggaccctgataccgctaacgccatattgctcgtctccgaagaccaacggtcagtccaaagagccgaagagccacgcgacctgcccgacaacccggagagattcgagtggcgatactgtgtcctcgggtgtgaaaatttcacaagcggccgacattattgggaggttgaggttggggacaggaaagaatggcacatcggcgtttgtagcaaaaatgtcgaacgaaaaaaagggtgggtgaagatgacgcccgagaatgggtattggaccatggggctgaccgacggaaacaagtacagagcccttacggaacccagaacgaacttaaagttgcctgaacctcccaggaaagtgggaatttttcttgattacgagactggagaaatttctttttataacgctacagatggttctcacatttatacattccctcacgcaagcttctcggaaccattgtaccccgtgtttcggatcctcactctggaaccgacggccctaacaatttgtcctatacccaaggaggtcgaatcaagccccgatccagatcttgtgcctgaccactccctggaaactcccctcacaccaggactagctaacgagagtggcgaaccacaagcagaggtgacgtccctgctcctcccagctcatcccggagccgaagttagcccaagtgccaccactaatcaaaatcacaagctccaggcacggacagaagctctgtactag

SEQ ID NO: 216299 - DNA, 1581 bp, synthetic construct
  misc_feature 1..1581: note = Description of Artificial Sequence: Synthetic coding sequence
  source 1..1581: mol_type = other DNA
atggccgtgtttcccagctcagggctaccaaggtgcctgttgaccctgatcctgctacaacttccaaagctcgactccgcacctttcgacgtgatcggccctcctgaacctattctggccgtggtgggcgaagacgcagagctcccatgtagattgtccccaaacgcttcagccgagcacttagaactccgctggtttcgaaaaaaggtttccccagcagttcttgtgcaccgggatggtcgtgagcaagaagctgagcagatgcctgaataccggggacgtgctactctagtgcaagacggaatagcaaaggggagggtggcacttaggataagaggggtcagggtcagcgacgatggagagtatacctgctttttccgcgaagatggcagctacgaagaggccttagtccatcttaaggtggccgctttaggttctgatccgcacattagcatgcaggttcaggagaacggcgaaatttgcctagaatgcacaagcgtgggttggtatcctgaacctcaggtgcagtggcgcacctcaaaaggagagaaattcccatcaacgtccgagtcccgcaatccagacgaagagggcttgtttactgtagcagcctcagtgatcatcagagacacatcagccaagaatgtgagttgctatatccagaacctcctgctcggacaagagaagaaagtggaaatcagtattcccgcatcgagcctcccaagactaacgccttggatagtggcggttgctgttatattaatggttctgggcctcctgactatcggatccatcttctttacttggaggctttataatgaacggcctcgggagcgccgtaacgaattttcttctaaagagcgcttgctcgaggagcttaaatggaaaaaggccaccctacacgccgttgacgtgaccctcgacccggacacagcccacccgcatctatttctttacgaagattcaaaaagtgttaggcttgaagattccagacaaaagctgcccgaaaagacagagcggttcgacagctggccttgtgttctgggccgtgagactttcacatcaggccgtcactattgggaggttgaggtcggcgataggacggactgggctatcggggtttgcagagagaacgtgatgaaaaaagggtttgacccaatgactcctgagaatgggttctgggctgtggaactttatgggaacggatactgggcattaaccccactccggacaccattgccgttggccggacccccacgcagagttggtatttttctggattatgagtctggcgatatcagtttttacaacatgaacgatggatccgacatctacactttctccaacgtgactttttccggccctcttcgaccttttttctgcctatggagttctggcaaaaagcccctcaccatatgcccaatcgccgacgggcctgagagagtgaccgttatcgcaaacgctcaggacctgtctaaagaaattcccctgagtccaatgggggaagatagtgcccctagggacgctgataccctacactctaaactcatccctacccagccttcccagggagccccttag

SEQ ID NO: 216300 - DNA, 1485 bp, synthetic construct
  misc_feature 1..1485: note = Description of Artificial Sequence: Synthetic coding sequence
  source 1..1485: mol_type = other DNA
atggcagtgttccctagtagcgggttgcctaggtgcctgttaaccctgatcctactccagttgccgaagctggactcagctccgtttgacgtcattgggcctcctgagccaattctggctgtagtgggagaggatgccgaactgccctgccgtcttagcccaaacgcaagtgccgagcatttggagctaagatggtttcggaagaaggtgtcaccagctgttctggtgcaccgggacggtagagagcaggaagccgaacaaatgccagaataccggggaagggcaacattagtgcaggatggcatcgcaaagggccgagtagcgctccggatcaggggtgtcagggtttccgatgatggcgaatatacatgtttctttagggaggatgggagttatgaggaagcgctggtgcatttgaaggttgcagccctggggtcagatcctcacatatccatgcaggtacaggagaatggggaaatctgcctcgaatgcacttctgtcggctggtaccctgaacctcaggtgcagtggcggacgtctaagggcgagaagttccccagcacaagcgagagcaggaacccagacgaagaggggctcttcactgtggcagcatctgtcatcatccgggatacttccgctaagaacgtgagttgttacattcagaatttgctgttagggcaagaaaagaaagtagagattagcattccagcttccagcctccccagactcaccccgtggattgtggcagtggccgtgattctgatggtgctgggtctgctgaccatcgggtcgattttctttacttggcgtctctataacgaacgccctcgagagcggcgtaacgagtttagtagtaaagaaaggttgctggaggaactaaaatggaaaaaggcaaccctccatgcagtcgatgttacccttgatcctgatactgctcacccacacttgtttctctatgaagattctaagtcagtaaggctggaagactctcggcagaaattgccggagaagaccgagagattcgattcatggccatgtgtactcggacgggagacattcacaagcggtaggcactactgggaggttgaggtcggagatcgcaccgattgggcaatcggcgtgtgtcgggagaatgtgatgaagaaggggttcgacccaatgacaccagagaatggattctgggccgtagagctatatggcaacggatattgggcgctgacacccctgaggacccccctacccttggctggacccccacgtcgagtggggattttccttgattacgagtcaggcgacatttcattttacaacatgaatgacggctccgacatatatacgtttagcaacgtgaccgtgatcgccaacgcgcaagacctgtccaaagaaattccgttatccccgatgggggaagacagtgccccacgggacgcggacaccctgcattccaagctgataccgacccagccgagccagggcgcaccctag

SEQ ID NO: 216301 - DNA, 1590 bp, synthetic construct
  misc_feature 1..1590: note = Description of Artificial Sequence: Synthetic coding sequence
  source 1..1590: mol_type = other DNA
atggagagcgccgcagcactccatttctcccggcctgccagcttgctgttactgctgctttcgttgtgcgctcttgtcagtgctcagtttatagttgtaggccctactgatcctattctggcaaccgtcggggagaatacgaccttaaggtgtcatctgtcacccgagaagaatgctgaagacatggaggtgaggtggtttaggtcgcagttctcacctgccgtgttcgtatataaaggcggacgagaacgaacagaggagcaaatggaggagtaccggggaagaacaacctttgtgagcaaagatatctcgcgtggatcagtcgccttagtgatccacaacatcaccgcccaggagaacggcacgtaccggtgttatttccaggagggcagaagttatgacgaagctattctccatctggtggtggccggtctgggcagcaaaccattaatctcgatgagaggccacgaggatggagggatccgactggaatgtatctctcgcggatggtaccctaagcctttaaccgtatggcgcgatccttatggaggagtggctcctgccctgaaagaggtaagcatgccagacgcggacgggttattcatggtgacaactgccgtcatcatccgtgacaaatccgttaggaacatgtcctgtagcatcaacaacaccttattgggccaaaagaaagagagcgtaatctttatcccggagtcatttatgccttctgtttcaccgcctattgccgtctgtatctattggataaacaaactgcagaaagaaaaaaaaatcctgagtggcgaaaaggaatttgagagggagacacgcgagattgccctcaaagagctcgaaaaagagagggtgcaaaaggaagaggaactgcaggtgaaagaaaagctgcaagaggaactgaggtggcggaggacttttctgcatgcagtggacgtagtccttgacccggacaccgcgcatccagacttgtttctctcagaagacaggcgctctgtgaggaggtgccctttccgacatttgggtgagtccgtcccagataaccctgagcggttcgattctcagccttgtgtcctgggcagagaaagcttcgcatctggcaagcactattgggaagtggaggtagaaaatgtcatcgagtggacggtgggggtgtgtagggactcagtcgaaaggaagggtgaagtcctactgatcccccaaaacggcttttggacgttggaaatgcacaaaggccagtatagagccgtctcttccccagataggattctccctctgaaagaatccttgtgtagggtgggtgtgttcttggattacgaagccggagatgtctctttctacaacatgcgggatcgcagccacatctatacctgcccacggtcagctttttctggaccagatacgagccaatctggggaccccccagagccaatagagtccatcccctggtcccatagccatgtggacaaaccttggtccagtcagcaaccacctcacaatacccacctgccagcagcttcattcaccccaacaaccgatttgtcccctagtttcttgctcctcacccgcctctgtttctag

SEQ ID NO: 216302 - DNA, 1584 bp, synthetic construct
  misc_feature 1..1584: note = Description of Artificial Sequence: Synthetic coding sequence
  source 1..1584: mol_type = other DNA
atggagtcagctgccgctcttcacttctcgagacctgccagcctgcttctcctgctcttgagtctttgtgccctagtctccgcgcaattcattgtggtgggcccaactgacccaatcctggccaccgtaggagaaaacacaacacttaggtgccatctgagtcctgaaaaaaacgccgaggatatggaggtgagatggttcagatcacaattctcccctgctgtgttcgtatataaggggggacgcgagcggactgaggaacagatggaagagtacaggggaaggacaacattcgtgtccaaggatatcagtcgcggaagcgtggcactcgttatacacaacattactgcccaggagaatgggacctaccgttgctacttccaggagggcaggtcctacgacgaggccattctgcacctggtggtagcgggattgggatcaaagcccttgatctctatgagggggcatgaggacggcggaattcgactagaatgcataagcaggggatggtacccaaagcctttgacagtgtggcgagacccttacggcggtgtggcacctgctctcaaagaagtcagtatgcccgatgcagatggcctcttcatggtgaccactgcagtgataattcgagataaatctgttagaaacatgtcatgttcaattaacaatacactgctcggacagaagaaagagagtgtgatctttatccctgagtcctttatgccaagcgtcagcccttgtgccgtggctttacctatcattgtcgttattctgatgatccctatagcggtgtgcatatactggatcaataagttgcagaaagagaagaagatcttgagcggggagaaggagtttgaacgggagacacgtgaaattgctctgaaggagctggaaaaggaaagagtccagaaggaagaagaactgcaggttaaagaaaaactgcaggaagaactcagatggcggaggacgttcctccacgcggtggacgtggtattggaccccgataccgcccatccagatctcttcttatctgaggataggaggagcgttcggaggtgcccatttaggcacctaggtgagtcggtgcccgataatccagaacggttcgactcgcagccgtgtgtgctcgggcgagagtctttcgcatctgggaagcactattgggaggtggaggtggaaaatgttatcgagtggaccgtgggggtttgcagggatagtgtcgagaggaagggagaggtgctgcttatcccgcagaacggcttctggactctcgaaatgcacaagggtcaatatcgggctgtgtctagtccggacagaatcctgcctctcaaagagtcgttgtgccgcgtgggtgtgttcctggattatgaagccggagacgttagtttttataatatgagagaccgaagtcatatatatacctgccctcggagtgcattctctgttccagtgcgcccttttttcagactcggatgtgaagactcacctatttttatctgtccagctttgactggtgccaacggggtcacggtgccagaagagggtctgaccctgcatcgggttgggacccaccagagcctctag

SEQ ID NO: 216303 - DNA, 1005 bp, synthetic construct
  misc_feature 1..1005: note = Description of Artificial Sequence: Synthetic coding sequence
  source 1..1005: mol_type = other DNA
atggagagcgcagctgcccttcactttagcaggcccgcatcgctgctgcttctgctcctgtcactctgcgcccttgtgtcagcacagttcattgtcgttggtccgacagatccaattctcgctactgtcggagaaaatactaccttgcgctgtcatctgtcccctgagaagaacgctgaggatatggaggtccgctggtttcgcagccagttcagccccgcagtatttgtgtacaaagggggaagggaacgcacggaggagcagatggaggagtatcgcggacgcacgactttcgtttctaaagacatctcaagagggagtgtcgccctggtgattcacaacatcaccgcacaagaaaatggcacttatagatgttactttcaagaggggcgttcttatgacgaagccatcctgcacctagtcgtcgccggtttagggagtaagcccttgatttctatgaggggacacgaagacggaggtattcggctggagtgtatctcacgcggatggtatcccaagccccttacagtgtggagagacccttatggcggagtggccccagccctgaaggaggtaagcatgcctgacgccgacgggctgttcatggtgactacagccgtcatcatcagggataagtctgtacgcaatatgagctgcagcatcaataatacacttttgggccaaaagaaagagtcagtcatctttatacccgagtcattcatgccctccgtttccccctgcgccgtggccctgcccataatcgtggtcatactcatgatccctatcgccgtgtgcatctactggattaacaagctgcagaaggaaaaaaagattctctctggggagaaggaatttgaacgtgagacacgtgaaattgcactgaaagagctggagaaggagagggttcagaaggaggaggagctgcaggtgaaggagaagcttcaggaagagctgaggtggcggaggacctttctacacgccgaacttcagtttttttccaactag

SEQ ID NO: 216304 - DNA, 993 bp, synthetic construct
  misc_feature 1..993: note = Description of Artificial Sequence: Synthetic coding sequence
  source 1..993: mol_type = other DNA
atggaaagcgccgctgcactacacttctctcggccagccagcctcttgcttttactgctatccctgtgcgctctagtcagcgctcaattcatcgtcgtaggtcccacagatcccatcctggctaccgttggtgaaaacacaactctgaggtgccatttgtcacctgaaaagaacgccgaggacatggaagtccgctggttcaggtcccagttcagtcctgcggtctttgtgtacaaaggaggcagagagagaacggaagaacagatggaagagtacagaggccgaacaactttcgtgagcaaagacatttctcgcggttcagtggcgttagtaatccataatataacagcccaggagaacggcacatataggtgttactttcaggaggggcgatcctacgatgaggcaatcctgcacctcgtagtagccggtttgggttccaagcccctgatcagtatgcggggacatgaagatggtggcatcaggctcgaatgtatttcccggggatggtacccaaaaccactcacggtatggcgcgacccctacggaggtgtcgccccagctctgaaggaggtctccatgcctgatgccgacgggctgtttatggtaacgactgcagtaatcataagagataaatccgtacgtaacatgagctgtagcatcaacaataccttgcttggacagaaaaaggagagcgtcatttttatcccagaatccttcatgcccagcgtcagcccctgcgcagtggctctaccaatcattgtcgtcattctgatgatccctatcgccgtctgtatttactggataaataagctgcagaaggagaagaagattctgtctggggaaaaggagttcgaacgggagacacgtgagattgccctgaaggaactggaaaaggagagagtccaaaaggaagaggaactgcaagtgaaggagaaactccaagaggaactgaggtggcgcaggaccttcttacacgccggtcccgtgtag

SEQ ID NO: 216305 - DNA, 1401 bp, synthetic construct
  misc_feature 1..1401: note = Description of Artificial Sequence: Synthetic coding sequence
  source 1..1401: mol_type = other DNA
atggaagtgaggtggtttagatcacagttctcccctgccgtttttgtctacaagggtggcagggaacgtactgaagagcaaatggaggagtaccgcggacggacaacatttgtgagtaaggatatttccagaggatcggtggccttagtgatacacaatatcactgcccaggagaacggaacctataggtgctactttcaagaaggcagaagctatgatgaggccattctgcatctggtagtggccggtttggggagcaaacctctgattagcatgagagggcacgaggatgggggaatccggctggaatgcatttccagaggctggtatcccaagcctctgaccgtgtggcgagatccatacggaggagtagcacctgctctgaaggaggtgtcaatgccagatgcggacgggctatttatggtgactactgcagtgatcatccgagacaaatccgtgcgcaacatgtcctgtagcatcaacaatacccttctgggtcagaagaaagagtcagtaattttcattcccgagtcttttatgccgtccgtgagcccttgcgcagttgctcttcctattatcgtcgtcatactgatgattccgattgccgtgtgcatttactggattaataagcttcagaaggaaaagaaaatccttagcggggaaaaagaatttgaaagggaaaccagagaaattgctctgaaggaattggagaaggaacgcgtgcagaaagaagaggagttgcaggtgaaagaaaagctgcaagaggaactgcgatggcgacggaccttcctgcatgccgttgacgtggtcctcgaccctgataccgcacacccagacctctttctgtctgaagatcgaagatctgtgcgccgatgtcctttccggcacttgggtgaatccgttccagataatcctgagcggtttgacagtcagccctgtgtcctcggcagggaatcgttcgcttcaggtaagcattattgggaggtcgaggtggagaacgtgatcgaatggaccgtcggagtctgtcgagatagtgtggagcgaaagggtgaagtcctgcttataccgcagaacggcttctggactctggaaatgcacaagggtcagtatcgggctgtatcatcacccgaccgcattttgccactcaaggaatccctgtgtcgggtgggcgtgttcttggactacgaagccggtgatgtgtcattttataacatgagagaccgatctcatatctacacttgccctaggtccgccttttcggtacccgtaaggccattctttcgactcggatgcgaggattctcctattttcatctgtcccgctctgacaggcgctaacggagttacggtacctgaggaagggctcacactgcatcgcgtgggtacacaccagagcctttag

SEQ ID NO: 216306 - DNA, 1224 bp, synthetic construct
  misc_feature 1..1224: note = Description of Artificial Sequence: Synthetic coding sequence
  source 1..1224: mol_type = other DNA
atggaaccagcagcagctctgcatttctctctccccgcaagcctgctgctcctgctgcttttacttcttctgtctctgtgtgccctggtttccggcttaggctccaagccccttattgagattaaggcacaggaggatggatccatttggctcgaatgtatctcaggcggatggtatcctgaaccgttgacagtctggagagacccctatggcgaggttgtgccagccttgaaagaggtttctatcgccgatgccgacggcctgttcatggttactacggccgtaataatccgggacaagtatgtgaggaacgtgagctgctcggtcaataacacactcctcgggcaggaaaaagagaccgtgatctttatccctgagtcattcatgccaagtgcctccccatggatggtggccctagccgtcattctaacggccagcccatggatggtgtcaatgacagtaatcttggcagtgtttataattttcatggcagtgtccatctgctgtatcaagaagctccaaagagaaaagaagattctaagtggcgaaaaaaaagtggagcaagaggaaaaggagattgcccagcagctccaggaggaacttcgttggagaagaactttcctccatgccgcagacgtcgtcttggatccagataccgcccatccagaactatttctgagtgaggatcgaaggtctgtgcggagaggcccttatcgccaacgggtgccagacaatcccgagcgcttcgactctcagccgtgtgtattgggctgggaaagcttcgcctcaggcaagcactattgggaagtggaagtggaaaacgtgatggtatggactgtgggcgtttgtcgtcacagcgtagagagaaaaggagaggtcctactcatcccccagaacgggttttggaccctcgagatgttcggaaatcaatatagggctttaagctccccggaacggattctccccttgaaagagtctctctgtagagtgggcgtgttccttgactatgaggccggagacgtcagtttctataacatgcgggaccggtctcacatctatacgtgtcctagatcggcttttactgtgcccgtacgcccattctttcgattggggtccgacgactctcccatttttatttgtcccgcattgacaggcgctagtggtgtgatggtgcctgaggagggactgaagctgcaccgggtgggtacccatcagtcactgtag

SEQ ID NO: 216307 - DNA, 1572 bp, synthetic construct
  misc_feature 1..1572: note = Description of Artificial Sequence: Synthetic coding sequence
  source 1..1572: mol_type = other DNA
atggagccagctgccgctctgcatttctcacttccagcgagcctcttgctcctgctcttactgctgttgctctccttgtgtgccctcgtgagcgctcagttcactgtagttggcccagccaaccctatcctggccatggtgggcgagaacaccaccctgcggtgccacctgagccccgaaaaaaatgcggaggacatggaggtgagatggttccgcagtcagttctcacctgcagtcttcgtgtacaagggcggtcgagaaaggaccgaggaacagatggaggaatatagaggtagaattaccttcgtgtcaaaagacatcaatagggggagcgtcgccctcgtgatacataatgtaacagcccaggagaatggcatctacagatgttattttcaggaggggagatcttatgacgaggcaatcctgcgtcttgtcgtcgccggacttggatcaaagcctctcatcgaaataaaggctcaggaggacggatcaatctggcttgaatgtatctcaggagggtggtatccagagccccttaccgtgtggcgggacccctatggagaagtcgtgcccgctctgaaggaggtgagcatcgccgacgccgacggcctgtttatggtcaccacagcagtcattataagggacaagtacgtcaggaacgtgagttgcagcgtcaacaacacactccttggccaggaaaaagagactgtcattttcatccctgaatccttcatgccctcagcgagcccatggatggtagcgctggccgtgatccttaccgcgtctccatggatggtgagtatgacggtgatattagccgtgttcatcatttttatggccgtatctatctgctgcatcaagaaactgcaaagagagaagaagatactgtccggtgaaaaaaaggtagagcaggaggaaaaggagatcgcacagcagctccaggaggagcttcgatggcgacgtacctttctccacgctgctgatgttgttctggatcccgatacagcacatcctgagctcttccttagcgaggatcgcaggtcagtccgtaggggcccttaccggcaacgtgtgccagacaatcccgaacgtttcgactctcaaccctgcgttttgggttgggagtcttttgcctctggaaagcactattgggaggttgaagttgagaacgtgatggtgtggactgtgggcgtatgtcggcacagcgtcgaacgcaaaggggaagtccttttaattccgcaaaatggcttctggaccctggagatgttcggcaatcagtaccgggcactttcttctccagaacggattctgcctctgaaggagtccttatgtcgggtcggggtgtttctcgattacgaggcaggcgatgtgagtttctacaatatgagagatcgaagtcatatctatacgtgcccgcgttctgcttttaccgtgccagtcagaccttttttcaggttgggttccgacgatagtccaatctttatttgtccagcgttgactggcgcttccggagtgatggttccggaggagggccttaagctgcaccgtgtagggacgcaccagagcttatag

SEQ ID NO: 216308 - DNA, 1572 bp, synthetic construct
  misc_feature 1..1572: note = Description of Artificial Sequence: Synthetic coding sequence
  source 1..1572: mol_type = other DNA
atggagcccgctgccgctctacacttttctctcccagcttccctcctcctcctgctgctactgctgctcttgtcactgtgcgctcttgtttcagcgcagttcaccgtagtgggccctgccaaccctattctggctatggttggggaaaacaccacactgagatgccacctcagcccagaaaaaaatgccgaagatatggaggtgagatggttccggagccagtttagcccggcagtgttcgtttacaaaggcggtcgggaaaggacagaagaacaaatggaggaatatcggggtcgaatcaccttcgtgtccaaggacataaatcggggaagtgtagcattagtgatccataacgttactgctcaggagaacggtatttacaggtgttacttccaggagggcaggagttatgatgaagcaattttgaggcttgtggtcgccggtctgggatccaagcctctcattgagatcaaagcccaagaagacgggagcatctggctcgagtgcatatcaggtggctggtatccagaaccactgacagtctggagagacccttacggggaggttgtcccagccctcaaggaggtgagtatcgctgatgcagacggattatttatggtgactacagcagtaataatccgagataagtatgtgcgcaatgtgagttgctcagttaataacactctgctgggccaggagaaagagaccgtcatcttcatcccggaaagctttatgccatcagcgtctccttggatggtggcactggccgttatccttactgcatcaccgtggatggtgagcatgaccgttatcctcgcggtgtttattatctttatggccgtcagcatatgctgtatcaaaaagctccagagggagaaaaaaattttgagcggagagaaaaaagttgagcaagaggaaaaggaaatagcacagcaactgcaggaggagctccgatggaggaggacattcctccacgcagcggacgtcgtacttgatcccgacaccgcccaccccgaactctttctttccgaggaccgaaggagcgttagacgcggtccatatagacagcgggtgcccgacaacccagagcgttttgactctcagccgtgcgtgttaggatgggagtcattcgcatccggcaaacattattgggaagtggaggtggagaatgtaatggtatggacagttggagtctgccggcactcggtggaaaggaaaggggaggtgctcctgataccccagaacggtttctggacattagaaatgtttggaaaccagtaccgtgctcttagctcacctgaacgcatcctgccactgaaagagtctctgtgcagggtgggggtctttttagattacgaggctggtgatgtgtctttctataatatgagggatcggtctcacatctatacatgcccgagatcagcgttcaccgtgcctgtaaggccattcttcagattgggcagcgatgactctcccatctttatctgccctgccctcaccggcgctagtggggtgatggtgcccgaggagggcctgaaactgcaccgggtagggactcaccagtctctctag

SEQ ID NO: 216309 - DNA, 1011 bp, synthetic construct
  misc_feature 1..1011: note = Description of Artificial Sequence: Synthetic coding sequence
  source 1..1011: mol_type = other DNA
atggagcccgctgcagccctccatttcagtctcccagcatccttgctgctccttctcctgctgctgctgctttctctttgtgcactggtatccgcacaattcaccgtcgttggacccgcaaatccgattctggctatggtgggtgagaacacgaccctgagatgtcacttgagcccagaaaagaacgccgaggacatggaagtacgctggttccgctcacagttcagtccagccgtgttcgtttataaggggggaagagagaggacggaagagcagatggaagagtatcgaggtaggattactttcgtttctaaggacattaaccgcggaagtgttgccctcgtcattcataatgtcacagctcaggagaatgggatttacaggtgctattttcaggagggtagatcctatgatgaggctattctgagattggtggttgcaggactaggcagcaaacctttgatagagatcaaggctcaggaggacggctcgatttggctcgaatgcatctctggtgggtggtacccagaaccacttacggtatggcgcgacccatatggtgaggtcgtaccagctctgaaggaggtgtctatcgcagatgcagacggacttttcatggtgaccacagctgttatcatacgtgataaatatgtgcgaaatgtctcctgcagcgtgaacaacactctgctgggccaggagaaagagacagtgatctttataccggagtctttcatgccgtctgcatccccgtggatggtggcattagcggtgattctcactgcctcaccttggatggtgtctatgacagtaatcctcgccgtgttcatcatcttcatggccgtatctatctgctgtattaagaaacttcaaagggagaaaaaaattctgtccggcgagaagaaggtggagcaggaagaaaaggaaatcgctcagcaactccaagaggaactccggtggaggcggaccttcctgcacgctgatgttaatctgaccggcctgcgcaacacctag

SEQ ID NO: 216310 - DNA, 333 bp, synthetic construct
  misc_feature 1..333: note = Description of Artificial Sequence: Synthetic coding sequence
  source 1..333: mol_type = other DNA
atggagcctgcagcggcactgcacttctcgctcccagcctcactgctgctgctgctgcttttgctgttgctctccctgtgtgctctggtctcaggccttgggtccaagcccctcatcgagattaaggcgcaggaagatggcagtatctggctggagtgcatatccgggggatggtaccccgagcctctgacagtttggcgcgacccttatggggaggtcgtgcccgctctgaaggaggtgtctatcgccgatgctgacgggctgttcatggttactaccgcagtgattataagagataagtacgttcgaaatgtctcttgcagcgttaattag

SEQ ID NO: 216311 - DNA, 555 bp, synthetic construct
  misc_feature 1..555: note = Description of Artificial Sequence: Synthetic coding sequence
  source 1..555: mol_type = other DNA
atggagccagccgctgccctgcatttttccctgccggcttccctcctgctacttctgttgctcttactgctgtcactctgtgccctcgtttcgggtctaggctcaaagcctctgattgaaattaaagcccaggaggatgggtccatctggctcgaatgtatctctggaggctggtaccccgagccactgacagtctggcgtgacccatacggagaagtggtgccggcattaaaagaggttagtatagcggatgccgacggactgtttatggtgaccacggccgtgatcatcagagacaaatatgtgaggaacgtgagctgttcagtaaataacacactcttagggcaggagaaagagacggtcatttttatcccagaaagctttatgcccagtgcctctccctggatggtggccctggccgttatccttacggcgagcccctggatggtgtcaatgaccgtgatccttgcagtatttatcatattcatggcggtgagcatctgttgtatcaagaaactgcagagggaaaaaaagatactgagtggagagaaatag

SEQ ID NO: 216312 - DNA, 720 bp, synthetic construct
  misc_feature 1..720: note = Description of Artificial Sequence: Synthetic coding sequence
  source 1..720: mol_type = other DNA
atggagcccgcagctgcattgcactttagccttcctgcaagccttctcctccttttgcttcttctactcttgtccctgtgcgccctggtaagcgctcaatttaccgtcgtaggcccagctaacccaatactcgcgatggtcggcgaaaacaccacactgaggtgccacctgtccccagagaaaaatgcggaagacatggaagttaggtggtttcggagccaattctctcccgcagtctttgtctacaagggaggaagggagcgtacagaagaacaaatggaagagtacaggggaaggatcacctttgtatccaaggacatcaaccggggtagcgttgccctcgtgatccacaatgtcaccgctcaggagaatggcatttacagatgttattttcaggaaggcagaagctatgatgaagctatcctccgcctcgtggtggccggactgggatccaagccactaattgagatcaaggcccaggaggatggctccatttggctcgagtgtatctccggcggttggtatccagaacctctgacggtctggcgtgacccatacggcgaagttgtgcccgcattgaaagaagtatcaatcgccgacgccgacggccttttcatggtaaccaccgccgtaataattcgcgataagtacgttcgcaatgttagttgttctgtgaataataccctgctgggacaggaaaaggagaccgttattttttag

SEQ ID NO: 216313 - DNA, 291 bp, synthetic construct
  misc_feature 1..291: note = Description of Artificial Sequence: Synthetic coding sequence
  source 1..291: mol_type = other DNA
atggagccagctgccgctctccatttctccctaccggcttctctgctgctgctgcttcttctgctgctactcagcctttgtgcccttgtaagcgcccagtttacggtggttgggcctgccaatcctattctggccatggttggcgagaacaccaccctccggtgccacctgtcccctgaaaaaaatgccgaggacatggaggtgaggtggtttcgcagtcagttttctcccgcagtattcgtctataaaggagggcgagagagaaccgaagagcagatggaggagtactag

SEQ ID NO: 216314 - DNA, 1542 bp, synthetic construct
  misc_feature 1..1542: note = Description of Artificial Sequence: Synthetic coding sequence
  source 1..1542: mol_type = other DNA
atgaaaatggcctcatttctggcattcctcctgcttaattttcgtgtgtgccttctgcttctacaattgctgatgcctcattctgcacaatttagcgtcctgggaccgagtgggcctatactggcaatggtgggagaggacgcagacttgccttgtcacctgttcccaactatgtccgccgagactatggagctgaagtgggttagctcctccctgagacaggtggtaaacgtttacgctgacggcaaggaggtggaagaccgacagagtgccccatataggggacgcaccagcattcttagagacggaatcactgccggtaaagccgcactcaggattcacaacgtaacagccagcgacagcggcaagtatctgtgttactttcaagatggcgatttttatgagaaagctctggtagagttaaaagtcgctgctcttgggtctgatttgcacgtcgatgtaaagggctacaaagacggcggtattcacctggaatgtaggagtaccgggtggtatcctcagccgcagatacaatggtccaataataaaggggagaatattccaactgtggaggcaccagtggttgccgacggtgtgggtctgtacgccgtcgccgctagtgttattatgcggggttcctccggagagggagtttcttgtaccattaggtcctctctgctgggcctggagaagacggcatctatctctatagccgatcctttcttcaggagtgcccagcgatggattgcagcactggctggaacgctgcctgtgctcctgctcctgttggggggagcagggtatttcttgtggcagcagcaggaagagaagaagacccagtttagaaaaaaaaagagagagcaggagcttcgcgaaatggcatggtcgacaatgaaacaggagcagagtacacgcgtaaaacttttggaagaactgcggtggagatctatccaatatgcttcccgcggagagcggcactcggcttacaacgaatggaaaaaagcacttttcaaacctgccgacgtgattctggatcctaaaacagcaaatccgatccttctcgtgtcagaggaccagaggagcgtgcagcgggctaaggagccccaagacctgcctgataatccggagcgtttcaattggcattattgtgttcttggctgtgaaagcttcatatccggcaggcattactgggaagttgaggtcggagatcgtaaggaatggcatattggcgtctgcagcaaaaacgtacagcggaagggatgggtgaaaatgacacctgagaacggcttttggacaatgggactcaccgacggcaacaagtaccggacactgactgagcccaggaccaacctgaagcttcctaaacccccaaagaaggtgggcgtttttcttgactacgaaacaggggacatttccttttataacgcagtggatggtagccatatccacactttcttggatgtgagcttttccgaagcactttatccagtgtttcgtatccttacactggagcctacagctctgaccatttgccctgcttag

SEQ ID NO: 216315 - DNA, 1386 bp, synthetic construct
  misc_feature 1..1386: note = Description of Artificial Sequence: Synthetic coding sequence
  source 1..1386: mol_type = other DNA
atgaaaatggcatcattcctcgctttcctactgctgaactttagggtatgcctgctgttgctgcagctgcttatgccccactccgcccagttttctgtcctggggccatcgggacctattctggccatggtgggagaggatgcagacctcccctgtcacttatttcctacaatgagcgcagagaccatggaactgaaatgggtatcaagtagtctgcggcaggtcgttaacgtgtacgccgacggaaaggaagtggaggacaggcagtccgccccataccggggaagaacctcaatcctgagagatggtattacagctggtaaggccgcattacgaatccataatgtgaccgcctccgactctggtaagtacctgtgctatttccaggacggagatttttatgagaaggcccttgtggaacttaaagtagccgatggggtgggactctacgctgtggctgctagtgtcatcatgcggggatcttccggcgagggagtgagttgcacaattagaagctctttgctcggtctggagaaaacagcgtccattagcatcgcagatcccttcttcaggagcgctcaacgctggattgctgctttggccggaactctgccggtgctgctgttgctacttgggggtgctggctacttcctgtggcagcagcaggaggaaaagaaaacacagtttagaaagaagaagcgggaacaggaactgcgggagatggcatggagtactatgaagcaagagcaatccactcgcgttaagcttctcgaagaactgaggtggaggagcatccaatatgctagcagaggggaaaggcatagtgcatataacgagtggaagaaggccctattcaagcccgctgacgtgatcttagaccctaagactgccaacccaatcctcctggtttctgaagatcagaggtccgttcagagggccaaagagccgcaagatctccctgacaacccagagcgatttaactggcactactgtgtccttggatgtgaatcttttatctccggcaggcattactgggaggtggaagtgggggatcggaaagaatggcatattggcgtatgtagtaaaaacgtgcagaggaaaggatgggtaaagatgacaccagagaacggtttttggaccatgggattaacagatggcaacaagtaccgaactctgacagaacctaggacaaatctgaagctacctaaaccacctaagaaggtcggggtgtttttggactatgagaccggggacatttcattctacaacgcagtcgacggatcgcacattcatacctttctggatgtttccttttcagaggctctttaccccgtcttccgcatactaacacttgagccaacagcactgactatttgtcccgcttag

SEQ ID NO: 216316 - DNA, 1137 bp, synthetic construct
  misc_feature 1..1137: note = Description of Artificial Sequence: Synthetic coding sequence
  source 1..1137: mol_type = other DNA
atgaagatggcctctttcttggcgtttctcttgctgaacttcagagtatgtctgttgctgctccagctgctgatgccgcactccgcccaattcagcgtgctggggccatcaggaccaatcttggccatggttggcgaggacgctgatctcccatgtcacctgttcccaactatgtccgctgagactatggaactgaagtgggtaagttccagcttgcgccaggttgtcaatgtgtacgccgatggcaaggaggtggaggatcggcagagtgcaccttatcgagggagaacctccatcttgcgggatggaatcactgccggaaaggcagcattgcggatccataatgtgacagcaagcgattccggcaaatatctgtgctatttccaggacggcgacttctacgagaaagcgctagttgagcttaaggtcgcggctttagggtcggacctgcatgtcgatgtgaagggctacaaagatgggggtatccatcttgagtgcaggagtacaggttggtacccccaaccccagattcaatggtctaacaacaaaggcgaaaacataccaactgtggaggctcctgtagtagccgacggtgttggactgtacgcggttgcagcttccgtgattatgcgcggttccagcggtgagggagttagctgcacaatcaggtcctcccttctaggtcttgagaaaaccgctagcattagcatcgccgaccctttctttcggagcgctcaaaggtggatcgcagcactggctgggacccttcccgtgttactgctcctcctgggcggtgctggttatttcctctggcagcaacaggaggagaaaaagacacagttcagaaagaaaaagcgcgagcaggagctgcgcgagatggcttggagcactatgaaacaggagcaaagtactcgggtgaagctgctcgaagagcttagatggcggagcatccaatacgctagtcgcggagaacggcactcagcctacaatgaatggaaaaaggccctctttaaaccgggtcccccaataggtcagacacagcagcagacccgtggccagggatctcctgttgccctttctcaggagtccgctcagcggaccgactcatggggaccagaggagggcggagaaagctag

SEQ ID NO: 216317 - DNA, 132 bp, synthetic construct
  misc_feature 1..132: note = Description of Artificial Sequence: Synthetic coding sequence
  source 1..132: mol_type = other DNA
atgaaaatggcctctttcctggcctttctgctgttgaacttccgggtatgcttgcttctgctgcagttacttatgccacattcagctcagttctcagtgctcgggccatccggccctatactggccatgtag

SEQ ID NO: 216318 - DNA, 360 bp, synthetic construct
  misc_feature 1..360: note = Description of Artificial Sequence: Synthetic coding sequence
  source 1..360: mol_type = other DNA
atgaagatggccagtttcctggcctttttacttttgaactttcgggtgtgcttgctcctgctgcagcttcttatgccccattcagcccaattcagtgtgcttggtccatccggaccaatcctcgcgatggttggggaagacgcagacttgccctgccacttgttccctaccatgtctgcagagactatggaacttaagtgggtatcttcctccctgcgtcaggttgtgaacgtctatgctgatgggaaagaagtcgaggatcgccagtccgctccgtatagaggtcgtacttccattctgcgagatggcattacggctggcaaagcagccctccgaatccataacgtcaccgcctcctag

SEQ ID NO: 216319 - DNA, 1059 bp, synthetic construct
  misc_feature 1..1059: note = Description of Artificial Sequence: Synthetic coding sequence
  source 1..1059: mol_type = other DNA
atgaagatggcttcattcctggcttttctgcttctgaattttagagtgtgtctgttgctgttgcagcttctgatgccccactctgcccagtttagcgtactagggcctagcgggccaatccttgcaatggttggggaggacgcagatctgccatgtcatctatttcctactatgagtgccgaaactatggagctgaagtgggtgagtagctcactccgacaagttgtaaacgtctatgccgacgggaaagaggtggaggatcggcagagcgcaccctaccgcggacgcacctccatcctccgagatggcatcactgctgggaaggctgccctgagaatccataacgtaaccgcttccgattcgggaaaatatttatgctatttccaggacggggacttttacgaaaaggccctggttgaactgaaagtggcggcattgggttcagacttgcacgtagacgtgaagggatacaaagacggaggcatccacctggaatgccgcagcacaggatggtatccccaacctcagatccagtggagcaataataagggggaaaatattccgacggtcgaggctccagtcgttgccgacggagtaggactgtatgccgtggctgctagtgtgataatgcgaggctcttccggagagggggtgagctgtaccattagaagctccttactggggctggaaaaaaccgcttctatcagtatagcagatccgttttttcgatctgcccagagatggattgcagctctggcgggtacattacccgtcttactgctgctactcggcggagctggttactttctgtggcagcagcaggaggagaagaagacccagtttcgaaagaagaaacgggagcaggagctgcgcgagatggcgtggagtacgatgaaacaggagcagtctacaagggtgaaactactagaagagctgcggtggagatccatacagtatgcctctcgtggagagcgccattcggcctataatgagtggaagaaggccctgtttaaacctggagaagaaatgttgcagatgagattgcattttgtgaaatag

SEQ ID NO: 216320 - DNA, 279 bp, synthetic construct
  misc_feature 1..279: note = Description of Artificial Sequence: Synthetic coding sequence
  source 1..279: mol_type = other DNA
atgaagatggcatctttcttggcctttctcctgcttaacttccgggtgtgcctgcttttgctgcaattgttaatgccacactccgcacaattctccgtgcttggtccttcggggcctatcctagcaatggtgggagaagatgcagacttaccctgtcatctgttcccaaccatgagtgcagaaacaatggagttaaagtgggtgtcatctagcctacgtcaggtggtgaatgtttatgctgacggcaaggaagtggaggatagacaatccgccccatag

SEQ ID NO: 216321 - DNA, 1005 bp, synthetic construct
  misc_feature 1..1005: note = Description of Artificial Sequence: Synthetic coding sequence
  source 1..1005: mol_type = other DNA
atgaaaatggccagctcactggctttcttactgctgaacttccacgtgagcctgctattggttcagctcttgaccccatgctcggcacagttttccgtgttgggtccatctgggcctatactggccatggtgggagaagacgcggatttaccgtgtcaccttttccctacaatgtccgccgagaccatggagttgaagtgggtctcgtcctccttacggcaagtggtcaacgtgtatgctgatgggaaggaagtcgaggacagacagtccgctccataccgcggaagaaccagcattctccgggatggcatcacggccggaaaggctgccttaaggatccacaatgtaacagccagcgacagcgggaagtacttgtgttacttccaggatggagatttttatgaaaaagccctggtagaactgaaagtggctgccctgggatcgaatcttcacgtggaggttaaaggctatgaggacggaggcattcatttggagtgccggtccaccggctggtatccacagccacagatccagtggtccaatgcgaagggagagaatattcccgcagtggaagcacccgtggtggccgatggagtgggcttatacgaagtggcagcctctgtgatcatgcgcggaggcagcggagagggcgtttcctgtattatccggaatagtctcctgggcctcgagaagaccgcctctatatccattgctgacccattcttccggagcgcgcagccctggattgctgctctcgctgggaccctccccatcctgctcttactgctggcgggagcttcttattttctatggcgccagcagaaggagatcaccgcactcagttcagagattgaatctgaacaggaaatgaaggaaatgggctacgcagccaccgagagggagatttcactccgagagagcttacaggaggaattgaaaaggaagaaaatccagtacctgactcgaggggaagagtcctccagcgatacaaacaaaagcgcatag

SEQ ID NO: 216322 - DNA, 1005 bp, synthetic construct
  misc_feature 1..1005: note = Description of Artificial Sequence: Synthetic coding sequence
  source 1..1005: mol_type = other DNA
atgaaaatggccagcagtctggcattcttgttactgaatttccacgtatctctattgctggttcaactcttgacaccttgcagcgcacagttttccgtcttaggccctagtggccctatattagcgatggtgggagaggacgcggacctcccatgccacctgttccccaccatgagtgccgagactatggagctgaagtgggtctcaagcagccttagacaggtggttaacgtttatgcagatggtaaggaggttgaggataggcagtcagccccatacaggggccgtacttctatcctgagggacggtatcacagcagggaaggccgcacttcggatacacaatgtgaccgcttcagactctgggaagtatctgtgttattttcaggacggggatttctacgaaaaggccctcgtggaactgaaagtggccgctctagggagtaacctccacgtggaggtgaagggatatgaagacggaggcattcacctcgagtgcaggtcaactgggtggtatccacagcctcagattcaatggtcaaacgccaaaggcgaaaacatacccgctgtggaagccccagtagtggcagacggcgtcggactgtacgaagttgccgctagtgtcattatgcggggtggttctggggagggggtgtcatgtattatacggaactcgttgctgggtctcgagaagaccgctagcatttccattgcggacccattctttagatcagcccagccctggatcgcagcactggcgggtacgcttcccattctgttgttgctgcttgcgggagcctcgtatttcctgtggcgccagcagaaggaaatcacagccctcagcagcgaaatagaatccgagcaggagatgaaagaaatgggatatgccgcaacagagcgagagatctctctccgggagtcacttcaggaggagcttaagcgtaaaaaaatccagtacctgactagaggtgaagagtctagtagtgatacaaacaaatcagcttag

SEQ ID NO: 216323 - DNA, 936 bp, synthetic construct
  misc_feature 1..936: note = Description of Artificial Sequence: Synthetic coding sequence
  source 1..936: mol_type = other DNA
atgggtattccacgcgctcagttctccgtgttgggacctagcggccctatcttggcaatggtgggcgaggatgcagacttaccttgccacttgttccccaccatgtcagcggagaccatggaactgaaatgggtctccagctctctgcgccaggttgtgaatgtctacgccgatggcaaagaagtggaggacagacagtcagctccatatagaggtagaacaagcatcttgagagacggaattacggccggtaaagcggcactgagaatccacaatgtgaccgcctcagacagtgggaaatacctctgctatttccaggacggggacttttacgagaaggctcttgtagagctcaaagtggccgcactgggctcaaatctccacgtggaggtgaagggatatgaagacggcggtatccatctcgagtgcagatcaaccggatggtacccccagccacagatccagtggagcaatgccaaaggggagaacattcccgcagtggaagcacctgtcgtggcggatggggtgggactgtatgaagtcgctgcttccgtaattatgcgcggtggatcaggagagggcgtcagctgcattattcgaaattccttattgggcctcgagaaaacagcatcaattagtattgcggaccctttcttcaggtccgctcagccttggatcgcagcattggccggaacacttcctatcctgttactacttctggcaggcgctagctatttcctgtggcggcagcagaaggagatcacagccctctcatctgaaattgagtcagaacaagaaatgaaagagatgggatacgcagctacggagcgagagatctctctgcgcgaatccctccaagaagaactgaagagaaagaaaatccagtacctgacgaggggcgaggaaagtagttccgataccaacaaaagcgcttag

SEQ ID NO: 216324 - DNA, 1005 bp, synthetic construct
  misc_feature 1..1005: note = Description of Artificial Sequence: Synthetic coding sequence
  source 1..1005: mol_type = other DNA
atgaaaatggcaagttctctggcattcctgctgctcaactttcatgtgtctttgctcctggtgcagctactgacaccatgcagtgctcagttcagcgtgcttggaccatccggccctattcttgcaatggtgggtgaagatgctgacctcccatgtcacttgtttcctactatgtcggcggagacaatggaacttaagtgggtgtcttccagtctcagacaggtggtgaatgtgtatgctgacgggaaagaagtggaggacaggcagagcgccccataccgcggacgcaccagcatcttgagggacgggatcactgcgggtaaggccgcactgcgcattcataacgtaaccgccagtgattccggtaagtatctatgttatttccaggacggagacttctatgagaaggctttggtggagctgaaggtcgcggcactggggtcaaacctacacgtcgaggttaaagggtacgaggatgggggaatccatctcgagtgtaggtccacaggttggtacccacagccacagattcagtggagtaacgccaaaggagaaaacatccctgcagtagaggccccagtggttgctgatggggtgggcctatacgaagtggcagccagtgtgattatgagaggcggttcaggcgagggtgtttcctgcatcataaggaactctctgctggggctggagaagacagcctctatttctatcgctgaccctttttttaggtccgctcagccgtggattgctgcactagcaggcactttacctatcctcctgctgcttctggccggagcaagctatttcctctggcggcagcaaaaagaaatcaccgccctctcttccgagatcgagagcgaacaggaaatgaaggagatgggatacgccgcaactgagcgcgagatctccctccgcgagtccctccaggaggagctcaagcgtaagaaaattcagtacctcacccggggtgaagaaagcagcagtgatacgaataaaagcgcttag

SEQ ID NO: 216325 - DNA, 879 bp, synthetic construct
  misc_feature 1..879: note = Description of Artificial Sequence: Synthetic coding sequence
  source 1..879: mol_type = other DNA
atggtgggcgaggatgctgatcttccctgtcatctgtttcctacaatgtcagctgagacaatggaactgaagtgggtctcctcttccctgaggcaggtggtgaatgtctacgccgatgggaaggaggtggaagacagacaaagcgctccttatagaggtagaacttccattctgagggatggcattaccgctgggaaagccgctctgcgcatacataatgtgacggcttccgactctggcaagtacttatgctactttcaggacggagacttttacgagaaggctctagtggagctgaaggtcgccgctctcggctctaaccttcacgtggaggtgaagggctacgaagacgggggaatccacttagagtgcagatcaaccggttggtatcctcagccccagatccaatggagcaatgctaagggcgaaaacatcccagcagttgaggcaccagtcgttgcggatggggtggggctgtacgaggtcgcagcatctgtcattatgagagggggttctggagaaggcgtgtcatgcatcatcaggaattccttgttgggcctcgagaagacagcctccatttctatagccgatcctttcttcaggtctgcacaaccctggattgcagccttagctggaacactacccatacttcttctgctcctggctggagcttcctactttctgtggcggcagcagaaggaaataactgccctgagcagtgagatcgaatccgaacaggagatgaaagagatggggtacgcagccacagaaagggaaatcagtttgcgggagagcttgcaagaggaactcaaaaggaagaaaatccagtacttaactcgaggagaagaatcttctagcgacaccaataagagcgcctag

SEQ ID NO: 216326 - DNA, 1005 bp, synthetic construct
  misc_feature 1..1005: note = Description of Artificial Sequence: Synthetic coding sequence
  source 1..1005: mol_type = other DNA
atgaagatggcctcctcactggcatttctccttctgaactttcacgtgtctttgttgctggtgcagctcctgacgccctgctccgcccagtttagcgttctaggaccgagtggcccaattctggccatggtgggggaagatgcggatctcccgtgtcatctcttcccaacaatgtccgcagaaaccatggaactgaaatgggtctcttcttcattacgacaggtggttaatgtgtacgctgatggtaaggaggtggaggatcgacaaagcgccccatatagaggacggacgagcatcctgcgcgacggcatcactgccggaaaggccgctctccgaatccataacgtgacggccagcgattcgggcaagtatctgtgttacttccaagacggcgacttctatgaaaaagctttggtcgagttgaaagtcgccgctttaggatctaacctacacgtggaggttaagggatatgaggatggcggtatacacctggagtgccggtccaccgggtggtacccacagccgcaaatacagtggagcaacgctaagggagaaaatatccccgcagtggaggcccctgtggtggcagacggtgtgggcctgtacgaggtcgccgctagtgtgattatgagaggtggttcgggggaaggtgtgagctgtatcattagaaattccctgcttgggctggagaagacagcttcaatctcaattgctgatccatttttccgtagcgcacagccctggatcgcagccttggcgggtacgctccccatcctattgctgctactcgctggggcaagttacttcctgtggcggcagcaaaaggagatcaccgcattgagctccgagatcgaaagcgagcaagagatgaaggaaatgggttacgctgctaccgagagagagatatctttgcgcgagagtctccaggaagagctaaaacggaagaaaatccagtacctgactcgcggtgaagaatcatcgtctgacacaaacaagtctgcgtag

SEQ ID NO: 216327 - DNA, 960 bp, synthetic construct
  misc_feature 1..960: note = Description of Artificial Sequence: Synthetic coding sequence
  source 1..960: mol_type = other DNA
atgaagatggcatcatcattagctttcttgctcttgaacttccatgtcagcctattgctggtccaactgctcactccctgctcagcccagttttctgtgcttggtccatcaggacctatcttggccatggtgggcgaggacgccgatcttccctgccacctgttccctaccatgagcgctgagactatggagttaaagtgggtttcctctagcctgaggcaggttgtcaacgtgtacgccgatggcaaagaagtggaggatcgccagtcggctccatacagaggccgtacatccatcttgagagatggcatcaccgctggcaaagccgcattgagaatccataacgtcaccgcgtccgattccggaaaatacctgtgctacttccaagacggagacttttacgaaaaggctctggtcgagcttaaagtcgctgccctggggtctaatctccacgtggaggtgaagggctatgaggacgggggaatccacctggaatgtagatcaaccggctggtatccacagcctcagatccagtggagtaatgccaagggcgaaaacattcccgcagtcgaagcaccggtggtcgccgatggggtaggactgtacgaggttgcagcctctgtcattatgcggggaggctcgggggagggcgtgtcatgcatcatccgaaatagccttctggggcttgaaaaaaccgctagcattagcattgccgaccctttcttccgctcggcccagccatggattgccgctctagctggaaccctgcctattttgcttctcctgctcgccggagcctcctactttttgtggaggcagcagaaagaaatcactgcactatcatcggagattgagagcgagcaggaaatgaaggagatgggatacgccgctacggagagagaaattagcctccgggagagcctgcaggaggagctcaagagaaagaaatcatccacgtag

SEQ ID NO: 216328 - DNA, 1755 bp, synthetic construct
  misc_feature 1..1755: note = Description of Artificial Sequence: Synthetic coding sequence
  source 1..1755: mol_type = other DNA
atgaagatggctagctcactggcctttcttctgctgaattttcacgtctcattattcctggtgcagctgctgacgccgtgcagtgcccagttcagcgttctgggcccttcagggccaattctagccatggttggagaagatgcggacctcccttgccacctgttcccaaccatgagtgccgagactatggaactgcgctgggtctcttcctcgctccggcaagttgttaacgtctacgcagatggcaaagaagtggaggatcgccaaagcgccccatatagaggacggacttctatcctgcgagacgggattacagccggtaaagcggctcttagaatacacaacgtgactgccagcgactcagggaaatatctgtgctatttccaggacggagacttttatgaaaaggcgctcgtcgagttaaaagtcgcagctctgggttctgacctgcacatcgaggtcaagggatacgaagacgggggaatacatctggagtgtcgctcaaccggctggtatccccaaccacagattaaatggagcgacactaagggcgagaacattccggcagttgaagccccagtggtggccgatggcgtcgggttgtatgccgtggccgcaagcgttattatgagggggtcttccggcggtggcgtgtcctgtatcattagaaactctctgctcggactggagaaaactgcctcaatttcaattgcagaccctttctttcgttccgcccaaccttggatcgcggctttagccggtaccctccctatttctctgcttctgcttgcgggagcctcttacttcttatggcgtcagcagaaagagaagattgccttatctcgcgagactgaacgtgaacgcgagatgaaggagatgggctatgctgcgaccgagcaggaaattagcctgcgagaaaagctccaggaagaactaaagtggcgtaagattcagtatatggccaggggagagaagagtctggcctaccacgagtggaagatggcactgtttaagccagccgatgtcattttagatccagatactgccaacgccatccttctagtaagtgaggatcagcgatctgtccaaagggcagaggaacctagagacctgcctgacaaccccgagcggtttgagtggcggtattgtgtactaggttgtgaaaatttcacaagtggacggcactattgggaggtggaggtcggcgatcgcaaggaatggcatattggcgtttgctccaagaacgtggaacgcaagaaagggtgggtcaagatgactcccgagaatggttactggactatgggcctgacggatggcaataaataccgagccctgactgagcccaggactaatctgaagctcccggagccccctagaaaagtcgggattttcctggattatgagaccggagagatctcattctacaatgcaactgatggaagccatatctatactttcccacacgcctcctttagcgagccgctgtaccccgtcttccggattctcacgctggaacctacagcactcaccatctgccccatcccaaaagaagtggaatcctctccagatcctgatctggtgcctgaccatagcctggagacgccgctcacccctgggctagccaacgagtccggggaaccgcaggctgaagtcacgtcacttttgctgccggcacatcctggagccgaggttagccccagcgcaaccactaatcaaaaccacaagctacaggctagaaccgaggccctttattag

SEQ ID NO: 216329 - DNA, 1629 bp, synthetic construct
  misc_feature 1..1629: note = Description of Artificial Sequence: Synthetic coding sequence
  source 1..1629: mol_type = other DNA
atggttggagaggatgccgatctcccatgccacctgtttcctactatgtctgcagagacaatggagctgaggtgggtgtccagcagtctgagacaggtggttaatgtgtatgctgacggcaaggaggtggaggaccggcagtctgcaccttaccgcggacgaaccagcattttacgtgacggaatcaccgccggaaaggcagcactcaggattcacaatgtgacagcctctgacagtggcaagtacttgtgctattttcaggacggcgatttctacgaaaaggcactggtggaacttaaggtcgcagctctggggagtgacctgcacattgaggtcaagggctacgaggacggtggtatccacctcgagtgtcgctccactggctggtacccgcagccccaaatcaagtggtccgacacgaaaggagaaaacatccccgctgtagaagctcctgtggtcgccgatggtgtggggctgtatgctgtcgcggcttctgtgattatgcgcggatcgtcaggaggcggagttagctgcataatcagaaacagtcttctgggcctagaaaaaaccgctagcatctctatcgcggatccattcttccgcagtgcacagccgtggatcgccgctctggccggaaccttaccaatcagcctcctgctgctggccggagcaagctactttttgtggcgacagcagaaggagaagatcgccctctcacgcgaaactgaaagggagcgcgagatgaaggaaatgggctacgcagccaccgagcaagagattagcctgcgcgaaaaattgcaggaggaactgaagtggcgcaagatccaatacatggccagaggcgagaagagtctggcgtatcacgaatggaagatggccctgtttaagcccgctgatgtgatccttgaccctgacaccgctaatgcaatcctcctggttagcgaggatcagcggagcgtccagagggctgaagaacctcgtgacctcccagacaaccccgaaaggtttgaatggcgctattgcgtgctcggttgcgagaatttcactagtggccgacactattgggaggtggaagtgggagaccgcaaggaatggcacataggtgtgtgcagtaaaaacgtcgagagaaagaaggggtgggtcaaaatgacgccagagaacggctattggacgatgggcctcaccgatggcaacaaataccgggctctgacggaacccagaactaatctgaaactaccagaacccccacggaaggttggcattttcctggactacgaaaccggagagatctctttctacaatgcaacggacggctcacacatctacacctttccacacgccagtttctccgaacccctttatcctgtttttcggattctaaccctggagccaacagcactcacaatttgccccatcccaaaagaggtggaaagctcccccgatcccgatctggtgcccgatcacagcctggagacccctttaacaccgggtctcgcaaatgaaagcggagagccgcaggccgaagtaacctcccttcttctacctgctcaccctggcgctgaggtgtcgcccagcgcgaccaccaaccaaaatcataagctgcaggcgagaaccgaagccctgtactag

SEQ ID NO: 216330 - DNA, 417 bp, synthetic construct
  misc_feature 1..417: note = Description of Artificial Sequence: Synthetic coding sequence
  source 1..417: mol_type = other DNA
atgaagatggccagtagtcttgccttccttttgcttaactttcacgtttcactgtttctggtacagctattaacaccatgtagtgcacagttcagcgttttgggaccttctggcccaattctggccatggtcggggaagatgcagatctcccctgtcacctgtttcccactatgagcgccgaaacaatggaacttcgttgggtctctagtagtctgagacaggtagttaacgtttacgccgatggaaaggaagttgaagatcgacagagcgccccttatagggggcgaacctctatcctacgagatggcattaccgccggaaaagcagctctgaggattcacaatgtgacggcaagcgattctggcaagtacctatgctactttcaggatggcgacttctacgagaaggcactttag

SEQ ID NO: 216331 - DNA, 717 bp, synthetic construct
  misc_feature 1..717: note = Description of Artificial Sequence: Synthetic coding sequence
  source 1..717: mol_type = other DNA
atgaagatggccagttcccttgccttcctcttgctgaattttcatgtgtctctttttctggtccagctgctgaccccatgctctgcacaattctctgtgcttgggccttctggtcccatcctcgccatggtgggggaggatgcggatttgccatgtcatttatttccaaccatgtccgccgagacgatggaactgagatgggtttcctcctccttgagacaggtcgttaacgtctacgctgacggcaaggaggtcgaggacaggcagagcgctccgtatcgcggacggacctctattctgagagacggcatcacagcgggtaaagccgcactacgaatacacaatgttaccgccagtgattcaggcaagtacctgtgctactttcaggatggagacttctacgagaaggctcttgtggagctcaaagtcgcagccctgggaagcgatttacacattgaagtgaagggttacgaagacggcggaattcatttagagtgtcgcagcacaggctggtatccacagccacagatcaagtggtctgacaccaaaggcgaaaacattcctgccgtggaagcaccggtggtggcagacggggttggcctgtacgcagtggccgcttccgtaattatgcggggatcttccggcggtggagtgagctgcatcataagaaattccctcttaggcctggagaagacagcctccatctctattgcttag

SEQ ID NO: 216332 - DNA, 1368 bp, synthetic construct
  misc_feature 1..1368: note = Description of Artificial Sequence: Synthetic coding sequence
  source 1..1368: mol_type = other DNA
atggtggactttcccggttacaatctgtcgggcgcagtggcttcttttctattcatcctgctgacaatgaaacagagcgaggactttagagttattggcccagctcatcctatactggccggagtgggcgaggatgcgctcctgacgtgccagctgctgcctaagagaaccaccatgcacgtcgaggttcgctggtatcgctctgagcctagtactcccgtgttcgtgcatcgggacggcgtggaggtgacagaaatgcagatggaggaataccggggatgggtggagtggatagagaacggaatcgctaaaggaaacgtcgccttaaagattcataacattcaaccttcagataatggacagtactggtgtcactttcaagacgggaactactgtggcgaaactagcctcttgctgaaagtcgccggtttaggaagcgccccttccatacacatggaagggcctggcgagtcaggtgtacaattagtgtgcactgccaggggttggttcccagagccccaggtgtactgggaggacatccgcggtgagaagttacttgcagtgtcagagcatcgcatccaggacaaagatgggctgttctacgcggaagcaactttggtggtgagaaatgcatcagcagagtcagtcagctgcctcgttcataatcccgtgctaactgaagagaaaggctctgtcatcagccttcccgagaaactgcagaccgaattagccagcttgaaagttaacgggccaagccaaccgattctggtaagagtgggcgaggacattcagcttacgtgctacttgagcccaaaggcgaatgcccagtccatggaggttcgatgggacaggtcacatcgctaccctgccgtgcacgtgtacatggatggtgaccatgtggctggggagcaaatggctgaataccgtggcaggacagttcttgtgagcgacgcaattgacgaagggcgacttacactgcagattctgagcgccaggcccagcgacgacggacagtaccgatgcctcttcgaaaaagatgacgtatatcaggaggcctctctcgatcttaaagtggtgtctctaggtagttcccccctgattaccgtggaaggccaggaggacggcgagatgcagccaatgtgtagttccgacggctggtttcctcagccacatgttccgtggcgcgacatggaggggaaaaccatcccttcctccagccaggctctgacccaggggtcacacgggctgtttcacgtgcagaccttgctgagagtgactaatatctccgcagtagacgtgacctgttcaatctcaatcccatttttgggggaagagaaaattgccacgttctcactgagtggttggtag

SEQ ID NO: 216333 - DNA, 1167 bp, synthetic construct
  misc_feature 1..1167: note = Description of Artificial Sequence: Synthetic coding sequence
  source 1..1167: mol_type = other DNA
atggtcgacttcccaggctacaatctgagtggagctgtggcgtccttcttgtttattctattgactatgaagcaaagcgaagatttcagggtcatcggccctgcccatcccattctggccggtgtgggggaggacgccttactgacctgccagctcctgcccaaacggaccactatgcacgttgaggtgagatggtaccggtctgaacccagcactcctgtctttgtccatcgcgacggggtagaagttaccgagatgcagatggaagaataccggggttgggtcgagtggattgagaatgggattgctaaaggaaatgtagcgctgaaaattcataacatacagccatccgataacggacagtactggtgtcactttcaggatgggaattattgtggagaaactagccttctgctcaaagtggctgaaaagttgctggcggtgctgtcatctctgaaagtaaatggcccttcacagcctattctggtgagggtgggagaagacatccagctgacatgttacctcagcccaaaagcaaacgcccagtctatggaagtgaggtgggatcggtcccaccggtaccccgcagtacacgtttatatggacggcgatcacgtggctggcgagcaaatggcagagtatcgaggcagaaccgtccttgtgagcgacgctatcgatgaggggcgacttacattacagatattaagcgccaggccctcggatgacggccagtaccgttgcctgtttgaaaaagatgatgtgtaccaggaggctagtctggacctgaaagtagtgtctttgggctccagccccctgatcaccgtggagggccaggaggatggcgaaatgcagccaatgtgtagttctgatggttggtttccccagccccatgttccctggcgggacatggagggaaagaccatcccctcaagcagccaggctctcacacaagggtcacacgggctctttcacgtgcagaccctgttacgggtgaccaatatctctgccgtcgacgtcacctgtagcatttctattccctttttgggagaggagaagattgccactttctcactgtcagaaagccgcatgacgttcctgtggaaaactttactggtgtggggactgctgctcgctgtcgccgtgggcttgccaaggaagcgttcttag

SEQ ID NO: 216334 - DNA, 738 bp, synthetic construct
  misc_feature 1..738: note = Description of Artificial Sequence: Synthetic coding sequence
  source 1..738: mol_type = other DNA
atggtggattttccagggtacaacctgagcggggcagtggccagcttcttatttatcctgcttactatgaaacagagcgaaaaactgcagacagagttagcaagccttaaggtgaacgggccatctcagcccatactggtcagggtgggcgaagacatccagctgacttgttacctgagtccaaaggcgaacgcccagagtatggaagttaggtgggacaggtcccaccgttatcccgctgtgcacgtttacatggacggcgatcacgtggcgggtgaacagatggcagagtacaggggcagaacagttctggtctctgatgcaatcgatgagggcagattgactctgcagatcctcagcgcccgtccaagcgatgacggccagtatcggtgcctattcgagaaagatgacgtctaccaagaagcttccttagacctcaaggttgtctcattggggtctagcccccttatcacagtcgaggggcaggaggacggcgagatgcaacctatgtgttccagtgacggctggttcccccagccgcacgtaccctggcgagatatggaaggaaagactattcctagtagcagccaggcattgacccaagggtcacatggtctgttccatgtgcagaccctcctacgggtgacaaacattagcgctgtggatgttacttgtagcatatccatacccttcctgggggaagagaaaattgcaacattttctctgtccggatggtag

SEQ ID NO: 216335 - DNA, 327 bp, synthetic construct
  misc_feature 1..327: note = Description of Artificial Sequence: Synthetic coding sequence
  source 1..327: mol_type = other DNA
atggtggattttccagggtacaatctgtccggtgccgtggcttcgtttctttttatcttgctgacaatgaaacagtctgatttcagggtcattggacctgcacaccccattctagccggtgtcggcgaggacgctctcctcacctgtcaacttctgcccaaacggacaaccatgcacgtggaagtccggtggtaccgctccgagccatctacccctgtttttgtgcaccgcgatggcgtcgaagtcactgaaatgcaaatggaggaatataggggctgggtggagtggatcgagaatggtatagccaaaggtaacgtggccctgtag

SEQ ID NO: 216336 - DNA, 780 bp, synthetic construct
  misc_feature 1..780: note = Description of Artificial Sequence: Synthetic coding sequence
  source 1..780: mol_type = other DNA
atggttgactttccagggtataatctgtcaggtgcggtggcatcctttcttttcattttacttactatgaaacagtccgaggatttccgagtcatcggcccagctcacccaattctggcaggcgtgggggaggacgccctcttaacctgtcagcttctaccaaaacggacaaccatgcacgtcgaggttagatggtatcggagcgagccatctacacccgtctttgttcatagggacggagtggaagtaacagagatgcagatggaagagtaccggggatgggtggagtggatagagaacggcatcgccaagggcaacgttgctctaaagattcacaatatacagccatcggacaacgggcagtattggtgtcacttccaggacggcaactattgcggggagaccagcctcctgctgaaggtggctgggctaggtagcgcccctagtatccacatggagggacctggcgaaagcggggttcagctagtgtgtaccgccaggggttggtttccagagccacaagtgtactgggaggacatcaggggagaaaagctgctggcggttagcgagcacagaattcaggatgaggacggcctgttttatgcagaggctactctggtagtgaggaatgcctccgccgagagtgtttcttgtctggtccataaccccgtgctgaccgaggagaagggtagcgtgatttcactgcctgaaaaactgcagacagagctgggcaagtatgaagtcctagcccacacatgtggtggttccctttgcccctag

SEQ ID NO: 216337 - DNA, 780 bp, synthetic construct
  misc_feature 1..780: note = Description of Artificial Sequence: Synthetic coding sequence
  source 1..780: mol_type = other DNA
atggtagattttcctggctacaacctttccggagccgtggcttcatttctgtttattctcctcacaatgaagcagagtgaggatttccgcgtgataggccctgcccaccctattctggcgggtgtgggagaggatgcgttactcacctgccagctcctgcctaagcgcacaacaatgcacgtcgaggttagatggtaccggtctgaaccatccactcctgttttcgttcacagggacggcgtggaggttacagaaatgcagatggaagagtatagaggctgggtagagtggatagagaatggaatcgccaagggaaatgtagccttgaaaatccacaatattcagccctctgataatggtcagtactggtgccatttccaggacggcaactactgtggtgagacgagcctgctactaaaggtggctgggctgggttccgcccctagtatccacatggagggccctggagagtctggcgtgcagcttgtgtgtacagctaggggctggttcccagagccccaagtttactgggaggacatcagaggggaaaagctcctggctgtgtccgagcatcgaatacaggataaggacggtcttttctatgcagaggctaccctggtggtgaggaatgcctcggcagagtccgtctcatgcctggtccataaccccgtcctcactgaagaaaagggatctgttatttcactgccagaaaagctccaaaccgaacttgggaagtacgaagtgctggctcacacttgtggcggatctctgtgcccatag

SEQ ID NO: 216338 - DNA, 636 bp, synthetic construct
  misc_feature 1..636: note = Description of Artificial Sequence: Synthetic coding sequence
  source 1..636: mol_type = other DNA
aaagcaaatgcccagagcatggaggttcggtgggatagatcacatcgatacccagcggtgcatgtctatatggatggggatcacgtggctggcgagcagatggccgagtaccgagggcgtacagtgcttgtgtcggacgctatagatgaaggacgcttgacgctccagattctgagcgccaggcctagtgacgatgggcagtatcggtgcctctttgagaaggacgacgtttatcaggaggcctcattagatcttaaagtcgtgtctttgggttcatccccgctgattactgtggagggtcaagaagacggtgagatgcagccgatgtgttcttccgatggctggttcccccaacctcatgtgccctggcgggacatggaggggaaaaccatccccagctcaagtcaggccctaacgcaagggagtcatggcctgtttcatgtacagactttactgcgcgtgaccaatatttccgctgtggatgtcacatgctccatctctattccatttctaggggaggaaaaaatcgctacattctccctgtccgagtcacgaatgacttttttatggaaaactctactggtgtggggcctgttgttggctgtggctgtgggcctccctcgaaagaggtcttag

SEQ ID NO: 216339 - DNA, 780 bp, synthetic construct
  misc_feature 1..780: note = Description of Artificial Sequence: Synthetic coding sequence
  source 1..780: mol_type = other DNA
atggtggattttcctggctataacctgtccggggctgtggcttctttcctctttatcctgttgactatgaagcagtctgaagacttccgggtcattggccctgcacatcccatactggccggagtgggcgaagacgccctgttgacttgccagctgctgccaaagaggacaacgatgcatgtggaagtcaggtggtatcggagtgaaccttccaccccagtgttcgttcaccgagatggagtcgaagttactgaaatgcaaatggaggagtacaggggatgggtagaatggatagagaacgggattgccaagggaaacgtcgcactcaagatccataacatccagccaagcgacaacggccagtattggtgtcactttcaggacggaaactactgtggagaaacctccttgctcctcaaagtggcaggtcttggttcagccccaagtattcacatggagggcccaggggagagcggagtacagctcgtgtgtacggcgagagggtggttccccgaaccgcaggtatactgggaggacattaggggcgagaaattgttagctgtctccgaacatcggattcaggataaagatggcctcttttacgcagaggccacattagtggtgcgcaatgctagtgctgagagtgtttcatgtctcgtgcacaacccagttttgaccgaagagaaggggtctgtaatatcactccctgaaaaactgcagactgagctgggcaaatacgaggttctggctcacacatgcggaggatcattatgcccttag

SEQ ID NO: 216340 - DNA, 327 bp, synthetic construct
  misc_feature 1..327: note = Description of Artificial Sequence: Synthetic coding sequence
  source 1..327: mol_type = other DNA
atggttgatttccccggatacaatctcagcggcgctgttgcaagtttcctcttcatcctactgacaatgaaacagagcgacttccgggtgattggacccgcacaccctatcttagcgggagtgggggaagatgccttattgacttgccagcttcttcccaagcggaccactatgcacgtggaggtgcgctggtatcggtctgaaccctctactcctgtcttcgtgcaccgggacggcgtggaagtgaccgaaatgcagatggaggaatacaggggatgggttgaatggatcgaaaatggcattgcgaaaggtaacgtcgcgttatag

SEQ ID NO: 216341 - DNA, 327 bp, synthetic construct
  misc_feature 1..327: note = Description of Artificial Sequence: Synthetic coding sequence
  source 1..327: mol_type = other DNA
atggtggatttcccgggatataacctatccggagccgtggccagttttctctttatcctcctgacaatgaaacaatcagatttcagggtcataggacctgcccaccctatccttgccggagtcggcgaggacgcgcttttgacctgccagttgctgcccaaacgaacgacgatgcatgttgaagtgcggtggtaccgatccgaacctagtactccagtgttcgtgcacagagacggtgtggaggtgactgaaatgcagatggaggaataccgcggatgggtggaatggattgagaatggcatcgctaaaggcaatgtggcactatag

SEQ ID NO: 216342 - DNA, 636 bp, synthetic construct
  misc_feature 1..636: note = Description of Artificial Sequence: Synthetic coding sequence
  source 1..636: mol_type = other DNA
aaagccaacgcccagagtatggaggttcggtgggataggtcccatcgctaccctgccgtgcacgtttacatggatggggatcacgtggccggagagcaaatggccgagtatcgcggaaggaccgtgctcgtgagtgatgccatcgacgaagggagactcacactgcagatactctccgctcggccatcagacgatggtcagtacagatgcctcttcgagaaagacgatgtctaccaggaagcttctttagacttgaaagtggtcgggctgggctcttcacctctgattacagtcgaagggcaggaagatggggaaatgcagccaatgtgttcatcagacggatggtttccgcagccacacgtaccttggcgagacatggaaggcaagactatcccctcttcttcacaggccttgacgcaaggatctcatggattgttccatgtgcagactctgctgcgcgtcacaaatatttccgcggtggatgtgacttgcagcatctccatacccttcctgggggaggaaaagatcgctaccttttccctgtctgaaagccgaatgaccttcctgtggaaaaccctgctggtgtgggggctgctgctggctgttgcagttggacttccccgaaagagaagctag

SEQ ID NO: 216343 - DNA, 816 bp, synthetic construct
  misc_feature 1..816: note = Description of Artificial Sequence: Synthetic coding sequence
  source 1..816: mol_type = other DNA
atggtcgattttccgggatacaacctcagtggcgcagtggcctctttccttttcatcctgttaactatgaaacagagtgaagacttccgagtgattgggccagcccatcccattctggccggtgtgggcgaggacgctcttctgacctgccagctgctccccaagcgcactactatgcacgttgaggtgcgctggtacaggagcgagcccagtacaccagtctttgttcaccgggacggtgtggaggttacagagatgcagatggaggagtatcggggatgggtggaatggatcgagaacgggattgctaagggcaatgtagctctgaagatccacaatattcagccctctgacaacgggcagtactggtgtcacttccaagacggcaattattgtggggagacatccctcctgttgaaggtagcagctgtgctgcgagacgacatcattgcctctctcaaagtgaatggtccaagtcagcccatcctcgtgagggtgggggaggacatccaactcacatgctacttgtctcctaaggctaatgcccagtccatggaggtacggtgggacagaagccaccgatatcctgcggtgcacgtatacatggatggtgatcatgttgcaggggagcagatggctgagtaccgcggaaggactgtactggtcagtgatgccatcgatgaaggcagactaacacttcagatactctctgccaggccatccgatgacgggcagtacaggtgcttatttgaaaaagacgatgtttatcaggaagcaagcctggatctgaaagtggtgtgggtgctcccccattag

SEQ ID NO: 216344 - DNA, 327 bp, synthetic construct
  misc_feature 1..327: note = Description of Artificial Sequence: Synthetic coding sequence
  source 1..327: mol_type = other DNA
atggtagactttcccggatacaatctctcaggtgccgttgccagttttctcttcatcttgctaactatgaaacagtcagacttcagggtcataggtccggcacatccaatcctggctggggtcggtgaagacgccctcctgacctgccaactgctgcctaaaaggaccactatgcacgtcgaagtgcgctggtataggtcggaaccctccacacccgtcttcgttcacagagatggcgtggaagttaccgagatgcagatggaagaatacagaggttgggttgaatggattgagaatggaatcgccaagggtaacgtggccctttag

SEQ ID NO: 216345 - DNA, 780 bp, synthetic construct
  misc_feature 1..780: note = Description of Artificial Sequence: Synthetic coding sequence
  source 1..780: mol_type = other DNA
atggtggactttcctggatacaatctgtcaggcgcagtggcttccttcctattcatccttctcactatgaagcagtctgaagacttccgcgtcatcggcccagcgcaccccatcctcgctggggtcggcgaagacgccttgttaacatgccagttgctacccaaaagaaccactatgcacgttgaggtccggtggtaccgctcagagccttcaacacccgtcttcgtgcaccgcgatggggtggaggtgacggagatgcagatggaagagtacagaggatgggtagaatggattgaaaatggcattgcaaaaggaaacgtggcgctgaagattcataacattcaacccagcgataatggacaatactggtgccattttcaagacggtaattactgtggggagacctctctcttgctcaaggtcgccggacttggctccgcgcctagtatccatatggagggtcctggagagtccggtgtgcagctggtgtgtactgccaggggctggtttcctgagccacaggtctactgggaagacatccggggtgagaagctcttagcagtgagcgaacatcgtatacaggacgaggatggtttattttacgccgaagcgactctggttgtacgcaatgcttcagctgagagcgtgtcttgtctggtgcataaccccgtgctgacggaggagaaaggatcagttatttctctccccgaaaaactacagactgaactcggaaaatacgaggtgctagctcatacctgcggcggaagtctgtgtccctag

SEQ ID NO: 216346 - DNA, 327 bp, synthetic construct
  misc_feature 1..327: note = Description of Artificial Sequence: Synthetic coding sequence
  source 1..327: mol_type = other DNA
atggttgactttcctggctacaatctgtcaggggcagtggcaagcttcctctttattttgcttaccatgaaacagagtgattttcgggtcatagggcctgctcaccctattctcgccggagtcggagaggatgctctgctgacatgtcagcttctgccaaagcgaactaccatgcacgttgaagtgaggtggtataggtcagagccgtctacccccgtgtttgttcacagagatggtgtagaggtgaccgagatgcagatggaggagtatcgcggttgggtggaatggatcgagaacggtatcgcgaaggggaacgtggcgctgtag

SEQ ID NO: 216347 - DNA, 636 bp, synthetic construct
  misc_feature 1..636: note = Description of Artificial Sequence: Synthetic coding sequence
  source 1..636: mol_type = other DNA
aaggcaaatgcacaaagcatggaagtgcgatgggatcggtcccatcgataccccgcagtgcacgtctacatggacggtgaccatgtagcgggagagcagatggccgagtacagaggtcggactgttctggttagcgacgccattgatgagggaagattgacactccagatcctgagcgcacggcctagcgatgatggtcaataccggtgcctgttcgaaaaggacgatgtgtatcaggaagccagcctagatctcaaagtggtcggattgggttcctcccccctaattacagtcgagggacaggaggacggtgaaatgcaaccgatgtgctcttccgatgggtggtttccacagccccacgtgccatggcgcgacatggaggggaagaccataccttccagcagtcaagccttaactcaaggttctcatggactctttcatgtgcaaacattgctgcgcgttactaacatatctgcagtagatgtcacctgttcaatttctatcccatttcttggcgaggaaaagatagcaaccttctctctctctgagagccgcatgaccttcctgtggaaaaccttgcttgtatggggcctcctcttggcagtagctgtgggcttgccgagaaagaggtcttag

SEQ ID NO: 216348 - DNA, 780 bp, synthetic construct
  misc_feature 1..780: note = Description of Artificial Sequence: Synthetic coding sequence
  source 1..780: mol_type = other DNA
atggttgacttccccggttacaacctctcaggagcggttgcgtctttcttgtttatactgctaacaatgaaacagagcgaagatttcagggtgatagggcctgcccatcccatccttgccggagtaggagaggatgcactgctgacgtgccagctcctgccaaagagaaccaccatgcacgtagaggtgcggtggtaccgttctgagccctctactcctgtgttcgtccaccgggacggcgtggaagtgaccgagatgcagatggaagaataccggggatgggttgaatggattgagaatggcattgcaaaaggcaacgtggcattaaaaattcacaacatccagccttcagataacggacagtactggtgtcattttcaagacggcaattattgtggagaaacttctttgctgctgaaggtcgccggactgggatccgctcccagtatccatatggaaggcccaggagagagcggtgtccagcttgtctgcaccgcacggggatggtttccagaacctcaagtatactgggaggatattaggggcgagaagctgctggccgtgagcgagcacagaatccaggacgaggatggactgttctacgctgaagctaccttggttgtgcgcaatgcttctgccgagtcagtcagctgcctggttcacaatccggtgcttacggaggaaaagggctctgtcatctccctccccgaaaaactgcaaactgagctcggcaagtacgaggttctggctcatacctgcgggggatccctgtgcccatag

SEQ ID NO: 216349 - DNA, 780 bp, synthetic construct
  misc_feature 1..780: note = Description of Artificial Sequence: Synthetic coding sequence
  source 1..780: mol_type = other DNA
atggtggattttcccggatataatttgagtggcgctgtcgcgagcttcctatttatactgcttactatgaagcagtcagaggacttcagagtgattgggcctgcccaccctatcctggccggagttggggaagatgctttactcacatgtcagctcctccccaaacgcaccaccatgcatgtggaagtgcgatggtatcgcagcgaaccatcaacccctgtctttgtgcacagggatggcgtggaagttacagagatgcagatggaggagtaccgcggatgggtggaatggatcgaaaatggtatcgctaaaggtaatgttgcccttaagatccataacattcagccatccgataacggacagtattggtgtcatttccaggacgggaattactgtggggaaacctctctgctgcttaaggtggccggattgggtagtgcaccttccattcacatggaaggaccaggggaaagcggagttcagctcgtatgcacagcacgtggctggttcccagaaccccaggtgtactgggaagatattaggggggaaaagctgctggccgtctctgagcacaggattcaagataaagatggccttttttatgctgaggccacacttgtggtccgcaatgcctcagccgagtccgtatcgtgcttagttcataatccagtcctgactgaggaaaagggcagcgtgatttccctgcccgagaaacttcagacagagctcggaaaatatgaggttcttgctcatacgtgcggcggaagcctatgtccctag

SEQ ID NO: 216350 - DNA, 327 bp, synthetic construct
  misc_feature 1..327: note = Description of Artificial Sequence: Synthetic coding sequence
  source 1..327: mol_type = other DNA
atggtggactttcctgggtacaacctatcaggggcagtggcctcttttttgttcatccttttgacaatgaagcagtctgatttcagagttattggacccgcacaccccatcttagcaggagtcggagaggatgcacttttgacatgccagctcctgcccaagcgcacaacaatgcacgtggaagtgcgttggtatagaagtgagccctctacacctgtgttcgtgcatcgcgatggtgtggaggttacagaaatgcagatggaagagtacaggggttgggtggaatggatagaaaacggaatcgcaaagggaaatgtagctctgtag

SEQ ID NO: 216351 - DNA, 780 bp, synthetic construct
  misc_feature 1..780: note = Description of Artificial Sequence: Synthetic coding sequence
  source 1..780: mol_type = other DNA
atggtcgactttcctgggtacaatctttctggtgccgtggccagtttcctcttcatcttgttgacgatgaagcagagcgaggactttcgtgtaatcggacctgcccacccgatcctagcgggagttggcgaggatgctctcctaacatgtcaattgctgccgaagcgcactaccatgcatgtagaggtcaggtggtaccgctcagaaccgagcaccccagtgtttgtacacagagacggagtcgaggttacagagatgcagatggaagagtacaggggttgggtggagtggatcgagaatgggatcgcaaagggcaatgtggctctcaagattcacaatattcagccctcggacaacggtcagtactggtgtcattttcaggacggcaactattgcggtgagaccagtctgttgctaaaggtggccggtctcggttctgccccttcaattcacatggaaggacctggggagagcggggtgcagctggtgtgtaccgccagaggctggttccccgaaccacaggtttactgggaggatattcgcggagaaaaattgctggcagtttccgagcaccgcatacaggacaaggacggtcttttttacgcagaggccacccttgtggtgcgcaatgcctccgccgagagcgtgagctgtctcgtacataaccctgtgctgacagaggagaaggggtcggtgatctcgctgcctgagaaacttcaaacagagctgggtaagtacgaggtcctcgcccacacctgtgggggatcactgtgtccctag

SEQ ID NO: 216352 - DNA, 636 bp, synthetic construct
  misc_feature 1..636: note = Description of Artificial Sequence: Synthetic coding sequence
  source 1..636: mol_type = other DNA
aaggccaacgctcagagtatggaagttcgatgggatcgctcccaccgctatccggctgttcacgtgtacatggacggtgatcatgtggctggagagcaaatggcagagtacaggggaaggaccgtgttggtgtctgacgcaattgacgaaggtaggctcactttgcaaattctttctgcaagacccagtgacgacggacagtaccgctgtctgttcgaaaaagacgacgtgtatcaagaagcttctttggacctgaaagtggtcggcttgggtagctcccccctgatcaccgtggagggacaggaagatggcgagatgcagccgatgtgctctagcgacggttggttcccgcagccacacgtgccttggagagatatggaaggcaaaactattccttcatcctctcaggccctaacgcaagggagtcacgggcttttccatgtgcagaccctgcttcgtgtgacaaatatcagcgccgttgacgttacatgttctatctcaattccattcttgggggaggaaaaaatcgctacttttagcttgtctgagagtcgaatgacatttttgtggaagactctgctagtatggggtctgctgctggcggtcgcagtcgggctcccgcgaaagcgaagttag

SEQ ID NO: 216353 - DNA, 636 bp, synthetic construct
  misc_feature 1..636: note = Description of Artificial Sequence: Synthetic coding sequence
  source 1..636: mol_type = other DNA
aaagccaatgcacagagtatggaagttcgttgggaccgtagccaccggtatccggcagtacacgtttatatggatggagaccacgtagccggagagcagatggcggaatacagaggtaggacggtcttggtcagcgacgctattgatgagggcaggttgaccttgcaaattctgtcagcacgtcccagtgacgacgggcagtaccgctgtctcttcgagaaggatgacgtgtaccaagaagctagtctggacctcaaggtggtgtccctgggatccagtcccctgatcactgtagagggtcaagaagacggtgagatgcagcccatgtgttcgtccgatggttggtttccacaaccccatgtgccttggcgtgacatggaaggcaagaccattccttccagcagccaggcacttacacagggctcgcacggtctgttccacgttcagacactgctcagggtgaccaacatttcagccgtggacgttacatgctccatttccattccatttctcggggaagaaaagatcgccaccttcagcctatcagaaagccgaatgacattcctctggaagaccctgctcgtgtgggggcttttattagcagttgccgtgggactgcctaggaagaggtcatag

SEQ ID NO: 216354 - DNA, 636 bp, synthetic construct
  misc_feature 1..636: note = Description of Artificial Sequence: Synthetic coding sequence
  source 1..636: mol_type = other DNA
aaggcaaacgcgcagtccatggaggtgcgatgggacagaagtcacaggtatccagcagttcatgtgtacatggacggagatcatgtagctggcgagcagatggccgagtacagggggagaacggttctggtgagcgacgccatcgatgaggggcgattaacactccagatcctttcagctcggcctagcgacgacggccagtaccgctgcttgtttgagaaggatgatgtgtaccaggaggcttcactcgatctgaaggttgtgagcctgggcagctctcccctgattactgtcgaggggcaggaagacggcgaaatgcaacccatgtgctccagtgatggttggtttccgcagccccacgtcccctggagagacatggagggtaagaccattccaagctcaagccaagcacttactcagggctcccatgggctgtttcacgttcagacactactccgggttactaacatttctgccgtcgacgtcacttgctctatcagcatcccttttctgggggaagagaaaatcgctaccttcagcctatcagaaagtcggatgacgttcctgtggaagactctgttggtatggggcctcctccttgcagtggcagttggcctgccacgcaaaaggtcttag

SEQ ID NO: 216355 - DNA, 327 bp, synthetic construct
  misc_feature 1..327: note = Description of Artificial Sequence: Synthetic coding sequence
  source 1..327: mol_type = other DNA
atggtagacttcccaggatacaacctgagtggcgcagtagcttctttcctgtttatactgctgacaatgaagcaatctgacttccgtgtgatcggacccgcacaccccatcctcgcaggggtcggggaagatgctctgcttacatgccagttgctgccaaaacgcactacaatgcatgtggaggtgagatggtataggtcagagccatcgacgcctgttttcgtccatagggacggcgtggaggttactgagatgcaaatggaagaataccggggttgggtcgagtggattgaaaatgggatcgccaaaggtaatgtggccctatag

SEQ ID NO: 216356 - DNA, 636 bp, synthetic construct
  misc_feature 1..636: note = Description of Artificial Sequence: Synthetic coding sequence
  source 1..636: mol_type = other DNA
aaggctaacgcacagagcatggaagtacgctgggacaggtctcaccggtacccggcagttcacgtttacatggatggcgatcacgtggccggtgagcagatggctgaataccgcggaagaacagttcttgtaagcgacgcgattgatgagggacggctcactttgcaaattttgagcgcgcgaccgagcgatgatggccagtataggtgcctgttcgaaaaggacgacgtctaccaggaagccagtctggatctcaaggtcgtgtcactgggcagctctccattaattactgtggaggggcaagaggacggagagatgcagcccatgtgctcctcagatgggtggttcccacaaccacatgtgccctggcgggatatggaaggcaagaccatcccatcctcttcgcaggccctgacgcaggggtctcatggactcttccatgtgcagacacttctgcgggtgactaacattagtgcagttgatgtcacatgttcaatcagcattccattcctgggggaggaaaaaatcgcaacatttagtcttagcgagtctcgaatgactttcttgtggaaaacccttctcgtctggggtctccttctggccgtcgctgttggcctgcccagaaagcggagctag

SEQ ID NO: 216357 - DNA, 1449 bp, synthetic construct
  misc_feature 1..1449: note = Description of Artificial Sequence: Synthetic coding sequence
  source 1..1449: mol_type = other DNA
atggtggacttccctggatacaacctgtcaggagccgtagcgagtttcctcttcatactgctcacgatgaagcagagcgaagactttagagtgatcggcccagcccatccaatcctcgccggagtcggggaagacgccttgttgacctgtcagctgctgcctaagaggaccaccatgcatgttgaagtgcgctggtacagaagcgagcctagtacacccgtgttcgtgcaccgtgacggtgtcgaagtgaccgagatgcagatggaggagtaccggggttgggtcgagtggatcgagaacggcatcgctaaggggaacgtggctctaaaaattcacaatatacagccatccgataacgggcagtactggtgtcactttcaggacggcaactattgcggggaaacatctttactgctgaaggttgccggactcggcagcgcaccaagtatacacatggaagggcctggggaatcaggagtccagttggtgtgtacagccagaggatggttcccagagcctcaggtctactgggaggatatccggggagagaagctcctggctgtgtcagaacaccgtattcaagataaggacgggttattctatgcagaagctacattagtggtgagaaacgccagcgccgaatccgtatcctgcttggtccacaacccagtcctgactgaagagaaaggatcagtgatctccctgccggagaagctgcagaccgaactggcgagcctgaaggtgaatggtcctagtcagcctatattagtacgagtgggggaggatatccagctgacttgttatctgtccccaaaggcaaacgcacagtccatggaagtgagatgggacagaagtcatcgatacccggcagttcacgtgtatatggacggggaccacgtggcgggagagcaaatggctgagtaccgaggccgtacagtgctggttagcgatgcgattgacgaggggagactgacacttcagatcctgagcgcgaggccatcagatgatggtcagtatagatgtcttttcgagaaggacgacgtttatcaggaggcttcactggacctgaaagtggtgagtcttgggtccagtcctctgattaccgtggagggtcaggaagatggggaaatgcaacctatgtgttccagtgacggttggttccctcagcctcacgtcccttggcgcgacatggaaggcaaaaccattccatcttcaagtcaggccctgacacagggatcccacggcctcttccatgtgcagacactcctgagggtaactaatatctcagcagtcgacgtcacatgcagcatctctattccattcctgggtgaggagaagattgctaccttttctttaagcgagtcacgtatgacatttctatggaaaaccttgctggtttggggcctcctgctcgctgtagccgtcgggctgcctcgcaagcggagttag

SEQ ID NO: 216358 - DNA, 738 bp, synthetic construct
  misc_feature 1..738: note = Description of Artificial Sequence: Synthetic coding sequence
  source 1..738: mol_type = other DNA
atggtggatttccctggatacaatttgagcggggcagtggccagttttctttttatcttgctgacaatgaaacagagcgaccggctggatacccctaaggcttctcttaaagttaacggaccctcgcaaccaattttggtcagggtcggtgaagacatacaacttacctgttacctgtcaccaaaggctaacgcccagtcaatggaggtacggtgggatcggagccacagatacccggcagtccacgtgtatatggatggcgatcatgtggcgggagagcagatggctgaatatcgaggtaggaccgtcctcgtgtcagacgcaattgatgaaggtcgattaacccttcaaatcctttcggctagaccgagcgatgacggacagtatagatgtcttttcgaaaaagatgatgtgtaccaggaagcgagtttggatctgaaagttgttagccttggaagcagtcccctgattaccgttgagggccaggaggatggtgaaatgcaacccatgtgctcctcggacggatggttcccccagccacatgtcccttggcgggatatggaggggaaaactataccgtcaagttcacaggctctcacccagggaagccacggcctattccacgttcagacactgcttcgtgtgactaacatatctgccgtggacgttacctgttcaatcagcatcccttttttaggtgaggaaaagattgccactttctctctgagcgggtggtag

SEQ ID NO: 216359 - DNA, 537 bp, synthetic construct
  misc_feature 1..537: note = Description of Artificial Sequence: Synthetic coding sequence
  source 1..537: mol_type = other DNA
atggaagtcagatgggatagatctcaccggtacccggctgtgcacgtgtacatggatggggaccatgtagctggcgagcagatggccgagtacagagggcgtacagtgctcgtgtcagatgccattgacgaaggtcgccttaccctgcagattctctcagccaggcccagcgacgacgggcagtatagatgcctttttgaaaaagacgatgtttaccaggaagcatcattggacctgaaagtggtctctctgggctctagtccactcattaccgtcgaagggcaggaagatggtgagatgcagcctatgtgcagcagtgacgggtggtttccacagccacacgttccatggcgggatatggaagggaagaccataccgagttctagccaggcactgacccaaggaagccacgggctttttcacgtccagacccttctccgtgtgacaaatatatcggcagttgacgtgacttgtagcatctcgatcccattcctcggtgaggagaaaatcgcaactttctctttatcagggtggtag

SEQ ID NO: 216360 - DNA, 1167 bp, synthetic construct
  misc_feature 1..1167: note = Description of Artificial Sequence: Synthetic coding sequence
  source 1..1167: mol_type = other DNA
atggtggatttccccggatacaacctcagtggcgctgtggcatccttcctattcattctgctgacaatgaaacagagcgaggatttccgtgtaataggccctgcacatcctatcttagcaggtgtgggggaggacgccctgttaacctgccagcttcttcctaagcgcaccacaatgcacgtggaggttcggtggtaccggagcgaaccatcgactccagtgttcgtccaccgggacggcgtcgaagtgaccgagatgcaaatggaagagtatcgaggttgggtagagtggattgagaatggtatcgcaaaaggaaatgtggccctgaagattcacaatatccagccttccgataatggacagtactggtgtcatttccaggacggcaattattgtggggagacatccctgctgcttaaagtggcagaaaaattacttgccgtgctgtccagtctgaaagtgaacggcccttcgcagccaatccttgtgagggtcggtgaagacattcaattgacgtgttatctcagtcctaaagcgaacgcccagtcaatggaggtacgatgggaccggtcccataggtatcccgcagtgcacgtgtacatggatggggaccatgttgccggagaacagatggcagaataccggggtcgtactgtcttggtgtccgacgccattgatgaaggccgacttactttgcaaatcctgtcggctagaccatccgatgacggtcagtatcggtgcctgttcgagaaagacgacgtatatcaagaggccagcctggacctcaaagtagtgagtctcggatcaagtcccctgattactgtggaaggccaggaagatggggagatgcagcccatgtgctcaagcgatggatggttcccgcagcctcacgtcccttggcgagacatggagggtaagacaattcctagttcctcccaggctcttacccagggatctcacggattgtttcatgtgcagacgctgctgagagtgactaatattagcgccgtagatgtcacctgcagcatcagcatcccgttcctaggcgaagagaagatcgccaccttcagtctatcggagagccgcatgacgttcctttggaagaccctcctggtgtggggcctcttgttagccgtagccgtgggccttcctcggaagaggagttag

SEQ ID NO: 216361 - DNA, 1167 bp, synthetic construct
  misc_feature 1..1167: note = Description of Artificial Sequence: Synthetic coding sequence
  source 1..1167: mol_type = other DNA
atggtcgactttcctgggtataatctgagcggcgcagtcgcctctttcctctttattcttctgaccatgaagcaatcagaggactttcgggttatcgggcctgcccacccaatactggctggggtgggcgaagatgcactgctcacctgtcaactgctacccaagaggaccactatgcacgtagaagtccgctggtaccggagtgaacccagcacccctgtgttcgtacaccgcgatggcgttgaggtgaccgagatgcagatggaagagtaccgtggctgggtggaatggatagaaaacgggatcgcaaagggcaacgtcgccttaaagattcataatatccagccttcggacaatgggcaatactggtgtcacttccaggacggcaattactgcggcgaaacaagtctcctcctgaaggtggctgagaaactcttagctgttctctcttccttaaaagtgaatggcccatcccagcctatcctggttagagtgggagaagatatccagctaacgtgctatctctcacccaaggcgaatgcccaatcaatggaagttcgttgggatagatctcatagataccccgctgtgcatgtgtacatggatggagaccatgtggcgggagagcagatggccgagtacagagggagaacggtcttggtgtctgacgccatcgacgaaggcaggcttaccctccagatcctaagcgcccgaccctcagatgatggacagtaccgttgtctgtttgaaaaagatgatgtgtaccaggaggcttcgttggaccttaaagttgtgggtctgggatcttcaccattgattaccgtggaaggccaggaggatggggaaatgcagccaatgtgctccagtgacggttggttcccccaaccacatgtgccctggcgcgacatggagggaaagacaattccaagctcctctcaggccctcacacaagggagtcacggactctttcatgtgcaaaccctgttaagggtaaccaatataagcgcggtggacgtgacttgttccatctccatcccgtttctcggtgaggaaaagatcgccactttctctttatctgagtcccgcatgaccttcctctggaaaaccctcctggtatggggcctgcttttagctgtggcggtcggccttcctcggaagcgatcatag

SEQ ID NO: 216362 - DNA, 1167 bp, synthetic construct
  misc_feature 1..1167: note = Description of Artificial Sequence: Synthetic coding sequence
  source 1..1167: mol_type = other DNA
atggtagactttcctggatataatctctccggagccgtcgcgtcctttctgtttatcctcctgacaatgaagcagagcgaagactttcgcgtcattggcccagcacatcctattttggcaggcgtaggcgaagacgccctgctgacatgtcagcttctgccaaaaaggaccactatgcacgttgaggtcaggtggtatagaagcgagccctccacccctgtgtttgtgcacagggatggggtagaggtcaccgaaatgcagatggaggaataccggggatgggtagagtggattgaaaacgggattgccaagggaaatgttgcgctgaagattcacaacattcagccatcagacaacggccagtactggtgccattttcaggacgggaattattgcggcgaaacctctctgctgcttaaagtagcagagaaattactcgccgtcctgtcttcactaaaggtgaacggcccttcccaaccaatcctcgtacgagttggagaagacatccagctgacatgctacctgtctccaaaggctaacgcccaaagcatggaagtgcgatgggaccgctcacatcgttatcccgcagtgcatgtgtatatggacggtgaccacgtggccggagagcagatggctgagtataggggcaggaccgtgctggtaagcgacgccatcgatgaagggagacttaccctgcaaattcttagcgcgaggccaagcgatgatggtcagtatcggtgtctgtttgaaaaggacgatgtgtaccaggaggcttcactagatctgaaggtggtatccctgggttcttcacctctgattacagtggaaggccaggaagatggcgaaatgcagcctatgtgctcgagcgatggttggttccctcaaccacatgttccttggagggatatggaggggaaaaccatacctagctcatctcaggcattgacccaaggcagccacggactgttccacgtccagacactcctgcgcgtgacaaacatctcagccgtggacgtgacatgtagtatctctattccatttttaggggaagaaaaaatcgcaacattctccctgtctgagtccaggatgacttttttgtggaagacactgttggtgtggggactgctcctcgcagtggctgtcggtctgcctaggaaaagaagctag

SEQ ID NO: 216363 - DNA, 738 bp, synthetic construct
  misc_feature 1..738: note = Description of Artificial Sequence: Synthetic coding sequence
  source 1..738: mol_type = other DNA
atggtggattttcccggatacaatctatcaggcgctgtagccagctttctctttatcctgctgacaatgaagcagtccgaccgattagacacacccaaagcctcgttgaaggtgaatgggccttcccaacccattcttgttagggtgggcgaggacatccaacttacatgctatttgagcccgaaagcaaacgcacagagtatggaggttcgctgggaccgcagccacaggtacccggctgttcatgtgtacatggacggggatcacgtggccggagagcagatggccgagtacagaggcaggaccgtgctggtctctgacgccattgacgagggacgactcactctacaaattctctccgcccgaccctcggatgacggacagtaccgatgtctgtttgaaaaggatgatgtgtaccaagaggctagcctggatcttaaggtcgtgggcctcggctctagccctctgataactgtggagggccaagaagacggcgaaatgcaacctatgtgctcttctgatggttggtttccacagccacacgttccctggagagacatggaggggaaaacaattccgagttctagccaggctttaacacaaggtagccatggtttatttcacgttcagactctgttgagggtaaccaatatttccgctgtggatgtcacctgttccatctctattccattcctgggcgaggaaaaaatcgctacctttagcctgtctggatggtag

SEQ ID NO: 216364 - DNA, 738 bp, synthetic construct
  misc_feature 1..738: note = Description of Artificial Sequence: Synthetic coding sequence
  source 1..738: mol_type = other DNA
atggtagactttccaggatataacctgtcaggagcggtcgccagctttctattcatcttattgacaatgaagcagtctgatcggctcgacacgcccaaggcctcattgaaagtaaatgggccttcacaacctatcctagttcgcgtgggggaggatatacagctgacatgttatctgtctccaaaggccaatgctcaaagtatggaagtgcgctgggacaggtcgcatagatatccagcagtgcacgtgtacatggacggtgaccatgtggctggagagcagatggcggagtaccgcggaaggaccgtgttggtttcagacgccatcgatgagggtagactgactttgcagatcttgtcggcaagacccagcgatgacgggcagtaccgctgcctgttcgaaaaggacgatgtataccaggaagcctcactcgatttaaaagtggtgagcctgggcagcagtcctctgattaccgtagaagggcaagaggatggcgagatgcaaccaatgtgctcctccgacggatggtttcctcagccccacgttccatggagagacatggagggtaagaccattccatcctccagtcaggctctaacccagggctcacatggtctcttccatgtgcagaccctgctcagagtcaccaatatatcagcagtggatgtaacctgctctatatctataccgttcttgggcgaggaaaagatcgcaaccttctcgctgagtggctggtag

SEQ ID NO: 216365 - DNA, 1167 bp, synthetic construct
  misc_feature 1..1167: note = Description of Artificial Sequence: Synthetic coding sequence
  source 1..1167: mol_type = other DNA
atggtggacttccccggatataacctgtcaggcgcagtcgcatccttcttattcatattactgactatgaaacagtctgaagactttagagtgatcggccctgcccatcctattcttgctggggtaggagaagacgcactgctgacatgtcagttgctacctaagcgtactaccatgcacgtggaggtgaggtggtaccggtccgaaccatccacacccgttttcgtgcacagggatggtgtggaagttacagagatgcagatggaagagtaccggggatgggtagagtggatcgagaatgggattgctaagggtaatgtcgcactaaaaattcacaatatccagcccagcgacaatggccagtactggtgccacttccaagatggcaactattgtggtgagactagtctcttactgaaagtggctgagaagctgctcgcggtgctctccagcctaaaagttaatggcccttcccagccaattctggtccgcgtcggagaggacatccagctcacctgctacctaagccccaaagctaatgcacagagcatggaggtgcgttgggatcggtcccatcgatatccggctgtgcacgtctacatggacggggaccacgtggccggagagcagatggcagaatacagggggaggacagttctcgtgtcagacgcaattgacgagggcagactgacgttgcaaattctgtcggctcggcctagcgatgacggccagtatcgatgcctgtttgagaaagatgatgtttaccaggaggcgtctctagacttgaaagttgtttcattgggaagctcccctttgatcactgttgaggggcaagaagatggtgaaatgcagcccatgtgttcctctgacggctggtttccccagccacacgtgccctggagagacatggaagggaaaacaattccgagttcctcgcaggctcttacgcagggcagccacggattgttccatgtacagacactcctgcgtgttactaatatttccgccgtggacgtgacctgcagcatatctatcccatttttgggtgaagaaaagatagcgacgtttagtctgagtgagtctagaatgacatttctttggaaaactctgctagtgtgggggctactgctcgctgtggcagtcggacttccgcgaaagcggagctag

SEQ ID NO: 216366 - DNA, 816 bp, synthetic construct
  misc_feature 1..816: note = Description of Artificial Sequence: Synthetic coding sequence
  source 1..816: mol_type = other DNA
atggttgactttcccggttataacctgagtggcgctgtagcaagctttctctttattctgttgactatgaagcaatcagaagactttagagtgatcggacccgctcatccgatcctggctggggtgggcgaggatgccctgctaacctgccaactcctgcctaagaggacgaccatgcatgtcgaggtccgttggtacagaagtgaacctagcactcctgtgttcgttcatagggacggcgtggaagtgacggaaatgcagatggaggagtacagggggtgggttgagtggatcgagaacgggattgctaaggggaacgttgcattgaagatccataacattcagccttccgataacggacagtactggtgccacttccaggatggcaattattgtggggaaaccagcctgctcttaaaggtcgcagctgtgctccgggacgatatcatagcatctctcaaggtgaatggcccttcacagcctatccttgttagagttggtgaggatatccagctgacttgttacttgagtcccaaggcaaatgcccagtctatggaggtccggtgggaccgaagtcacagatatccagctgtgcacgtttatatggatggggatcatgtggcgggagagcagatggccgagtacaggggccgaacggtgctagttagcgatgctattgatgaaggtcgcctcacattgcagattctgagcgcgcgaccttctgatgatggtcagtaccggtgtctctttgagaaagacgatgtgtaccaggaggccagcctggatctgaaagtagtgtgggttttgccacactag

SEQ ID NO: 216367 - DNA, 738 bp, synthetic construct
  misc_feature 1..738: note = Description of Artificial Sequence: Synthetic coding sequence
  source 1..738: mol_type = other DNA
atggtggatttccccggttataacttatcgggcgctgttgccagcttcttgttcattctcctcactatgaaacagtccgagaagctccagacggagctggcttccttgaaagtgaatggcccttcccaaccaattctcgtccgggtgggggaagatattcagttgacatgttacctttccccaaaagccaatgcccagagtatggaggtccgatgggacaggtctcaccgttacccagcagtccacgtttatatggatggggaccatgtagcgggtgagcagatggccgaatatcgcggtagaaccgttctggtatctgacgccattgacgagggcaggctcaccctgcagatcctgagtgctcgtccatcggacgacgggcaatatcggtgcctattcgagaaagatgatgtctaccaggaggccagcctagacctgaaagtcgtcggccttggctccagcccactgatcactgtggaaggacaggaggatggggaaatgcagcctatgtgcagctctgatggatggtttccacagcctcatgtgccttggcgggacatggaggggaaaaccatcccctcatccagccaagccctaacccagggttctcacggcttgtttcatgtgcaaactctactgcgtgtaacaaatattagtgctgtcgatgtgacttgttctattagtataccttttctgggcgaggagaagattgcaaccttttccttgagcgggtggtag

SEQ ID NO: 216368 - DNA, 537 bp, synthetic construct
  misc_feature 1..537: note = Description of Artificial Sequence: Synthetic coding sequence
  source 1..537: mol_type = other DNA
atggaggtacgatgggataggtcccaccggtatcctgcggtccatgtgtatatggacggcgaccatgtggcgggagagcagatggccgagtaccgaggtaggactgtactggtcagcgatgcgatcgacgaagggcgactgacactgcagattctgtccgcacggccatccgatgacggacagtacagatgtctgtttgagaaggacgacgtatatcaggaagcttctcttgatctaaaagtagttggtcttggatcgagcccactcatcaccgttgaaggccaagaggacggcgaaatgcaacccatgtgcagtagtgacggctggtttcctcagccacatgtcccctggagggacatggagggaaagacaatcccgtcctcctctcaggctctgacccaggggtcacatggactcttccatgttcagacactgctccgcgtcacgaacatctccgccgtggatgtgacgtgtagcatctccattccttttctcggggaagaaaaaatcgctaccttttcgctgtccggatggtag

SEQ ID NO: 216369 - DNA, 738 bp, synthetic construct
  misc_feature 1..738: note = Description of Artificial Sequence: Synthetic coding sequence
  source 1..738: mol_type = other DNA
atggtggacttcccaggctataatctgtccggcgctgtggctagctttctgttcatcctgctgactatgaaacagtcggacagattagacacacccaaggcttccctaaaagttaatgggccatcacagccgatcctggttcgcgtgggcgaggatatacagttaacctgctatttatctcctaaggctaatgcccagtcaatggaagtgcggtgggaccgcagccacaggtatcccgcagtacatgtgtacatggatggagaccatgtcgccggagaacagatggccgagtaccgaggccgaactgttttggtctcagacgctatagacgaagggagactgacactccaaattctgtccgccaggccttcagacgatgggcagtatagatgtctttttgagaaggatgatgtttatcaggaggcctctcttgacctaaaggtagtctctttaggctcatctcctctgatcacagtcgagggccaagaagatggagagatgcaaccaatgtgtagcagcgatggatggtttccgcagccgcatgtgccttggcgggatatggaggggaagaccattccgtcgtcctcacaggccctgacccagggctcacatggcctgtttcacgtacaaactctgttgcgtgttacaaatatctcagcggtggacgtgacttgttctatctctataccctttttgggcgaggaaaagatcgctaccttctcattgagtggctggtag

SEQ ID NO: 216370 - DNA, 1368 bp, synthetic construct
  misc_feature 1..1368: note = Description of Artificial Sequence: Synthetic coding sequence
  source 1..1368: mol_type = other DNA
atggttgattttcctggctacaatctgagcggcgctgtcgcttcgttcctgtttatactgctgacaatgaagcagagcgaggacttcagagtgatcgggccagcccacccaatactggcaggcgtgggcgaagatgccctccttacttgccagctgctaccaaagcgaacaaccatgcacgtagaagttagatggtatagaagtgagccgtcgaccccagtctttgtacaccgcgatggcgtggaagttacggaaatgcaaatggaggaatacagaggttgggtggagtggattgaaaacggcatcgcaaaaggaaatgtggccttaaaaatccataacatccagccctcagataacggacagtactggtgtcactttcaggatgggaattattgtggtgaaactagtctcctattgaaagttgcaggcctaggctcggcacctagtattcatatggagggcccaggggaatccggcgttcagctggtgtgcaccgcccgtggatggtttcccgaacctcaggtatactgggaggatatcaggggagagaagttactggcggtaagcgagcatcggattcaagatgaagatggcctgttctacgctgaggccactctggttgtgcgcaatgccagcgccgagtccgtgtcatgcctcgtgcacaatccggtcttaactgaagaaaagggatccgtcatctcgctgcccgagaagctccagacagagctggcttcattgaaggttaacggcccaagccagccaatattggtgcgggtgggagaagatatacagctgacctgctatctgagccctaaggccaacgcgcagagcatggaagtaaggtgggatagatcacatcgctatcccgcagtccatgtctacatggacggcgatcatgtggccggagaacagatggccgagtatcggggtagaaccgttctggtgtcagacgctatcgatgagggacgcttaacattacagatcctgtccgccagaccttcagatgacggccaatacaggtgcttgtttgagaaggacgatgtctatcaggaagcgtctctagatctaaaggtcgtgggtctgggatcaagtcctttgataaccgtggagggacaagaggatggggagatgcagcctatgtgtagtagcgatggctggttcccccagccccatgtgccttggagggatatggaggggaagacaatcccctctagttcacaggccctgacccagggcagtcatggtctgttccacgttcagactttactgcgcgtcaccaacatcagcgccgtagacgtaacgtgtagcatttccatacccttcctcggcgaggaaaaaatcgccactttcagcctaagtggatggtag

SEQ ID NO: 216371 - DNA, 816 bp, synthetic construct
  misc_feature 1..816: note = Description of Artificial Sequence: Synthetic coding sequence
  source 1..816: mol_type = other DNA
atggtcgacttccccggatacaacctttcaggggcagtggcttcctttctgtttatcctgctcaccatgaagcaatccgaagacttcagggtaattggccctgcccaccccatcttagctggcgttggagaagacgccctgctgacctgtcagctgttacctaagaggacaacaatgcatgtggaagtgaggtggtaccggtctgagccctctacccctgtgttcgttcaccgcgacggtgtcgaggtcacagaaatgcagatggaggaatacaggggctgggtggaatggattgagaacggaattgccaaaggaaatgttgcgcttaaaatccacaacattcagccaagcgacaacggacagtactggtgccacttccaggacggtaattattgtggggagaccagcttattactgaaggtagccgctgtgcttcgggacgatattatcgcttctctaaaggtcaatggtccttctcaacctattctggtccgcgttggtgaggatatccaactcacctgttacctgagccccaaggcaaatgctcagtcaatggaggtgcggtgggacaggagtcaccggtaccctgctgtacatgtctatatggacggggaccatgtggccggtgaacagatggccgagtatcggggtaggaccgtactggtctccgacgccattgacgaggggagactaactctccaaatcctgagcgctcgaccaagcgacgatgggcagtaccgatgcttattcgagaaggatgacgtatatcaagaagcctcactggacctcaaagtcgtctgggttctgccgcactag

SEQ ID NO: 216372 - DNA, 816 bp, synthetic construct
  misc_feature 1..816: note = Description of Artificial Sequence: Synthetic coding sequence
  source 1..816: mol_type = other DNA
atggtggattttcctggatataacctgtcaggggcagtggccagtttcctgtttattctactcacaatgaagcagtccgaggacttccgtgttataggccctgcccatccaattcttgctggtgtgggggaggacgcactcctgacctgtcagcttttacctaaacgcaccacaatgcacgtagaagtgcgctggtaccgttccgaacctagcacaccggttttcgtccacagggacggagtagaagttacagaaatgcaaatggaagagtatcgcggttgggtggaatggatcgaaaacggcatcgctaaaggtaatgtcgcccttaagattcacaacatccagcctagtgacaatggccagtactggtgccactttcaggacggcaattattgtggcgaaacatccctcttgttaaaggtggcagctgttttgcgggatgatattatcgcatcattgaaggttaatggtccgtcccaacccatcttggtgagggtgggtgaggacatacagctgacctgctacctaagccctaaagccaacgctcagagtatggaagtgcgctgggatcgctcacatcgataccccgcagtccatgtctatatggatggagaccacgtagccggagagcagatggccgagtataggggacgcaccgtgctggtcagtgatgccatcgatgagggaaggttaaccttgcagattctgagtgccagaccctcagatgacggccagtaccgatgcctcttcgaaaaggacgacgtgtaccaggaggcaagcctggatcttaaggtcgtgtgggtcctacctcattag

SEQ ID NO: 216373 - DNA, 738 bp, synthetic construct
  misc_feature 1..738: note = Description of Artificial Sequence: Synthetic coding sequence
  source 1..738: mol_type = other DNA
atggtggatttcccagggtacaatctctctggtgccgtggcttcctttctcttcattctactgaccatgaagcaaagcgatagactggatacaccaaaagcatcactgaaagtcaacggccctagccagcccatcctggtgcgcgttggggaggatattcagctgacctgctatctctcccccaaggcaaatgctcagagtatggaggtgagatgggataggtcccacaggtaccccgcagttcacgtgtatatggacggggaccatgttgcaggtgagcagatggctgagtacagaggaagaaccgtgctggtgagcgacgctatcgatgagggccgactgacactccagatactgtcagctcgcccttcagacgatggccagtatagatgcttgttcgaaaaggatgatgtgtatcaggaggcgagcctggatctcaaggtcgtctccctaggatcaagccctttgattaccgtcgagggacaggaggacggggagatgcagccgatgtgctcttctgacggatggtttccccagccccacgtgccatggagggacatggaaggcaagacaattccctcatcttcccaggcgctgacgcaaggatcgcatggcctgttccatgtgcagacactgttaagagttaccaacatttctgcagtggatgtcacttgctcgatttctatcccattcttgggcgaggaaaagatcgcaacattctcccttagcggctggtag

SEQ ID NO: 216374 - DNA, 816 bp, synthetic construct
  misc_feature 1..816: note = Description of Artificial Sequence: Synthetic coding sequence
  source 1..816: mol_type = other DNA
atggttgactttccaggctataacttgtcaggggcagttgctagctttctgttcatactgttaacgatgaaacagtcggaagacttccgagttatcggccctgcccatcctattttggcaggggtcggcgaggatgcattgcttacgtgccagttactacccaagcgcacaactatgcatgtggaagtgcgttggtatagaagcgaaccatctacaccagtcttcgtccacagggatggcgtggaggttaccgaaatgcagatggaggagtacagggggtgggtggagtggatcgaaaacggtatcgccaaaggcaacgtggcactcaaaatccataacatccaaccctctgacaacgggcaatattggtgtcatttccaggatggcaattattgcggagagacatcattgttgttgaaagtggcagccgtcctgcgggacgatataattgctagtcttaaagtcaacggcccttctcagccgattctcgtaagagtaggagaggacattcagctgacatgttacctttcccctaaagccaatgcacagagtatggaggtgcgctgggataggagccatcgttatcctgccgtgcatgtgtacatggacggggatcacgtggccggtgaacagatggctgagtataggggcaggaccgtgttggtgagcgacgcaattgatgaagggcgattgacattacagattctgtccgctagaccttccgatgacgggcaatatcggtgcctcttcgagaaggatgacgtttaccaggaagcgagcttagatcttaaagtcgtgtgggtcttaccccactag

SEQ ID NO: 216375 - DNA, 738 bp, synthetic construct
  misc_feature 1..738: note = Description of Artificial Sequence: Synthetic coding sequence
  source 1..738: mol_type = other DNA
atggtggattttccagggtacaatctgtctggggctgttgcttcatttttgtttatccttctcaccatgaaacaaagcgaccggctggatacaccaaaggcctccttgaaagtgaatgggccatctcagcccattcttgtgcgcgtaggggaagatattcagctgacgtgttatctaagtccaaaagcaaatgcccagtccatggaggtacgctgggaccgctcacacaggtaccccgcagtgcatgtgtatatggatggcgatcacgttgcaggggagcagatggccgagtatcgcggaaggacagtgttggttagcgatgccatcgatgaggggagattgactctgcagatcttgtcagctcgaccctcagacgatggacagtaccgttgtctttttgagaaagacgacgtgtatcaagaggctagtctggaccttaaagttgtggggttaggttcctccccactgataactgtggaaggacaggaagacggagagatgcagccaatgtgtagctccgatgggtggttcccccaacctcacgtcccatggagggacatggaaggcaaaacgatccccagtagttcccaggccttgacccagggtagccatggactgtttcatgtgcaaacactcttgcgggtcacaaatatctcagccgtagacgtgacctgttctatatctattcctttccttggggaggagaagatcgccacattttcactgtcagggtggtag

SEQ ID NO: 216376 - DNA, 738 bp, synthetic construct
  misc_feature 1..738: note = Description of Artificial Sequence: Synthetic coding sequence
  source 1..738: mol_type = other DNA
atggttgacttccccggatacaacctgtctggcgctgtggctagcttcctgtttatcctcctgaccatgaaacagtcagacaggttagataccccaaaagcgtccctgaaagttaatggtccttctcagccaattttagtccgagtaggggaggatatacaactaacgtgttatctgtctccaaaggctaatgcgcagagcatggaggtgcgctgggatcgtagccaccggtacccagctgttcacgtctacatggatggcgaccacgtggccggagagcagatggccgaatatcggggtaggacggtgcttgtgagcgacgcaattgacgaggggaggctgacgttgcaaatactgtctgccaggccctccgacgacgggcagtaccggtgtctgttcgaaaaggatgacgtataccaggaggcaagcctggatcttaaagttgtgagtttggggtcatccccactcattaccgtcgagggccaggaagatggagagatgcagcctatgtgttctagcgacggatggttcccccaacctcatgtgccatggagggacatggaaggaaagacaattcctagctcttcccaggccctgacccagggctcccacggtctgtttcatgtccaaacgctgctgagggtgactaacatatctgcagtggatgttacttgtagcatctctatccccttcctaggcgaggaaaagatcgccacgttcagcctgtcaggatggtag

SEQ ID NO: 216377 - DNA, 1368 bp, synthetic construct
  misc_feature 1..1368: note = Description of Artificial Sequence: Synthetic coding sequence
  source 1..1368: mol_type = other DNA
atggtcgattttcctggatacaatctgtccggagcggtagcatcattcttattcattttgctcactatgaagcaatcagaagattttcgggttatcggacccgcacacccaatactggcaggcgttggagaggatgccttgctcacctgccagctgctgccaaagagaactacaatgcatgtagaagtccggtggtaccgatcagaaccctcaacccccgtttttgtgcatagggacggggtggaggtcaccgagatgcagatggaagaatacagagggtgggtggagtggatcgagaatgggattgccaaaggcaatgtagccttgaaaatccataacatccagccttccgataacggtcagtactggtgtcactttcaagacgggaactactgcggggaaacatcgctactgctgaaagtggcagggctaggcagcgccccatccattcatatggaggggcctggcgaatcaggtgtccagcttgtctgcacagcgcgtggctggttccccgaacctcaagtttattgggaggacatccggggagagaagttgcttgctgtcagtgagcaccggatccaggataaggacggattgttctatgcggaagcgaccttggttgtcaggaacgcctccgctgagagtgtcagctgccttgttcacaatcctgtgctcacagaagaaaagggtagcgttataagtctgcccgagaagctgcaaactgagctcgcatctttgaaggtcaatgggccttcacagccaatcctcgtgcgtgttggcgaggacatccaactgacttgttacctttcccctaaggctaatgctcagagcatggaggtccgctgggatagaagtcaccgctatccagccgtccacgtttatatggacggggaccacgtggctggcgaacaaatggctgagtaccgcggacggactgtgctggtgagcgatgccattgatgaaggaagactcaccctccagatactgtcagccaggccaagcgacgacggccaataccggtgcctgtttgagaaggacgatgtgtaccaggaagccagtctcgacctaaaggtggtgtccctggggagttcacctctgattactgtggaagggcaggaggacggtgaaatgcagccaatgtgctcaagtgacggctggttcccacaaccccacgttccgtggcgtgacatggaaggcaaaactattccaagctcatcgcaggccctcacgcagggcagccacgggctgttccacgttcagacacttctaagggtcaccaacattagcgccgtagacgtgacatgcagcatctctataccattcctgggagaggagaagatcgccaccttttcgttgtccggttggtag

SEQ ID NO: 216378 - DNA, 1368 bp, synthetic construct
  misc_feature 1..1368: note = Description of Artificial Sequence: Synthetic coding sequence
  source 1..1368: mol_type = other DNA
atggtggacttccccggttacaatctgtctggagcagtcgctagtttcttgttcattcttctcaccatgaagcagtccgaagactttcgcgtgattggaccggcacacccaattctggctggcgtgggtgaggatgcgctgctgacctgccaactgctccctaaacgtactaccatgcatgtggaagtccgctggtatcgctctgagcctagcactcctgttttcgtgcatcgtgatggagtggaggtgacggagatgcagatggaggagtacaggggctgggtggaatggatcgagaatggtattgcaaaggggaatgtggccctaaagatccataacatccagcccagcgataatggtcagtactggtgtcattttcaagacggcaactactgtggggagacttccttgttgctgaaagtagctggtctaggatctgctccctctatccacatggaggggcctggagagtcaggcgtgcagctggtgtgcactgcacgtggatggttccccgagccacaggtctactgggaagacattaggggagaaaagctgctcgcagtgtctgaacatcggatacaagataaggatggcttgttttatgccgaggccacgttagtggtgagaaacgcctctgccgagtcggtgtcatgtctggtacacaacccggtcttaacagaggaaaagggtagcgtgatctcacttcccgagaaactccagacggaactcgcatctctgaaagtgaacgggcctagccagcccatcttagtgcgagttggagaagacattcagcttacgtgctatctgtcacctaaggctaatgcgcagtcgatggaagtaagatgggatcgtagccaccgctaccccgctgtgcatgtgtatatggacggggatcatgtggccggtgagcaaatggccgagtacaggggcagaacagtcctggtatctgacgccattgacgaaggcagacttacccttcagatcctatcggcacgcccaagcgatgatggacagtacaggtgtttgtttgagaaggatgacgtttaccaggaagccagtctcgacctgaaggttgtctcactgggctccagccctctgatcacggtcgagggccaggaggatggagagatgcagcctatgtgcagttccgacgggtggttcccccagccacatgtgccatggcgagacatggagggtaagactattcccagtagcagccaggccttaactcaggggagtcacggactgtttcacgttcagacgctcttgcgggttactaacatctctgccgtggatgtgacttgttcaatctctattcctttcttgggggaagagaaaatagccacgttcagcctctccggctggtag

SEQ ID NO: 216379 - DNA, 537 bp, synthetic construct
  misc_feature 1..537: note = Description of Artificial Sequence: Synthetic coding sequence
  source 1..537: mol_type = other DNA
atggaagtccgctgggaccggagccaccggtaccccgcagtgcacgtgtatatggacggcgatcacgtcgctggcgaacagatggccgagtacaggggcagaaccgtgctggtgagcgacgcaattgatgagggcaggctcactctgcaaatacttagcgccagaccaagtgatgatgggcaatatcggtgcctttttgaaaaagatgacgtttaccaggaggcttcactagacctgaaggttgtctcccttggatcatcacctctgattaccgttgaaggacaagaggacggagagatgcaacctatgtgctcatctgacgggtggtttccgcagcctcatgtaccttggcgagacatggagggtaaaacgatacctagttcctcccaggctctgacccagggtagtcatggcctttttcacgtgcagaccctcctgcgggtcaccaacatctccgctgtggacgtgacctgtagcatctccattccattcctaggtgaagaaaagattgctacgttcagtctgtcaggatggtag

SEQ ID NO: 216380 - DNA, 1368 bp, synthetic construct
  misc_feature 1..1368: note = Description of Artificial Sequence: Synthetic coding sequence
  source 1..1368: mol_type = other DNA
atggtcgatttccctggatataaccttagcggggctgtggcatcgttccttttcatcctgcttacaatgaaacagtctgaggacttcagagtaattggtccagcacatcccattctcgccggagttggcgaagatgccctgctgacatgccaacttttgcctaaacggaccaccatgcacgtggaagtcagatggtatcgctcagaaccatccacccctgtctttgtacatcgggatggggtagaggtgacagagatgcagatggaggagtaccgtggatgggtggaatggatcgagaacggcattgcaaagggaaatgtcgccttaaaaatccacaacatccaaccttccgataatgggcagtactggtgccactttcaggacggtaattattgtggggagacctcccttctactgaaggtggcgggtttgggctcggctcctagtatacacatggagggaccaggggaatccggcgtgcagcttgtatgcaccgctcgaggatggttccctgaaccacaagtatactgggaggacatccgaggcgagaaactcctggctgtgtctgaacaccgcattcaggacaaggacggactcttttacgctgaagctacccttgtagtgcgaaatgcctcagcggaatcggtgtcatgcctggtgcataatccagttctgaccgaggagaagggcagtgtaatcagcttgcctgagaaacttcagactgaactcgcctcactaaaggttaacggcccatcccaaccaattttggtgagggttggggaggacattcagttaacgtgctatctttcacccaaagccaatgcgcagtctatggaagtcagatgggacaggtcgcatcggtaccccgcagtccacgtttacatggacggcgatcacgtcgccggtgaacaaatggccgagtatcgtggacgtacagtgctcgtcagcgacgctattgatgaaggacggctgacgttacaaattctgtccgcacggccttctgacgacggacagtatcggtgtttgttcgagaaggatgacgtctaccaggaggcgagccttgacttgaaggtggtttctttgggatcgagtccgctgataacagtcgagggccaggaagacggcgaaatgcagccaatgtgcagcagcgacggctggttccctcaaccccatgtcccatggagggacatggaggggaaaaccatccctagttccagccaggcgttgactcagggtagtcacgggctgtttcatgttcagaccctgttacgcgtaacgaacataagtgctgttgatgtgacctgttcaatcagcataccctttttgggtgaggaaaagatcgctacattcagtttgtccgggtggtag

SEQ ID NO: 216381 - DNA, 816 bp, synthetic construct
  misc_feature 1..816: note = Description of Artificial Sequence: Synthetic coding sequence
  source 1..816: mol_type = other DNA
atggtcgactttcccggttacaacctgtccggcgctgttgcctcatttttgttcatactgctcaccatgaagcagtctgaagactttcgcgtaatcggccctgcccaccctatactagcaggcgtaggagaagatgccctgttaacgtgtcaattactccccaaaaggaccacaatgcatgtagaagtgagatggtatcgcagtgagccatccaccccagtcttcgtacacagggatggagtggaagtcacggaaatgcagatggaagagtacaggggctgggtagagtggattgagaacggaatcgccaagggcaatgtggcactaaagatccacaatatacagccttcggacaacggccagtattggtgtcactttcaggacggcaattattgcggcgaaacttctcttctgctgaaggtggccgctgtcctgcgtgacgatattattgcttccctgaaggtgaacggcccatcccagcctattcttgtgcgggtaggcgaagacattcagctaacctgctatcttagcccaaaggccaatgcccagtctatggaagtcagatgggatcgctcgcacaggtacccggctgtgcatgtgtatatggatggcgaccacgttgcgggagagcaaatggccgagtatcgaggaagaacagtgctagtgagcgacgccatcgacgaggggcgactgaccctgcagatcctgtcagcgagacccagcgatgatggacagtataggtgcttgtttgagaaggatgatgtgtaccaggaagcttcactggacttaaaagtggtctgggtcctcccccactag

SEQ ID NO: 216382 - DNA, 1368 bp, synthetic construct
  misc_feature 1..1368: note = Description of Artificial Sequence: Synthetic coding sequence
  source 1..1368: mol_type = other DNA
atggtcgactttcccggatacaacctgtccggggcagtagcgtcctttctgttcatacttctgactatgaagcaatcagaagacttcagggtgataggcccagcgcacccgatcctcgcaggcgtgggcgaagacgctctcttgacctgtcagctgctacccaagcggacaaccatgcacgtggaagtccggtggtatcgctcggagccttcaaccccggtgttcgtgcaccgtgatggagtggaggtgacagagatgcagatggaggaataccggggatgggtggagtggatcgaaaatggaatagccaaagggaacgtcgccttaaagatacataatattcagccgtctgacaatgggcagtactggtgtcactttcaggatggtaactactgtggcgagaccagcttgctgttgaaggtggctggcttagggtccgctccctctatacacatggagggaccaggagagagtggagtccagttggtatgtaccgctagaggatggtttcctgaacctcaggtttattgggaggacatccgaggggagaagctccttgctgtgtccgagcatcgaatccaggatgaggacggcttattttacgccgaggccacactggttgtccgcaacgcctctgccgaatctgtttcatgcctggtgcacaaccctgtcctcacagaagaaaaaggttccgtcatctccttacctgagaaactgcagacagaactggcgtcactaaaagtaaacggtccgtcacagcctatcctggtgcgtgtgggcgaagacattcagctcacttgctatctctcccctaaagccaatgcccagtcaatggaggtacgctgggatcgaagccatagatatccagctgttcacgtgtatatggacggagaccatgttgccggagagcagatggcagaatatcggggtaggactgtgcttgtctcagatgccattgacgaaggtaggttgacactccagattttgagcgctcggccatccgatgacggccagtaccgctgtctctttgagaaagatgatgtgtatcaggaagccagcttagaccttaaggtagtgggccttggatctagcccacttatcacggtcgaagggcaggaagatggggagatgcaaccaatgtgcagcagcgatggatggtttccacagccccatgttccctggagagacatggagggcaagacaatcccatcaagctcccaggccctgacacagggctctcatggcctctttcatgttcaaactctattacgcgtgacaaacatcagtgcagtggacgtgacatgtagtatttcgattccatttcttggcgaagagaaaattgctacctttagcctcagcgggtggtag

SEQ ID NO: 216383 - DNA, 1368 bp, synthetic construct
  misc_feature 1..1368: note = Description of Artificial Sequence: Synthetic coding sequence
  source 1..1368: mol_type = other DNA
atggtagactttcctgggtacaatctctctggggcagtcgccagttttcttttcatactactgaccatgaaacaatctgaagatttcagggtgatcggcccagcccaccctattctggcaggtgttggagaggacgccctgctgacctgccagctgctgcccaaacgtaccactatgcacgtagaagtgcgctggtatcgatctgaacctagtacaccagtgtttgtacaccgtgatggggtggaggttaccgaaatgcagatggaggagtatcggggatgggtggaatggattgagaatgggattgccaaagggaacgtggctctgaagatccataacattcagccgtctgacaacggacagtactggtgccacttccaggacggcaactattgcggagaaacaagcctcttgctaaaggtggctggcttaggttctgcacccagtatccacatggaaggcccaggggaatcaggtgtccaattagtatgcaccgctcggggatggtttcccgaacctcaagtctattgggaggacatccgcggtgagaaactgctggcagtgtccgaacaccggatccaggacgaggatggactattctacgcagaagcaacattagtcgttcgtaatgcttctgccgagtctgtgtcatgcctggtccataatccagtgctgaccgaagagaaaggctccgttataagtttgcccgagaagctccagactgaacttgccagccttaaggtgaatggcccttcacagcctatcctggtcagggttggtgaggacatccagctcacttgttatctcagccccaaggctaacgcccagtccatggaggtccgctgggacaggagtcatcgctaccctgcagtgcacgtgtacatggacggcgaccacgtggccggtgaacaaatggccgaatacagaggcaggaccgttctggtgtctgacgctatcgacgagggccgactgaccttacagatcctgtctgctcgaccttccgatgatgggcagtatcgttgtctctttgagaaggacgatgtatatcaagaggccagtcttgacctaaaagtggtcgggctgggctcttcccccttgataaccgtcgagggtcaagaggatggggaaatgcaacccatgtgctcttctgatggctggttccctcagccgcacgtgccatggagggacatggagggcaaaaccatcccatcttcctcacaggcccttacccaaggctctcacggactattccacgtccagaccctgctgcgcgtgacaaacatcagcgctgtggatgttacctgtagcatctccatacccttcttgggtgaagaaaagatagccaccttcagtttgagcggctggtag

SEQ ID NO: 216384 - DNA, 816 bp, synthetic construct
  misc_feature 1..816: note = Description of Artificial Sequence: Synthetic coding sequence
  source 1..816: mol_type = other DNA
atggtggattttcctggctataatctgtctggcgcagtggcatcttttctctttatcttgctaactatgaaacagtccgaggacttcagggtgatcggcccagctcatcctattttagcaggtgtaggggaggacgctcttctgacctgtcagctgctgcctaaaagaaccactatgcatgtcgaagttaggtggtatcgatctgaaccatccactccagtgttcgtccaccgagatggggtagaggttactgaaatgcagatggaagaatacagaggatgggttgaatggattgagaatggtatagccaagggaaacgtcgccctcaagatccacaatatccagcccagcgacaatgggcagtactggtgtcatttccaggacggcaactattgcggggagaccagcttactcctgaaggtggcagccgtcctacgcgacgatatcatcgctagcctcaaagtgaacggaccttctcagccaatcctggtcagggttggtgaggatattcagctgacctgctatctcagtcccaaagctaacgcccagagcatggaagtgcgttgggataggtcccaccgataccctgcagtacacgtatatatggatggcgatcacgtagccggtgaacagatggcagaatacagaggccgtacagtgctcgtgtctgatgcaattgatgaaggtagattgaccctgcagattctctctgcccgacctagcgacgacggccaatacagatgtctgtttgagaaagacgacgtatatcaagaggcaagcctggatctgaaagtggtctgggtgctgccacactag

SEQ ID NO: 216385 - DNA, 537 bp, synthetic construct
  misc_feature 1..537: note = Description of Artificial Sequence: Synthetic coding sequence
  source 1..537: mol_type = other DNA
atggaggtgcggtgggatcggtctcacaggtaccccgctgtgcacgtgtatatggacggtgaccatgtggctggcgagcagatggctgagtatcgcggtagaactgtgctggtttcagacgccattgacgagggcagactcacactgcagatcctgtccgccaggcctagcgatgacggtcaatatcggtgcctctttgagaaggatgacgtgtatcaagaggcgtccctggacttgaaggtggtaggactgggaagttcccctctgatcacggtagagggccaagaagatggcgaaatgcagccaatgtgttcctcggacggctggttccctcagccccacgtgccctggcgggacatggagggtaagacaatcccatccagcagtcaagcactgactcaggggagccacggcttattccatgttcagacactgctgagggtcacaaacatttcagcggtcgacgtgacatgcagcatctccatcccctttctcggagaggaaaaaatcgccacattcagtctgtctggatggtag

SEQ ID NO: 216386 - DNA, 738 bp, synthetic construct
  misc_feature 1..738: note = Description of Artificial Sequence: Synthetic coding sequence
  source 1..738: mol_type = other DNA
atggtcgacttccccggttataacttgtccggggctgtggcaagctttctatttatcctgctcaccatgaagcaatctgaaaagctgcagacagagctcgctagccttaaggtgaatggcccaagtcagccaatcctggtgagagtgggtgaggacattcagctgacctgttacctgagccctaaagcgaacgctcagagcatggaagtgaggtgggatcgaagtcacagataccctgctgtccatgtttatatggatggcgatcacgtagctggcgagcagatggctgaataccgagggagaacagtccttgtgagcgatgccatcgacgaaggcagactcactctccagattcttagtgcgaggccctctgacgacggacaataccgttgcctctttgaaaaggacgatgtgtaccaagaggcttcactcgacctcaaagtggtcggactcggctcttcccccctaatcactgtggaaggccaggaggacggagagatgcagcccatgtgtagctccgatgggtggtttccccagccacatgtgccgtggcgcgacatggaggggaagaccataccctctagcagccaggctctgactcagggttcacatggactgtttcatgtgcagactcttctgagggtgaccaacatatcagccgtggatgtcacctgttccatttctataccattccttggcgaggaaaaaattgccaccttctctctgtctgggtggtag

SEQ ID NO: 216387 - DNA, 738 bp, synthetic construct
  misc_feature 1..738: note = Description of Artificial Sequence: Synthetic coding sequence
  source 1..738: mol_type = other DNA
atggttgatttccctggatacaacctgagtggagccgttgcaagtttcctgttcatcttactgactatgaaacaatccgagaaactgcagacagaactcgcttctctgaaagttaacgggcctagccagcctatcctggtgagagtcggtgaggacattcagcttacctgctatctgtcccccaaagcaaacgcacagtccatggaagtgcgttgggaccggtcccacaggtacccagccgtccacgtgtacatggacggtgaccatgtagcgggagaacagatggcagagtatcgcggtaggaccgtactggtatcagacgccatcgatgagggccgtcttacactgcagatcctgtcagcaagaccttctgatgatggtcagtaccgctgcctgttcgaaaaagatgacgtgtaccaggaggcctctcttgacctcaaagtggtctctctggggtcttccccgctaataactgtggaggggcaggaggacggcgagatgcagcccatgtgctcttcggatggctggtttccgcaaccacacgttccgtggcgtgatatggagggtaagactattccaagcagtagtcaggctctcacacaaggttctcacggattgtttcatgtgcagacactgcttagggtgacgaacattagcgcagttgacgtcacgtgcagtatctcgattccgttcctgggtgaggagaaaatcgcaactttctcacttagcgggtggtag

SEQ ID NO: 216388 - DNA, 1167 bp, synthetic construct
  misc_feature 1..1167: note = Description of Artificial Sequence: Synthetic coding sequence
  source 1..1167: mol_type = other DNA
atggtggacttcccgggttataacttatctggggctgtggcatcattcttattcattttacttaccatgaagcagagcgaagactttagagtcatcggacccgcacaccctattctggctggcgtgggcgaggacgccttgctcacgtgccagcttttgcccaagcgaacgaccatgcatgtcgaggttaggtggtaccgctctgaaccgagtacaccggtgttcgtgcatagagatggagtcgaggtaaccgaaatgcaaatggaagagtaccgtgggtgggtagagtggatcgaaaacggcattgccaagggaaacgtggcccttaaaatacacaacatccagcccagtgataacggtcaatattggtgtcacttccaggacggcaactactgtggtgaaacctctcttctcctgaaagtcgctgaaaaattgttggcagtactgagttcactcaaagtgaacgggccaagtcagcctattctggtgcgagtgggtgaggacatccagctaacatgctatctgtcgccaaaggccaatgcccaatcgatggaggtgcgatgggaccggtcacaccgataccctgccgtgcatgtgtacatggacggcgaccatgtggctggcgagcagatggctgagtacagggggcgtactgtgttggtcagtgatgcaatcgatgagggccgactcacattgcaaatactgtctgcccgaccttccgacgacggccagtataggtgtctgttcgaaaaagatgatgtttaccaggaggcgtccctggatttgaaggttgtgagtttaggcagtagcccgctcatcacagtggaaggacaagaggacggcgaaatgcagcctatgtgctcaagcgacgggtggttcccacagcctcacgtaccatggcgcgacatggagggaaagactatccccagctcctcacaagcactgacacaaggcagccatggactgtttcatgtccagaccctcttacgtgtgactaacatctctgccgtcgatgtaacttgttcgatatctataccctttcttggagaggagaagatcgccaccttttcccttagcgaaagtaggatgactttcctgtggaaaactctacttgtgtggggacttcttctggccgtagctgtaggccttcccaggaaacgaagttag

SEQ ID NO: 216389 - DNA, 1368 bp, synthetic construct
  misc_feature 1..1368: note = Description of Artificial Sequence: Synthetic coding sequence
  source 1..1368: mol_type = other DNA
atggtggactttcccggatataatttgtccggagccgtagcctcctttctgtttatactacttactatgaagcaatcggaggatttccgcgtaattggcccagcccaccccattcttgccggtgtgggtgaggatgccctgctgacatgtcaacttcttcccaaaaggacaaccatgcacgtggaggttagatggtatcgcagcgagccttcgaccccagtcttcgtacaccgtgatggtgtagaggtcacggaaatgcagatggaggagtatagaggctgggtggaatggatcgagaacgggattgccaaagggaatgtggcgctgaagatccacaacatccagccgtccgataacgggcaatactggtgtcatttccaggacggcaactattgtggggaaacttcgctccttctgaaggtggccggtttgggcagcgcccctagtatccacatggagggacccggagaaagcggcgttcagctggtatgcaccgctcgcggatggttcccggagccacaggtgtattgggaggatatcaggggcgagaaactgctcgccgttagcgagcatcgcattcaggacaaagacggcctgttctacgcagaggccactcttgtggtgcgcaatgcttctgccgaatcggtatcctgtttggttcataatcctgttctgacagaagagaagggtagcgtcattagtctgccagagaagttacaaaccgagctcgctagtttaaaagttaacggccctagtcaaccaatcctggtacgtgtcggcgaggatatacaactgacctgctatctgagccccaaagctaatgcacaatccatggaggtgcgctgggataggtcacacaggtatccagccgtgcacgtgtatatggatggcgatcatgttgccggagaacagatggccgagtatcgaggcagaacggtgctcgtatcagacgccattgacgaaggtcgactcactttgcagattctaagcgcgcgtcctagcgatgatggacagtaccgctgcttgtttgagaaggatgacgtttaccaggaggcttccctggatctgaaggtcgtgtcactcggttcatcacccctaataacagtggagggacaggaagacggcgagatgcagccaatgtgtagctccgatggatggttcccccagccccatgtgccatggcgcgacatggagggcaagacaatcccctcttctagtcaggcactgacccagggcagccatggactgttccatgtacagacgttgctgcgagtcactaacattagcgccgtcgacgtgacatgcagcatctccatccctttcctaggtgaagaaaaaattgcgactttcagcctgtctggatggtag

SEQ ID NO: 216390 - DNA, 1167 bp, synthetic construct
  misc_feature 1..1167: note = Description of Artificial Sequence: Synthetic coding sequence
  source 1..1167: mol_type = other DNA
atggtggacttccctggctataatctgagtggtgccgtcgcatcgttcctgtttatactcctgaccatgaagcagagcgaagacttccgcgtcatagggcctgcccatccaatccttgccggagtgggagaggatgccttgttgacatgccagctgctgccaaagaggacaactatgcatgtggaagtccggtggtaccgctccgagcccagtacgcccgtattcgtacaccgcgacggcgtggaggtgactgagatgcagatggaagagtaccggggatgggtagagtggatagagaatggaatcgctaaggggaacgtcgcgctgaagatccacaatatccagccatccgataacggccagtattggtgccactttcaagacggcaactactgtggagagacatcgctgctcctcaaggttgcagaaaaactgctagcggtactgtctagcttgaaagttaatgggccttcacaacctattttggttagggtaggggaggatatccaactgacctgctacctaagtcctaaagccaacgctcagagcatggaagtgcgctgggatagatctcaccggtacccagctgtacatgtgtacatggatggggaccacgtcgccggagagcaaatggccgagtacagaggtcggaccgttttggtgtctgatgccatagacgaagggagactgacgctgcaaatcctcagcgctcgcccatctgacgacgggcagtatcgatgtttgtttgagaaggacgacgtgtatcaggaagcatccctggacttaaaggtagtgggtctgggttcctcccctttaatcacggtggaaggccaggaggatggagagatgcagccaatgtgctcctcagatggttggttccctcaacctcatgtgccatggcgcgatatggagggaaagaccatcccctcctcctctcaggctctgacccaggggagccacggcctgtttcatgttcagaccctcttacgagtgaccaatatatctgcagtcgacgtgacatgttccatctcgatcccgttcctgggagaggagaagatcgctacattctccctaagtgagagccgcatgacattcctgtggaagacactcttagtgtggggcttgctcctggccgtggcagtgggactgccacggaagcgcagctag

SEQ ID NO: 216391 - DNA, 738 bp, synthetic construct
  misc_feature 1..738: note = Description of Artificial Sequence: Synthetic coding sequence
  source 1..738: mol_type = other DNA
atggtggatttccccggatacaacctcagtggagcggttgcgtcatttcttttcattctgctcactatgaaacaaagtgatcgcctggacacacccaaggcttccttaaaggttaatggcccatcacagcctattctcgtgcgtgttggtgaggacatccagctcacgtgctacctgagcccaaaggccaatgcccagtcgatggaggtaaggtgggacaggagccacagatatccggctgtccatgtgtatatggatggggaccatgtcgcaggggaacagatggcagagtaccgcggacgcaccgtgttagtctcagatgccattgatgagggtagattaactctgcagatcctgagcgcccgaccctcagatgacggacagtaccggtgcctttttgagaaagatgacgtctatcaagaggccagccttgaccttaaggtcgtcggcctcggaagcagcccccttatcacggtggaggggcaagaggatggcgagatgcaacctatgtgcagctctgacgggtggtttccccagcctcatgtcccatggagagacatggaaggaaagacaatcccaagttccagccaggcccttacacagggatcgcacggtttgtttcacgtgcaaactttgctgcgtgtcacaaatataagtgccgtcgatgtcacatgctccatctcaatacctttcctgggagaggagaaaattgctacattctcattgagcggctggtag

SEQ ID NO: 216392 - DNA, 816 bp, synthetic construct
  misc_feature 1..816: note = Description of Artificial Sequence: Synthetic coding sequence
  source 1..816: mol_type = other DNA
atggtggatttccctggctacaatcttagtggtgctgtcgctagctttctgtttatccttttaacgatgaagcagtctgaggacttccgcgtaattggtccagcacatcctatcctcgcaggtgttggcgaagatgccctcttgacctgtcagttactgccaaaacgaactacaatgcacgtggaggtccggtggtaccgtagtgagccctcgactcctgtgttcgtgcatcgagacggcgttgaagttactgaaatgcagatggaggagtatcgcggatgggtggaatggatcgagaatggaatagcaaagggcaacgtcgcactgaagatccacaacattcagcccagtgataacggtcaatattggtgccacttccaggacggaaattattgcggagagacatccctcctgttgaaagtggccgcagtcctgagagacgacattattgcctcccttaaggtgaatgggccaagtcagcctatcttggtgagagtcggcgaggacattcaattaacttgctatctcagcccaaaggcaaatgcgcagagcatggaggtgcgctgggatcggagccacaggtaccctgcagtgcacgtctacatggatggggatcatgtggctggcgaacagatggccgaataccgcggacgcaccgtcctggtaagcgacgcgatagacgaggggaggcttaccctgcagattttgtcagctcggccaagcgatgacgggcagtacaggtgcttatttgagaaagatgacgtttatcaggaagcctctctggatctcaaagttgtgtgggtccttcctcattag

SEQ ID NO: 216393 - DNA, 1167 bp, synthetic construct
  misc_feature 1..1167: note = Description of Artificial Sequence: Synthetic coding sequence
  source 1..1167: mol_type = other DNA
atggtcgactttccagggtacaacctgagtggtgccgtggccagcttcctctttatactgctgactatgaagcagtccgaagatttcagagtgattggccctgcccaccccattctggccggagtaggagaagacgcactcttaacatgtcagctgctccctaaaagaaccactatgcacgttgaggtacgttggtacagatctgagccctctacacccgttttcgtccaccgtgacggtgtagaagtaacagagatgcagatggaagagtatcgcggttgggtcgagtggatcgagaacggaattgccaaaggaaacgtggcactgaagatacacaacatccaaccttctgacaacggtcagtattggtgtcatttccaggacggaaactactgcggcgagacatctttgctgctcaaggtcgccgaaaaattattggccgttctgtcctcactcaaggtgaacggccctagtcaacccatactcgtacgagttggcgaggatatccagctcacttgctatctgagtcccaaggccaatgcccagagcatggaggttcgttgggataggagccacaggtatcctgccgtgcacgtttatatggacggcgaccacgtcgccggtgagcaaatggccgagtaccggggtcgcacggtcttagtgtcagacgcaatcgacgaggggagactgacattgcagatcctgtccgcaagaccctctgacgacggacagtatagatgtctgtttgagaaagatgacgtgtatcaggaggcgagtcttgatctcaaagtcgtcggcctcgggtccagccctttgatcaccgttgaaggccaggaggatggcgagatgcagccaatgtgcagttcggacggctggtttccgcagcctcatgtgccatggcgggatatggagggcaagactatccctagcagttctcaggccctgacgcagggaagccacgggttatttcacgtgcagacgctgctccgtgtgactaatatctctgctgttgacgtcacttgttctatctctatcccgtttcttggcgaggaaaagatcgccaccttctccctgagcgagtcaaggatgacatttctatggaagaccctgttggtctggggcctgctcctggccgtggccgtgggcctgcctaggaagagaagttag

SEQ ID NO: 216394 - DNA, 1401 bp, synthetic construct
  misc_feature 1..1401: note = Description of Artificial Sequence: Synthetic coding sequence
  source 1..1401: mol_type = other DNA
atggctttcgtactcatcctcgtgctgagtttctatgaattggtctccggacagtggcaagtgaccgggcctggcaaattcgtccaggctctcgtgggtgaggacgctgtgttttcatgttcactgttccccgaaacctccgctgaagcaatggaagtgcgattcttccggaaccagttccacgccgtcgttcatctgtaccgcgacggtgaggactgggaaagcaagcagatgccgcagtacaggggccgaacagagttcgtgaaggattcaattgcaggcggtcgtgtcagcctgaggttaaagaatattaccccttccgatatcgggctctatggatgctggttttccagccaaatttatgacgaggaggccacctgggaactccgcgtggctgccctggggtccctcccgttgatttccatcgtaggctacgtcgacggtgggatacagctcctgtgccttagctccggctggttccctcagccgacggccaaatggaaagggccacaggggcaggatctcagcagtgatagcagagccaacgcagatggctattctctctatgatgtagaaataagcatcattgtgcaggaaaacgctggctctatcctgtgcagcattcacctggccgagcaatcacatgaagtggagagcaaagtacttattggagagacatttttccaacccagcccatggaggttagcctccattttgctggggttgctctgcggggcactgtgtggtgttgtgatgggtatgataattgtcttcttcaagagcaaaggaaagatacaagcagagctcgattggaggcggaagcatgggcaggccgagttgcgtgacgcgagaaaacatgcagtggaggttacacttgaccctgagaccgcccatcccaagctctgcgtgtccgaccttaaaacggttacacacaggaaagcccctcaggaagtcccgcacagtgaaaaacggtttacccggaaatcggtggtggcgagccaggggtttcaagctggaaagcattactgggaggtggatgttggccagaatgtcgggtggtatgtaggtgtctgtcgcgacgacgttgacagaggaaaaaacaatgtgactctgagtcctaacaatggttactgggtgctgcgcctgaccactgagcatttatacttcacctttaatccacattttatttccctgcccccatctacaccccctacacgggtgggcgtgtttttggactacgaaggtggtacgatctccttttttaacacaaatgaccaatctttgatctataccctcttaacctgccagtttgaggggctgctgagaccatatattcaacatgccatgtacgacgaagagaaaggcacgcctatttttatttgtcctgtaagttggggctag

SEQ ID NO: 216395 - DNA, 1299 bp, synthetic construct
  misc_feature 1..1299: note = Description of Artificial Sequence: Synthetic coding sequence
  source 1..1299: mol_type = other DNA
atggccttcgtgttaatcttagtgctctcattctatgaattagtctccggccagtggcaggtcacaggcccaggcaagtttgtacaggcccttgtaggggaagatgccgtgtttagctgcagcctgtttccagaaacctctgcagaggcaatggaggtgcggtttttccgcaatcaattccatgctgtggttcacttgtatcgagacggcgaggattgggagagtaaacagatgccacaatataggggacgaacagagttcgtgaaggattccattgccggaggcagagtttcactcaggctgaagaacattacaccatctgacatcggactctatggttgctggttctcctcccagatatacgatgaggaggccacatgggaattgcgcgtggccgctttgggttccctgcctttaatctctattgtgggttacgttgacggcggaattcaactgttgtgcttgtcctccgttcagccatctccctggcgccttgcttcaatcttgctgggattgctatgcggcgctctatgtggagttgtgatgggcatgatcatcgtgttttttaaatctaagggaaaaatccaggccgaactggggatgtgccacgtcctaagcctgccccatatggtcttaccaggcccttccctgattcattcgctgtccctttggacaactctggccgctggatggaccgggtctactgactggaggaggaagcatggtcaggctgaactgagagatgccagaaagcacgccgtggaagtgacacttgatccggagacagctcaccctaaactgtgtgtctccgatctcaaaacagtaacccacaggaaggcccctcaagaggttccacactcagagaaaagatttaccagaaagagtgttgtggcatcacagggttttcaggcaggaaaacattactgggaagttgacgtaggccagaacgtaggctggtacgtcggcgtttgccgggatgatgtggatcgcggaaagaacaacgtcacgcttagtcctaacaacgggtattgggtgttgcgactcactaccgagcacttgtactttacgtttaatcctcacttcattagcctgccaccttctacccccccaacccgggttggagtctttctggactatgagggagggaccatatctttctttaacactaacgatcagtccctgatctatacgctcctgacatgccagtttgagggcctgctgagaccatacatccagcacgcaatgtacgacgaagaaaagggtaccccgattttcatttgtccagtcagctggggttag

SEQ ID NO: 216396 - DNA, 1809 bp, synthetic construct
  misc_feature 1..1809: note = Description of Artificial Sequence: Synthetic coding sequence
  source 1..1809: mol_type = other DNA
atgcattccaaggtgacaattatttgtatacggttcctgttttggtttctgttgctctgcatgttgataggcaaaagccataccgaagatgacataattattgccacaaagaacggcaaggttagggggatgaatttaactgtgtttggaggaaccgtcaccgcgtttcttggcattccatatgcccagcccccactggggcgactacggttcaaaaagccccagagtctcacgaaatggagcgatatttggaatgccactaagtacgccaacagttgttgccagaacattgaccaaagcttcccaggctttcacggctccgagatgtggaaccctaataccgacctcagcgaggattgcttgtatttgaatgtctggatccccgctccaaagccaaaaaatgccaccgtgcttatctggatctacggaggcggttttcagacaggaacgtcaagcctgcatgtgtatgacggtaaattcctggcacgtgtcgaaagggttattgtagtctccatgaactacagggtcggtgcactgggtttcctcgctctgccagggaatcctgaagccccaggtaatatggggctatttgaccagcaactcgccttgcagtgggtccagaaaaatatcgcggcatttgggggaaatcccaagtctgtgacattgtttggggaatctgccggtgcagcgtcggtctcattacacctgttgtctcccggttctcattcacttttcaccagggcaatactacaaagtgggtcctttaatgcaccctgggccgtgacatccctttatgaagctagaaaccggacgcttaatttggctaagttgacaggctgtagtcgcgagaacgaaacggaaataattaaatgtttgcgaaataaagacccccaggaaattctgctaaacgaggcgtttgtcgtcccttacggcacacccctttctgtgaactttggccctaccgtggacggcgatttcctaactgacatgcctgacatcctgttggaactgggccagttcaaaaaaacccagattctcgtcggagtaaataaggacgaaggcaccgcctttttggtctacggtgcccctggattttccaaggataataattccatcattactagaaaggagtttcaagaggggctgaaaattttcttcccaggggtgagcgaattcgggaaggaatcgatcctgttccattacactgattgggtcgatgatcagcggccagaaaactaccgcgaagcgttgggggacgtagtaggagattataattttatatgtccagctttggagttcaccaaaaaattttcagagtggggtaacaatgccttcttttactattttgaacatagatcatccaaattgccctggcctgagtggatgggcgttatgcatggatacgagatagaatttgttttcgggctaccgctggagagaagggataactacaccaaagcggaggagatcttgtctcgatctattgtgaaaaggtgggccaatttcgcaaaatacggcaaccctaacgagactcagaataatagcacttcttggcctgtctttaagtctacagaacagaaatatttgactttgaatacagagtctacgcggattatgacaaagctgcgcgctcagcagtgtcgtttctggacctcgttcttccctaaggtactggaaatgacagggaacatcgatgaggccgagtgggagtggaaagcgggatttcaccggtggaataactacatgatggactggaaaaatcaattcaatgactatacctctaaaaaagagtcctgcgtcggcctgtag

SEQ ID NO: 216397 - DNA, 399 bp, synthetic construct
  misc_feature 1..399: note = Description of Artificial Sequence: Synthetic coding sequence
  source 1..399: mol_type = other DNA
gcagtgcagttcaccggctggtcgtcatcctgcatcttgcattttcctgaagtgttgcacgatttccacagcctgcagacactgccatcgctgctacagcggattgggaacccaaatgagacacagaataatagcacatcttggccagtcttcaagagtacggagcagaaatacctgaccttaaacacagaatctacaaggatcatgaccaaactgcgggcacagcagtgtcgcttttggactagcttttttccaaaagtattggaaatgaccggaaatatcgacgaggctgaatgggagtggaaggccggattccatcgctggaacaactacatgatggactggaagaatcagttcaacgattacactagcaaaaaggaaagctgtgtagggctgtag

SEQ ID NO: 216398 - DNA, 195 bp, synthetic construct
  misc_feature 1..195: note = Description of Artificial Sequence: Synthetic coding sequence
  source 1..195: mol_type = other DNA
atgaccaagctccgcgctcagcagtgccggttctggactagcttttttccaaaagttctggaaatgaccggtaacatcgacgaagctgaatgggaatggaaagctggattccatcgatggaataactacatgatggattggaagaatcagttcaacgactatacgtccaagaaggaatcttgcgtagggctctag

SEQ ID NO: 216399 - DNA, 1431 bp, synthetic construct
  misc_feature 1..1431: note = Description of Artificial Sequence: Synthetic coding sequence
  source 1..1431: mol_type = other DNA
atggcaagcagaataggactacgcatgcagttaatgcgggaacaggcccaacaggaggagcagagggaacgtatgcagcagcaggcggtaatgcactacatgcagcagcagcagcagcagcagcagcaacagttgggagggccacctactcctgctattaacaccccagtccatttccagagtccacctccagtgcccggagaggtgctaaaggtgcaatcctacctggagaacccaaccagttatcatttgcagcagtctcaacatcagaaagtgcgggagtatttaagcgagacttatgggaataagttcgctgcccacattagtccggcacaagggtcacctaagcctccgccagctgcctccccaggtgtgcgcgctgggcacgttttaagcagctccgcgggtaattctgccccaaatagcccaatggccatgctgcatatcgggagtaaccccgagcgcgaactggacgacgtcattgacaacatcatgagactggacgacgtcttgggctacattaaccccgaaatgcagatgccaaacacacttcctttatcaagcagccacttgaatgtttattcgtctgatccccaagtcactgccagcttggtgggggttacgtcgagctcgtgtccagctgatctcacccagaaacgggagctgacagatgccgagtcccgcgctctggctaaagaaaggcaaaaaaaggataatcacaacctaatcgagcgtcggaggaggtttaacattaacgatcggattaaagaactgggcatgttgatccccaaagctaacgatctcgatgtgaggtggaataagggcaccattctcaaagcttctgtggactatattaggagaatgcagaaggacctccagaaaagccgtgaactcgagaaccatagcaggcggttggagatgaccaataagcagctgtggctgcgtattcaagagctcgagatgcaagctagggtgcacggcttacctacgacgtccccttcagggatgaacatggctgaactggctcagcaggtggtgaaacaggagctccctagcgaggaggggcctggggaagccttaatgcttggagcagaggttcccgacccagaacctctcccagctctccccccacaggctcctctccccctgccaacccagccacctagcccattccaccatctagacttttcccattctctgagctttggcggtagagaggatgagggtccacctgggtacccagagccactggctcctggacacggatcaccattcccctccctgtcaaagaaagatctcgatctcatgctgctggacgactcactcctgccattggcatccgatccgctgctgtcaacaatgagtccggaggctagcaaagcttccagtaggaggagttctttcagcatggaggagggagatgtattgtag

SEQ ID NO: 216400 - DNA, 426 bp, synthetic construct
  misc_feature 1..426: note = Description of Artificial Sequence: Synthetic coding sequence
  source 1..426: mol_type = other DNA
atggccggtgaagagattaacgaggattatcccgttgagattcatgagtacttgagtgcctttgagaactctatcggtgccgtcgacgagatgctgaaaacaatgatgtccgtgtccagaaacgagttgctccaaaaactagatcccctggaacaagccaaggttgacctggtcagcgcctatacactgaatagcatgttttgggtgtacctggcaacacagggcgtaaatccgaaggaacaccccgtgaaacaagaactcgagcgcattcgcgtgtacatgaatcgcgtaaaggagatcactgataagaaaaaagctggcaagcttgacagaggcgctgcctcccgcttcgtgaagaacgctctgtgggaaccgaaatcaaaaaatgcaagtaaagtcgccaacaagggcaaaagtaagagttag

SEQ ID NO: 216401 - DNA, 543 bp, synthetic construct
  misc_feature 1..543: note = Description of Artificial Sequence: Synthetic coding sequence
  source 1..543: mol_type = other DNA
atgcccagtccttctgtgtcaaccagcgcagccagtgtgctggagggtgtttgcggcagagcccgttctacataccgtactccagaagagggagaagagcagtcgtggagcgccataatggctggcgaggagatcaatgaagattaccccgtggaaattcacgagtacctgtccgcattcgaaaattcgatcggagcagtggacgagatgctgaaaaccatgatgagtgtgtctcgcaatgagcttctgcaaaagctggaccctctggaacaggccaaggtggatctggtgtctgcctacacattaaactctatgttctgggtgtacctcgccacccagggggtaaatccaaaagaacaccctgtcaaacaggaactggagagaatcagggtatatatgaaccgagtcaaagagatcaccgataaaaagaaggcaggcaaactggatcggggtgcagcctcgcgatttgtgaagaacgcattgtgggaacctaagagcaaaaatgcctcaaaagtagcaaataagggaaaaagtaaaagttag

SEQ ID NO: 216402 - DNA, 426 bp, synthetic construct
  misc_feature 1..426: note = Description of Artificial Sequence: Synthetic coding sequence
  source 1..426: mol_type = other DNA
atggccggagaggagatcaacgaagactaccccgtggagatccacgagtatcttagtgcctttgaaaattctattggcgctgtggacgaaatgctgaagacaatgatgtccgtgagcagaaatgaactccttcagaaattagacccactcgaacaagcaaaagtcgatctggtgtcagcctacactcttaattccatgttctgggtttatttagcgactcagggcgtaaaccctaaagaacacccagtcaagcaggagttagagcgaattcgcgtgtacatgaatcgggtgaaggagattacagataagaagaaggctggaaaactggacagaggcgctgcctcccggtttgtgaagaatgctttgtgggagccaaaatccaaaaatgctagcaaagtcgccaataaggggaagtcaaagtcgtag

SEQ ID NO: 216403 - DNA, 426 bp, synthetic construct
  misc_feature 1..426: note = Description of Artificial Sequence: Synthetic coding sequence
  source 1..426: mol_type = other DNA
atggccggagaggagattaacgaggattacccagtggaaatccatgagtatctgagtgcctttgagaacagtattggcgcagtggacgagatgctgaagacgatgatgtcagtgtctcggaacgagttgcttcagaaactcgaccctttggagcaggccaaggtggaccttgtgagcgcatacaccctgaactccatgttctgggtctacctagcaacccagggagttaaccccaaggagcatccagtcaagcaggaacttgagcgaatcagagtctacatgaatagagtcaaagaaattacagataaaaagaaagccggaaagctggacagaggagcagcctctcgatttgtgaagaacgcattatgggagccaaagagcaaaaacgcgtccaaggtcgctaataagggcaagtccaagagctag

SEQ ID NO: 216404 - DNA, 957 bp, synthetic construct
  misc_feature 1..957: note = Description of Artificial Sequence: Synthetic coding sequence
  source 1..957: mol_type = other DNA
atgctgtccgaaagtagctccttccttaaaggtgtcatgctggggtcaattttctgcgcattgatcactatgcttgggcacatacgtatcggccatgggaatcgcatgcaccatcacgagcaccaccatctgcaggccccaaataaggaggacatcttgaaaatctctgaggacgagaggatggagctttcaaagagcttcagagtctattgcataattctggtgaagccaaaggatgtttcgctgtgggcagctgtcaaggagacatggacaaagcactgtgacaaggccgagttcttttcctcagagaacgtcaaggtgttcgagtcgatcaacatggacaccaacgatatgtggctcatgatgcgcaaagcttataagtacgcctttgacaagtatcgagaccagtataactggttcttcctggctcgaccaactacatttgcaattatcgaaaacttaaaatacttcctgctgaaaaaagatccaagccagcctttctacctgggccatacgataaaatccggcgatctggaatacgtgggcatggaagggggaattgtgctgtccgtggaatctatgaaaaggttaaattccctgctaaatattcccgagaagtgcccagagcaaggagggatgatctggaagattagcgaggataaacagcttgccgtgtgtctgaagtatgcgggtgtgtttgctgaaaatgctgaggatgccgacgggaaagacgtgttcaataccaagtctgttggtcttagcattaaggaagctatgacttaccaccctaatcaagtggtggagggatgctgctccgacatggcagtgacgtttaatggcctgactcctaatcagatgcacgtgatgatgtatggggtctatagactgcgggcatttggccacatttttaacgatgcgctcgtattcttgcctcctaacggcagcgataatgactag

SEQ ID NO: 216405 - DNA, 957 bp, synthetic construct
  misc_feature 1..957: note = Description of Artificial Sequence: Synthetic coding sequence
  source 1..957: mol_type = other DNA
atgctgagtgaatcatcctcatttttaaaaggggtaatgctcggatcaatattttgtgccctcataaccatgctaggacacattagaattggtcatggtaaccgcatgcaccatcatgagcaccaccaccttcaggcaccaaataaggaagatatcctaaaaatatctgaggacgagcgcatggagctgtctaagagtttccgcgtttattgcattatactagttaagcccaaagacgtttccctttgggcggctgtcaaagaaacctggacaaagcattgtgataaagctgagttcttttcctcagaaaatgtaaaagtctttgagagcatcaatatggataccaacgatatgtggctgatgatgcgaaaggcctacaaatacgcatttgataagtacagggatcagtataattggtttttcctggcgagacccacaactttcgccataatcgagaatctgaaatactttctgctaaagaaagatccctcccagcccttttacctgggccataccatcaagtccggggatctcgaatacgtaggcatggaaggcggtatcgtcctgtcggtggaatcaatgaaacgcctgaacagtctactcaacatcccagaaaagtgcccggagcaaggaggcatgatctggaagatttccgaagataagcagctggcagtctgcctcaaatatgccggagtctttgcggaaaatgccgaggatgcagatggcaaagatgtgtttaacactaaaagcgtcggcctgtcaattaaagaggccatgacttatcacccgaaccaggttgtcgagggatgctgtagtgacatggccgtgacatttaatggcctgacgccaaatcagatgcatgtaatgatgtacggcgtgtatcgcttgagggccttcggacacatatttaatgacgccctggtgttcctcccccctaacggaagtgacaacgactag

SEQ ID NO: 216406 - DNA, 732 bp, synthetic construct
  misc_feature 1..732: note = Description of Artificial Sequence: Synthetic coding sequence
  source 1..732: mol_type = other DNA
atgcgtccactcttagtgctgcttctgctggggcttgcagctggatcccctccactagacgacaacaaaattccaagcttatgtccaggtcatcccggactacccggaactcctggacaccacgggagtcagggactccccggtagggatggtagagacgggagggacggcgctcctggagctccaggcgagaaaggggaagggggacgccctgggctaccaggacctcgcggtgaccctgggcctagaggggaggccggacccgctgggcctacgggacccgcaggtgaatgctcagttccaccacggtcagccttctccgccaagaggagcgagtcaagagtgccaccaccatcagacgctccactcccctttgatcgagtgctggtgaatgaacaaggccattacgatgccgtcacaggtaaattcacatgtcaggtgccaggggtgtactacttcgcggtgcacgcgactgtgtaccgtgctagcctacaattcgacctggtgaagaacggggaatctattgcctcctttttccaattctttgggggatggccaaagcctgcctctttgtccggcggagcaatggtgaggcttgaacctgaagaccaggtttgggtccaggtcggcgtgggtgattacattggaatttacgcctcgattaagaccgactctacatttagtggctttctcgtgtattccgattggcattcctcgcctgtatttgcctag

SEQ ID NO: 216407 - DNA, 732 bp, synthetic construct
  misc_feature 1..732: note = Description of Artificial Sequence: Synthetic coding sequence
  source 1..732: mol_type = other DNA
atgcggccattgctagttctcctgctgcttggtcttgccgctgggagtccgcctctggatgacaacaaaataccctccctttgtccgggtcacccaggactccccggaactcctggccatcatggctctcaaggtttgcctggcagagacggccgagacgggagggatggggcacctggagcacccggtgaaaaaggtgaaggagggagaccaggcttgcccggtcctaggggcgacccgggaccgaggggggaggcaggaccggctgggccaaccggcccagcaggagagtgttccgtccccccaaggtctgcttttagcgccaagcgctctgagtcacgcgtacctcctccatccgacgctcctctccctttcgatcgcgtgctggtcaatgaacagggacattacgatgccgtgacgggaaagtttacttgccaggtgcctggggtttattactttgcagtccatgcaacggtctacagagcctctcttcagtttgatcttgttaaaaacggagaaagtattgcctccttcttccaattctttgggggttggccgaagcctgccagtctttcaggtggcgctatggtgcggttggaacccgaggatcaagtttgggtgcaggtgggggtgggggattacatcggcatttacgcaagcattaaaacagactctacttttagtgggttcctggtgtacagcgactggcatagtagccctgtctttgcctag

SEQ ID NO: 216408 - DNA, 759 bp, synthetic construct
  misc_feature 1..759: note = Description of Artificial Sequence: Synthetic coding sequence
  source 1..759: mol_type = other DNA
atggctgcccctgccctgctgctattagcactgctcttgccagtgggtgcgtggccagggctgcccagacggccttgtgtacactgttgtcgcccagcttggccacccggaccttatgccagggtctcagatcgggacctctggcgcggagacctgtggcgaggactgccaagagttagacccactattgatattgagattctgaaaggcgaaaaaggcgaggcaggcgtgaggggcagagctgggaggagcgggaaagagggccctccgggtgccagaggtctacagggtaggcggggtcagaaggggcaggtcgggcctccgggagctgcttgcagacgtgcttatgccgctttttctgtgggcaggcgtgaagggctccactcatcagatcacttccaggcagtcccctttgatacagagttggtcaatctggatggggctttcgacctggcagccggtaggttcttgtgcaccgtcccgggagtgtattttctgtctctaaacgtgcacacctggaattacaaggagacatatctgcacatcatgctgaatcggcgacctgccgcagtgctgtacgcccagcctagtgagagaagcgtgatgcaggcacagtctctgatgctgctcctcgctgctggagatgccgtttgggtacgcatgtttcagcgggatcgggacaacgccatttacggcgaacatggagacctatatatcacttttagtggtcacctcgtgaagcctgctgccgagctctag

SEQ ID NO: 216409 - DNA, 1002 bp, synthetic construct
  misc_feature 1..1002: note = Description of Artificial Sequence: Synthetic coding sequence
  source 1..1002: mol_type = other DNA
atgcggatttggtggttgctcctagcgattgagatctgcactggcaacatcaactcacaggacacgtgtagacaaggccaccctggaatccccggaaatccgggacacaacggattgccgggtcgcgacggccgtgatggtgcgaagggagataaaggagacgccggagaaccgggacggcctgggagcccaggcaaggatggaacgtccggcgaaaaaggagagcgtggtgccgatgggaaggtggaagctaaaggcataaagggggaccagggaagccgtggtagccccggaaaacatggaccgaaaggacttgcaggcccaatgggagaaaagggccttcgaggggagactggaccacagggccaaaaaggcaataagggtgacgtcggacctaccgggcctgaggggcctagaggcaacattggtcccctcgggccaactggcctgcccggaccaatgggaccgattggaaagccaggaccgaagggggaggccggacctactggaccccaaggcgagcccggagtgagaggtatccggggatggaaaggcgaccgcggtgagaaaggcaaaatcggagagaccttagtgctcccaaagtccgcttttacagttgggctaacagttctgtctaagttcccatccagcgacatgccgatcaaatttgataaaatcctctacaatgaatttaatcattacgacactgctgccggaaagttcacttgtcacatcgcaggggtgtactacttcacctatcatattaccgtgttttcgcggaatgtgcaggtgtcgctcgtgaaaaacggggtcaaaatcctccacacaaaggatgcttatatgtcctccgaagaccaggcaagtgggggaatcgtgctgcagcttaagctgggtgatgaggtctggctccaggtaactggcggtgaacgttttaacggcttattcgcagatgaggatgacgacaccactttcacggggtttcttttattctccagcccatag

SEQ ID NO: 216410 - DNA, 1002 bp, synthetic construct
  misc_feature 1..1002: note = Description of Artificial Sequence: Synthetic coding sequence
  source 1..1002: mol_type = other DNA
atgcgtatctggtggctgctcctcgctatagagatctgcaccggtaacatcaactctcaagatacctgcaggcagggacaccccggtatcccagggaaccctggtcataacggattacccggacgcgatggaagagacggcgcaaagggcgataaaggagatgccggtgagcctggccgaccaggctctcccggtaaggacgggacctcaggagaaaagggggagcggggagccgacggcaaggttgaggcgaaggggatcaaaggtgatcagggctccagaggaagccctggcaagcacgggcctaaaggactcgccggtcccatgggcgagaagggcctgcggggagaaaccggccctcaggggcagaaggggaataagggcgatgtggggccaaccggccctgagggacccagggggaacatcggcccactgggccctactgggttgcctgggcctatgggcccaataggtaaaccaggtcccaagggcgaggcgggtccaaccgggccacagggagagcctggagtacgcggaatcaggggatggaaaggggaccggggtgaaaagggcaaaattggcgagacgttggtgctgccgaagagtgcctttactgtggggctcactgtgttaagcaaatttcccagctccgacatgcctattaagtttgataagatactctataacgagttcaatcactatgacaccgccgctggaaagtttacctgccacattgccggtgtgtattattttacttatcacattacagtctttagcagaaatgtgcaggtgagcctggtgaaaaatggggtgaagatacttcacacaaaggacgcttatatgtcttccgaggatcaggcaagcggcggaatcgtgctccagctgaagctgggggacgaggtctggctccaggttacaggcggagagcgattcaatggactgttcgccgatgaggacgacgataccacctttacaggttttctgctgttttccagcccatag

SEQ ID NO: 216411 - DNA, 300 bp, synthetic construct
  misc_feature 1..300: note = Description of Artificial Sequence: Synthetic coding sequence
  source 1..300: mol_type = other DNA
atgaggatctggtggctgcttctggctatagaaatttgtactggcaacataaatagtcaggatacttgtcggcagggccacccgggtatcccaggcaatccagggcacaatgggctgcctgggagagatggtagggacggagcaaaaggagataaaggggacgcaggcgaacccggatgccctggcagccccggaaaggacggcaccagcggggagaagggcgaacgtggcgcagacggtaaagtcgaagctaaagggatcaagggcatgttccgttgtctctggtcaaagaccgaatag

SEQ ID NO: 216412 - DNA, 1002 bp, synthetic construct
  misc_feature 1..1002: note = Description of Artificial Sequence: Synthetic coding sequence
  source 1..1002: mol_type = other DNA
atgagaatctggtggctgctcctggcgattgagatatgtaccggaaatatcaattctcaggatacttgccgtcagggccaccccggaattccaggaaatcccggacataacgggctgcctgggagagatgggcgtgatggcgcaaaaggtgataagggcgacgctggtgaacctggctgccccggatctcccggtaaagatggtacttcaggggaaaagggtgagaggggggctgacggaaaagttgaggcaaagggcattaaaggcgatcaggggagcagagggtctccaggaaagcacgggcctaaaggactggcgggaccaatgggagaaaagggcctgcgtggtgaaacaggtcctcaagggcagaagggcaacaaaggagatgtgggcccaacagggccagaagggcctcggggtaacattgggccactcggccctacagggctgccgggacccatgggccctatcgggaaacctggacctaagggcgaggcgggacctaccgggcctcagggcgagccaggcgtgagaggaatcagagggtggaaaggcgatagaggagagaaaggaaaaatcggagagactctagtactgccaaagagcgcctttacagtcgggctaacagtgctcagcaagtttccatccagcgacgtcccaatcaaattcgacaagatcctgtacaacgaatttaatcactatgacacagctgtcggaaagttcacttgccatattgcaggggtatattatttcacatatcatataaccgtctttagcaggaatgttcaggtcagtctggttaaaaacggcgtgaagattctgcacacaagggatgcttacgttagctctgaggaccaggcatccggttcaatcgtccttcagttaaagttgggggatgagatgtggttacaggtgaccgggggagaaaggtttaatggattgttcgcagacgaagatgacgacactacattcaccggattccttctgttctcaagtcaatag

SEQ ID NO: 216413 - DNA, 1002 bp, synthetic construct
  misc_feature 1..1002: note = Description of Artificial Sequence: Synthetic coding sequence
  source 1..1002: mol_type = other DNA
atgcgaatatggtggcttctccttgcaattgagatctgcaccggaaatattaatagtcaggatacctgcagacaggggcaccctgggatacccggtaaccccggtcacaacgggcttcccggacgggatggtcgtgatggggcaaaaggcgataagggggatgccggtgaacctggctgcccaggatcaccaggcaaggacgggacttcaggcgaaaagggcgaacggggtgcagatggcaaggtggaagccaagggaataaagggggatcaaggcagccggggatcacccggaaaacatggtccaaaaggactggccggacctatgggggagaaaggcttgagaggagagactggaccacaagggcaaaaaggcaacaaaggggatgttgggcctacagggccagaggggccaaggggaaatattggcccattgggtcctactggcttgcctggccctatgggccctatcgggaaaccaggtcccaaaggtgaagcaggacctactggtcctcagggggagccaggcgtcaggggcattcgtgggtggaaaggcgaccgtggagagaagggaaaaataggcgaaaccctcgttcttccaaagtcagcctttaccgtgggcttaacggtgttgtctaaatttcccagtagcgatgtgccaatcaaatttgataaaatcctgtacaatgaattcaaccattatgacaccgctgtcgggaaattcacatgtcacatcgctggcgtctattattttacataccatattaccgtgttctctcgaaatgtgcaagtgagcctcgtcaaaaacggagtgaagattttgcacactcgcgacgcctatgtcagctcagaggatcaagcttccggcagcattgtgctccagctcaagttgggtgacgagatgtggctacaagtgacgggaggagagcgctttaatggcttgttcgctgatgaggacgatgataccactttcaccggttttctcctattctcgtcacagtag

SEQ ID NO: 216414 - DNA, 150 bp, synthetic construct
  misc_feature 1..150: note = Description of Artificial Sequence: Synthetic coding sequence
  source 1..150: mol_type = other DNA
gtaggccctacaggcccagaaggccctcgaggcaatatcggcccactggggcctactgggctgcccggacctatggggcctattgggaagcctggccctaaaggagaagctggtcctaccggacctcaggtgttccccttctgcatctag

SEQ ID NO: 216415 - DNA, 1110 bp, synthetic construct
  misc_feature 1..1110: note = Description of Artificial Sequence: Synthetic coding sequence
  source 1..1110: mol_type = other DNA
atgtggtgtctggaacggttaagactgggccctgaatgtctgagacgctctggtgattggttattacccggacgagccaggggcgctaaatcccgcacaacagccgcttgcgccaacgtgctgacacccgatcgcatcccagagttttgcatcccgccaagacttatgccccgactggccctggctgccctacgaaacagctgggtagaggaggctggaatggacgaaggggcaggcagaacggattgggaccctagatcccaggcagccctttctctgccacacctgccacgcgtgagaaccgcctatggattctgtgcccttctggagagcccccatacacgccgaaaagaaagcctgctgctcgggggtcctccagctcctcgaccacgggcacacacttatgggggtggcggtggacctgatgcacttctaggtacactgcgcgtgcccagggctcctggtcctgccacacccgctgccccaggctgccctcggccaccccaagatgccctggctaggcgccctcggggttgtaggctgctccgtgtgccagatggtctgctaagtcgcgctctgagggcaggtcgctcccgcaggctgacacgggtgaggtcggtatcttcaggcaacgaggacaaggaacggagggctggaagtcagagtcctgccagagcaccctctaccagccccccttcctcccgagtgccatttcctgagcgtctggaggctgagggcaccgtggccctgggacgagccggtgatgcactacggctagccgctgaatattgccccggtaccggacgtctgcgtttaagactgcttcgggctgagtccccagccggaggcgcaccaggtcctagggccgtgtcctgcaggttgtccctggtgttgcgacccccaggtacggctcttagacagtgctcaaccgtcgtcggaagatctcggaaggcctccttcgatcaagatttttgttttgatggactctccgaggatgaagtccgccgactggcggtgagagttaaggcacgggatgagggcaggggaagggaaaggggtcgcctgctcggccagggggagttatcactaggagcccttcttttactgtag

SEQ ID NO: 216416 - DNA, 1095 bp, synthetic construct
  misc_feature 1..1095: note = Description of Artificial Sequence: Synthetic coding sequence
  source 1..1095: mol_type = other DNA
atgcgacttctggaaaaactttgtagttcagcagcgggttccagcgcaccaaaacccgctttcgcaaaggtgttgactccaaaccgcattccggaattctgcatccctcccaggctgcctgccccatgcacccttgaaagccccattagggcggctgccgtacctaggcgatgcgcagccgaatcagatttgtggcctagagccgcagacgaggacgcaggcagaactgactgggatcctagatcacaagccgcactgagcctacctcacctgcctagggtgagaacaacctatgggttttgcgccctgctggagtccccccacacccgcaggaaagaatcacttttactgggcggacccccagctcctagacctcgggctcacagctgcgggggtggtgggggacctgacgccccactgggaactttatgcggaccacggggtccaggacccgctacaccagccgcaccaggaggaccccgactgccccaggatgcactggcagctgggcctagacgctgcagactattgagagtgccagatgggctcctgtccagagcactcagggctggacgtagccgacggctcgctcgcgtcagatccgtgtcttccggcaatgaagacgaggaaagaagggctgggagcgagtctccagccagagcgccatcaagttctcccttgagtagcagagccccacttccagaacgattggaagctaaggggactgtggccctcggcagggctggcgacgcgttacgactggctgcagagtactgcccgggaacgcgcaggctgaggcttagactgctgagggccgagtcattgttcggaggcgcacccggacctcgggcagtgcggtgccgactttctctggtcctgcgcccaccaggtacagcccgatggcagtgcagcgccgtcgtagggcgtagtcgcaaagcctccttcgaccaagacttttgttttgacggactgagcgaagacgaggtgaggcgactggccgtgagagtgaaggccagggatgagggaagggggagggaccggggtagactgctgggccaaggagagctcagcttaggcgctcttctcttgctttag

SEQ ID NO: 216417 - DNA, 1266 bp, synthetic construct
  misc_feature 1..1266: note = Description of Artificial Sequence: Synthetic coding sequence
  source 1..1266: mol_type = other DNA
atgagaaaaaccaacatgtggttcttggagagactgagaggatccggcgaaaatggcgcagcaaggggcgtgggctccgaagccggagataaggctagcaaggggccactgtatagcaacgtgttaactcccgataagatccctgacttttttatcccacccaaactacctagcggaccggctgagggcgagggacaagcagctctcgggccaagcacctccgaacagaacctcgctagtgccgcaccacggcaaacacctagatctcctcgattgcctgctaagcttgccgcagagtctaagagcctacttaaagccgcaacgagacatgtaattcagattgagtccgccgaggactggctgtcagaggaggctaccgacgcagatcctcaagctcagggcgcaatgtccctgccatccgtgccgaaagcccaaacgtcatatggatttgccatgctggccgaatctcctcatactagaaggaaggagtctttatttcactctgaacatggagcactggctcaagtggggtcccccggtgctggaagaagaagggctgcagcaaaggccaacggcggtgacgggggaccccgagaagcgggtggtgctctgatgagtcctggccgttatttttcagggggtgagtctgacactgggtccagcgctgaaagcagcccctttgggtctcccctcctgtcaagaagtgtgagtttgctcaaaggatttgcccaggattctcaagcaaaggtgtcacagctaagacattccgtgggcaggcacgggagcctcagcgcggacgatagcactcccgatgcctcccctggatcacgccgacggctcacccgcagagcccctccagagccaggacccgagagtgggcaggctcgtggtgaacataccgtccacgtcggcccaaggggttccgtgagactgctggcggaatatgaagccggtcaggcccgactcagagtccatttgctggcggctgaaggcttatacgacagactgtgtgacgctcggtccattaactgctgtgttgggctgtgtctcgttcctggcaagttacaaaagcagcgcagcaccatcgtgaaaaattcccggagacccgtgtttaacgaggatttcttctttgatggcctcggccctgcctccgtgaggaaattagctctgcgcattaaggttgtgaataagggcagttctctgaaaagagataccctcttaggagaaaaggagttgccattaacatccctgctcccatttctgtag

SEQ ID NO: 216418 - DNA, 3945 bp, synthetic construct
  misc_feature 1..3945: note = Description of Artificial Sequence: Synthetic coding sequence
  source 1..3945: mol_type = other DNA
atgttggacccgagttcaagtgaggaagagtcagacgagatagtagaggaggagtcagggaaggaagtgctagggtcagccccttctggggcacgattaagcccgagtaggaccagcgaagggtccgctggctctgctgggctgggcggtggcggtgccggagcaggtgccggagtcggggctggaggtggagggggatccggagcctcttccgggggtggggctggaggactgcaaccctcgtcccgggcaggcggagggaggccatcttccccttccccgagcgtggtgtccgagaaggagaaggaggagttggagcgtctccagaaagaggaggaagaaaggaagaagcgacttcaactgtatgtatttgtcatgagatgtattgcatatcctttcaatgcaaagcagcccaccgatatggcccgtcgacagcaaaagatttccaagcagcagctccagaccgtgaaggacagatttcaagccttcctgaatggtgagacccagattatggccgacgaagccttcatgaacgcagtacaatcctactatgaggtgtttctcaagtcagatagagtcgcgcgtatggtgcagtcaggaggctgctccgccaacgacagtagggaggtgttcaaaaaacacattgagaagagagtcagatcactgcctgagatcgacggcttgtcaaaggagacagtgttgtcttcatggatggccaaatttgacgccatctatcggggtgaagaggatccaaggaagcaacaggcaagaatgaccgctagtgcagccagcgagttgatcctgtctaaggagcagctctatgagatgttccagaacatcctggggattaaaaaatttgagcaccagttactgtacaatgcctgtcaactcgacaaccccgacgaacaggccgctcagatcaggcgtgagctggacggcagactgcagatggccgaccaaatcgcgagagagcgtaaatttcctaaattcgtaagcaaagagatggagaatatgtatatcgaggagcttaaaagtagcgtgaacctgctgatggcaaacctcgagagtatgcctgtcagtaagggaggggagtttaagttgcagaagctgaaaaggagtcacaacgcttctataattgacatgggcgaggaatcagaaaaccagctttcaaagtccgacgtcgtcttatcattttcacttgaggtagtgatcatggaagtacagggactcaagtcactggcacccaacagaatcgtatactgtaccatggaagtagaaggcggagaaaaactgcagactgatcaggcagaggcatctaaaccaacttggggaactcagggtgacttttctacgactcatgccctaccggctgtcaaagtgaaacttttcacggagagcacaggcgtgctggctctggaagataaagaactgggtcgcgtgatcctgcatccaactcctaatagtccgaagcagtctgagtggcacaaaatgacagtaagtaagaattgcccagaccaggacttgaaaataaaactagccgtacgtatggacaaaccacagaacatgaaacacagcgggtacctctgggccatcgggaaaaacgtgtggaagcgctggaaaaaacgttttttcgttctcgtgcaggtgtcccaatacacgtttgccatgtgctcctaccgcgagaagaaggccgagcctcaggagctactacagctagacggctataccgtcgattacactgacccccagcccggactcgaagggggaagagctttctttaatgccgttaaggaaggagacaccgtcatctttgcctccgacgacgaacaggatcgtattctgtgggtgcaggctatgtaccgggcaaccggacagtcccacaagcccgtgcctccaactcaggtgcagaaactcaatgccaagggaggaaatgtgccccagctggacgccccaatctcacagttctacgcggaccgggcacagaagcatggtatggatgaatttatctcttccaacccttgcaattttgaccacgcctcacttttcgagatggttcagcggctcacacttgaccatcgactgaacgattcttatagctgtttaggatggttttctccagggcaggtgttcgtccttgacgaatactgtgcaaggaacggggtgcggggatgtcacagacacctgtgttaccttcgggacctgttggagagagcagagaacggagctatgatcgatcccacactcctgcactattctttcgccttctgtgccagccacgtgcatggaaataggcccgatggcatcggcacagtcactgtggaagaaaaggaaaggttcgaagaaattaaggagcggctgcgggtcctgctggagaaccagataacgcatttccgctactgtttcccgttcgggaggcccgaaggggctcttaaagcgacactttcactcctggaaagagtcctcatgaaggacattgtcacacccgtccctcaggaggaagtaaaaacagtaattcggaaatgccttgagcaagctgctttggtcaattatagtcgcctgagcgagtatgccaaaatcgaagggaaaaagagggagatgtacgagcatccagtattctgcttagcttctcaggtcatggacctgacaatacagaatgtgggcaggcttatcactccagcgaaaaagctggaagataccatccgattggctgagttagtgatcgaagtgctgcagcagaatgaggagcatcatgctgaagcctttgcctggtggagcgacttgatggtggaacatgccgagacatttcttagtttgttcgctgtggatatggatgcggctctagaagttcagcccccagatacttgggattcctttccactattccagctgctgaatgactttctgcgcactgattataacctctgtaatggaaaattccacaagcatttgcaggatctttttgctccattagtggtgagatatgtcgacctgatggagtctagcatcgcccagtctattcatagaggttttgagcgagaaagctgggaaccagtgaacaacggtagcgggacctccgaagatcttttctggaaattagatgctctgcagacttttataagagaccttcactggcccgaagaagaattcggtaaacatctagaacaacgactcaaactgatggccagtgatatgatcgaatcttgcgttaagcgcacccgcatcgcttttgaggtgaaactgcagaagacgtcccgctctaccgatttccgggtcccccaatctatctgcacaatgttcaacgttatggttgatgctaaagcccagagcacaaagctttgcagcatggagatgggccaggagcaccagtaccattcaaaaatcgacgaactgatagaggagaccgtgaaagaaatgataaccctgttggtagccaagttcgtgacaattctggagggagtcctggctaaactctcgcggtatgatgaggggacgctcttttctagctttctctctttcactgtgaaagccgctagtaaatacgtcgacgtccccaagcctggaatggatgtggccgatgcgtatgtgacattcgtgcggcacagccaggacgtactaagagacaaggtcaatgaggaaatgtacatcgaacgcctgttcgatcagtggtacaattcctcaatgaacgttatctgtacgtggttaacagacaggatggacttgcagctgcacatctaccaacttaagacgttaatcaggatggttaaaaaaacctatcgggacttccgcctacagggggtgcttgatagtaccttgaacagtaaaacatatgagacgatccgcaatcggctgaccgtggaagaggccactgcctcagtaagcgagggcggaggactgcagggcatcagtatgaaggattcagacgaggaagacgaggaggacgactag

SEQ ID NO: 216419 - DNA, 3825 bp, synthetic construct
  misc_feature 1..3825: note = Description of Artificial Sequence: Synthetic coding sequence
  source 1..3825: mol_type = other DNA
atgctggatcccagtagctcggaggaggaaagcgacgagatcgttgaagaagagtccgggaaagaggtcctggggtccgccccttctggcgcacgactgagcccgagtcgtactagcgagggcagcgctggttctgccggattaggagggggtggcgcaggggcaggtgcgggtgtaggcgctggtggaggcggagggagtggtgccagttccggaggaggtgccggtgggctgcaaccaagctcccgggcaggcggtgggagaccctcaagccccagtccttcggtggtcagcgaaaaggaaaaagaggagcttgaacgactgcaaaaagaggaggaggaacggaaaaaaagattgcaactgtacgtgtttgtgatgagatgtattgcttaccccttcaacgcaaagcaacctaccgacatggcacgcagacagcagaaaatctcaaagcagcagctacaaactgtgaaggacaggtttcaggcttttctgaatggagaaacgcaaataatggccgatgaggccttcatgaatgccgtgcagtcctattacgaggtgtttctgaaatccgacagagttgcacgtatggttcaatcaggcggatgctctgccaacgactcccgcgaggtatttaaaaagcacattgaaaaacgggtgcggagccttcctgagattgacggtctgtctaaagagactgttctctcctcctggatggccaagttcgacgcgatctatcggggtgaagaggacccaagaaagcagcaggccaggatgactgcctctgcagcaagcgagctgatccttagcaaagagcagctctacgagatgtttcagaacattctgggcattaaaaagttcgagcaccagctgttatacaatgcctgtcaactggacaacccagatgagcaggccgctcagatcagaagggagctggacggacggctccagatggcggaccagatcgcgcgagagcgtaagtttcctaagttcgtttcaaaggagatggaaaatatgtacattgaggagctgaaatcttcagttaacctactgatggccaatctggagtcaatgcctgtaagcaagggcggagagtttaaactccagaaattgaagaggagccacaacgcgtcaattattgacatgggcgaagagtcagagaatcagctatccaagtcagatgtggttctcagtttctccctggaggtcgtcattatggaggtacaaggcctcaagtccctcgcccctaaccggatcgtttattgtaccatggaagttgagggcggagagaaactccagaccgaccaggccgaggcaagcaagcctacctgggggacacagggggattttagcaccacccacgcgcttcccgcagtgaaagtgaaactcttcacggagagcactggtgtgctcgccctggaggacaaggagctcggtcgagtaattttacatcccacccctaactcacctaagcagtctgagtggcacaagatgactgtgtccaaaaattgtccagaccaggacttgaaaataaagctcgcggtccgcatggacaagccacagaatatgaagcattctgggtacctatgggctattggaaaaaatgtgtggaagcgttggaagaagaggttttttgtgcttgtccaagtttcacagtacacctttgccatgtgctcttacagagagaagaaagccgagccccaggagctgttgcaacttgacgggtacaccgtcgattacactgacccacagcctggcttggagggagggagggcattcttcaatgccgtgaaagagggtgataccgtaatttttgcatccgatgacgagcaagacaggatcctgtgggttcaagctatgtaccgggctacgggtcagtcccataagcccgttcccccaacacaagtccagaagctgaatgccaaagggggtaacgtcccacagctagacgctccgatttctcagttctacgccgatcgggctcagaaacacgggatggatgaattcattagttcaaacccctgtaattttgaccatgctagtctgttcgagatgggctggttttccccaggtcaggttttcgtactggatgagtactgtgctaggaatggtgtgcgcggatgtcatcgccacttgtgttacctgcgggatctcctggaacgtgcagagaatggtgccatgatcgatcctacacttttgcattattcttttgccttctgtgcaagccacgtccacggtaatcggccagacggcatcggtacggttaccgtggaagagaaagaacgttttgaagagatcaaggaaaggttacgggtcttactcgaaaatcagattacacactttcgctactgtttcccctttggtagacctgagggcgcacttaaggccactttgtctttgcttgaaagagtgttgatgaaagacatcgtcactcccgtcccccaggaggaagtaaagacagtgattcgcaagtgcctggaacaagctgctctggtgaactattccaggttgagtgaatacgccaagatcgaggaaaacgtaggcagattgatcacacctgctaagaaattagaggacaccattagactggcagagttggtgattgaggttctccagcagaatgaagagcaccatgctgaagccttcgcctggtggtctgacctcatggtagagcatgccgaaactttcctgtcactgttcgctgtggatatggatgccgcactcgaagtacagccccctgacacttgggatagttttcctctctttcagcttcttaacgattttctacgcaccgactacaacctgtgcaatggcaagtttcacaagcatctacaggacctctttgcccctcttgtggtgcgttacgtagaccttatggaatcaagtattgcgcaatctattcacagaggattcgagcgggagtcatgggaacctgtcaataacggatccgggacctctgaggacctgttctggaaactcgacgccctgcagaccttcataagagatctacactggccggaggaggagttcgggaagcatctcgaacaaagattaaagctgatggcatccgatatgatagaaagctgcgttaagcggacgagaatagcgtttgaggtcaaactccagaagacatcccgaagcaccgattttagagtccctcaaagcatttgtactatgtttaatgttatggtggacgccaaagcccagtctacaaaattgtgtagcatggagatgggccaggaacatcagtatcattctaagatcgacgagctcatcgaggagactgtgaaggagatgataaccctgcttgtggccaaatttgtaacaattctcgaaggagttctcgcgaaactcagccgatacgacgagggaaccctcttctcaagcttcctctcatttacggtaaaggctgcttctaagtacgtggacgtcccgaagcctggcatggatgtcgccgatgcttatgtaactttcgtgcgacactcccaggatgtattgcgggacaaggtgaatgaggagatgtatatagagaggctctttgatcagtggtacaatagttctatgaacgttatctgcacgtggctcaccgatcggatggaccttcagctgcacatataccagctgaaaacgcttatcagaatggtcaagaagacttaccgggatttcagactccagggtgtgctggactcgactctcaacagtaagacttacgagactatcaggaatcggttaacggtggaggaggctaccgcctctgtttctgagggcggtggccttcagggcatttctatgaaggatagcgacgaagaggatgaggaggacgattag

SEQ ID NO: 216420 - DNA, 4080 bp, synthetic construct
  misc_feature 1..4080: note = Description of Artificial Sequence: Synthetic coding sequence
  source 1..4080: mol_type = other DNA
atgctggacccctcctcgtccgaggaggaatcagatgaaatcgtggaagaggaaagcggcaaggaggtgctggggtctgcaccatctggagcacggctgagcccatcccgtacctctgagggatctgccggaagcgccggtcttggcggagggggagcaggcgctggagctggcgtgggtgcaggcggaggaggcggttccggtgccagcagcgggggtggcgctggagggctgcagccttcctcccgcgctggcggagggaggccgagttcgccatccccttcagttgtttcagaaaaggagaaggaggaacttgaaagattgcagaaggaggaagaggagcgtaagaagcgcctgcaactgtacgtgttcgtcatgaggtgtattgcttacccattcaacgccaaacagcccacagacatggccagaaggcagcagaagattagcaagcagcagctgcagaccgtgaaggatcgattccaggcgttcctcaatggcgaaacccagatcatggcggatgaggctttcatgaatgctgtccaatcgtactacgaggtattcttgaaatccgatagagtggctcggatggtgcagagtggcggatgttcagcgaacgattctagggaggtattcaaaaaacatatcgagaaaagggtacggagcctcccagagatcgacggactcagtaaagaaactgttttgtcaagctggatggcaaagtttgatgccatatataggggagaagaggaccccagaaagcagcaggctcgtatgacagcctccgcagccagcgagctgatcctgagcaaagaacagctgtatgagatgttccagaatattttaggaattaaaaagttcgaacatcagctgctctacaacgcttgccagttggacaaccctgacgaacaggctgcccaaattagaagggagcttgacggcagactgcaaatggcagatcagatcgcacgcgaaaggaagttcccgaagtttgtgtccaaagaaatggagaatatgtacatcgaggaacttaagagcagcgtaaacttactgatggccaatctggagtctatgccagtgagcaagggcggagagtttaaactgcaaaaacttaagcggagccataatgcgtctatcatcgatatgggcgaggagtctgagaaccaactgagtaaaagcgatgtggtactgtctttctccctagaagtggtcattatggaagtgcaggggctgaagagcctggccccaaatcggattgtctactgtactatggaagttgagggcggagaaaaactgcaaaccgaccaggccgaggcgtccaaaccgacatgggggacccagggcgatttctctacaactcatgcattgccggctgtcaaagttaagttgttcacagaatcaactggagtcttggctctagaagataaagagttagggagagtcatcctgcaccctacgcctaatagccccaagcagtcggagtggcataagatgactgtctccaagaactgccctgatcaggatctgaagatcaagttggccgtcagaatggataaaccgcagaacatgaagcacagcggctatctttgggcgattggcaagaacgtttggaaacggtggaagaagcggtttttcgtgctcgtgcaagtcagccagtacactttcgctatgtgttcttatcgggagaaaaaagcagagcctcaggagctgctccagcttgacggatacaccgttgattacacagatcctcaaccgggacttgaagggggtcgtgctttttttaacgcggtcaaagagggcgataccgtcattttcgccagcgacgatgagcaggataggattctgtgggtgcaggccatgtacagggcgaccggccagtctcataagcccgtcccacctacgcaggtgcaaaaactgaatgcgaaaggaggaaacgttcctcagctggatgcaccgatcagtcaattttatgccgaccgggcacagaagcacggcatggacgagtttatcagcagcaacccatgtaatttcgatcacgcttctctcttcgaaatggtgcaaaggctgaccctggatcataggctaaacgactcttactcgtgtcttggttggttcagtcctggccaggtgtttgttctagacgagtactgtgcaagaaatggagtccgaggctgtcatcggcacctgtgctaccttcgcgatcttctagagagggcagaaaacggggcaatgattgatcccacccttcttcactacagttttgccttttgcgcctctcatgtgcatggcaaccgacccgatggcattgggactgtcaccgtcgaagagaaggagagattcgaagagatcaaagagaggctgcgcgtattgttggagaatcagattactcacttccggtactgttttccattcgggcgtcccgaaggagctctcaaagccacactgtcactgctggaacgtgttctgatgaaagatattgtgacaccagttccccaagaagaggtgaaaactgttatccgaaaatgccttgagcaggccgcattggttaattactccaggctatccgaatacgccaaaattgaggcaaactcttgcactacagaaaatgtcggtaggctgatcactcccgctaagaaactggaggacactattagactcgccgagctagtgatcgaggtgctccagcaaaacgaggagcaccatgcagagcctcatgtcgacaaaggagaagcatttgcttggtggagtgacctgatggtcgaacacgccgagacctttctctcactcttcgccgtggatatggacgctgcactggaagtgcaaccacccgatacatgggacagttttcccctgtttcagctacttaatgatttccttcggacagattataatctgtgcaacggcaaatttcataaacacttacaggacttgtttgccccactggttgtgcgctacgtcgatctgatggagagctccatcgcacaatcaattcaccggggattcgagcgcgagtcttgggagccagttaagagtttgacatccaacctgccgaatgttaacttacctaatgtcaatctgccaaaagtgcctaacttacccgtcaacattcccctaggtattccacaaatgccaacattttcagcccctagctggatggctgccatttatgatgcagacaatggtagtggtacctctgaggacttattctggaagttagatgctttgcagacgttcatccgagaccttcattggcctgaggaggagtttggaaagcatctcgaacagcggctaaaacttatggcatccgatatgatcgagtcctgcgtaaaacgcactcgtatcgcattcgaagtgaaactgcagaaaacatcgcggtccactgattttcgggtgcctcagtccatttgcacgatgttcaacgtgatggttgacgcaaaggcccaatctaccaagctttgttctatggagatggggcaggaaaagtacaagaaaatgaggcatcagtaccatagcaagattgacgagctcatcgaggagactgtgaaagagatgatcacattactggttgctaaatttgtaactatattagagggagttttagcaaaactctcaagatatgacgaaggaaccctattctcctccttcctgtcatttactgtgaaggcagccagcaaatatgtggacgtgcctaagccaggcatggatgtggccgacgcttacgttacgttcgttaggcacagccaggatgttctccgggataaagtgaacgaggaaatgtatattgagcggttgttcgaccaatggtacaacagcagtatgaatgtcatctgcacatggctcaccgaccgtatggaccttcaactccacatttatcagttgaagacactaattcggatggtcaagaaaacttaccgcgactttaggctgcagggtgtattagactctacactgaactcaaaaacttacgaaaccattcgtaacaggttgaccgtagaggaagccaccgcttccgtctcggagggcggtggcctccagggcatttcgatgaaagactcagacgaggaggatgaggaagatgactag

SEQ ID NO: 216421 - DNA, 4062 bp, synthetic construct
  misc_feature 1..4062: note = Description of Artificial Sequence: Synthetic coding sequence
  source 1..4062: mol_type = other DNA
atgttggacccatcatcttcagaagaagaaagcgacgagattgtggaggaagaaagcgggaaggaggttttgggaagtgctccttccggagcaaggttaagtccttcccgcacctccgaaggcagtgcagggtctgctggactgggcggaggaggagcgggtgcgggtgccggtgtgggtgccggtgggggtggaggcagtggtgcaagttcaggaggtggagctggcggtctgcagccttctagtcgggcaggcggtggcagaccgtcatcaccgagtcctagcgtcgtaagcgagaaggagaaggaggaattagagagattacagaaagaagaggaggaaagaaaaaaaaggctgcagctttacgtatttgttatgcgttgtatcgcatatccgttcaacgccaaacagccaacggatatggcacgaaggcagcagaaaatcagtaaacagcagctgcaaaccgttaaagacagattccaggcttttctaaatggagaaacacaaatcatggccgacgaagcttttatgaacgcagttcagagctactacgaagtgtttctgaagtccgaccgagtggctcgcatggtacaatccggcggatgctccgctaatgatagccgggaggtcttcaagaagcacatcgagaagcgtgtgagaagtttaccagagattgacggtctctcgaaagagactgtgcttagctcctggatggccaagtttgatgcaatttacagaggtgaggaagatccccgaaagcagcaggccagaatgacagcttctgctgctagtgagcttatactgtcaaaggaacagctttacgagatgtttcagaacatcctgggcattaaaaagtttgagcatcagttactgtacaacgcttgccagctggacaaccctgacgagcaggccgctcagatccgacgagagctcgacgggaggctccagatggctgatcagattgcccgtgagaggaagtttcctaaatttgttagtaaagagatggaaaacatgtacatcgaggagctgaagagttccgtcaatttactcatggctaatttggaatctatgccagtgtctaaaggtggagaatttaaactccaaaaacttaagcgctcccacaacgcttcaatcattgatatgggggaagaaagcgagaatcagttgagcaagagcgacgtggttctgtcgttttccctggaagtggtgataatggaggtgcagggcctcaagtccttggcaccaaacaggatcgtatactgtacaatggaggtcgaaggtggagagaagctgcagaccgaccaggccgaggcctcaaagcccacctggggtacccaaggtgacttctcaactacccacgctctcccggctgtgaaggttaagttatttactgaatcaacgggagtcctggctctggaagacaaggaactaggcagagtgatcttacaccctaccccaaactctcctaaacaatccgagtggcacaaaatgactgtctcaaaaaactgccctgaccaggatctgaaaatcaagctggctgtgaggatggacaaacctcagaatatgaagcactccggctatctgtgggccatcggaaaaaacgtgtggaaacgatggaagaaacgattcttcgttctcgtccaggtctcccagtatacatttgctatgtgcagttaccgagagaagaaagcagaaccacaggagctgttgcagctggatggatacaccgttgactacacggatcctcagcccggactggagggtggacgtgctttcttcaacgcagtaaaagaaggcgacacagttattttcgcgtcagatgatgagcaggataggatcctatgggtccaagctatgtaccgagccaccgggcagtcccacaaacccgtgcccccaacacaagtccagaagctgaatgctaaaggagggaatgtgccccagctggatgcccctattagtcagttttacgccgaccgtgcccagaagcatggcatggatgaattcatcagtagtaacccttgtaatttcgaccatgcctcactatttgaaatggtccagaggctgaccctcgatcataggctgaatgatagctatagctgccttggatggttcagccctggtcaggtttttgtgctcgatgaatattgcgccaggaacggtgtgcgagggtgccatagacatctgtgttacctccgggatctgttagagcgagcagagaacggggctatgatagatccaactctgctgcattactcattcgctttttgtgcttctcacgtacatgggaatcgcccagacggaatcggaacagtgactgtcgaggagaaagagaggttcgaagagataaaggagcgtctgcgagtgctgttagagaatcagattacccacttccgctactgcttccccttcgggaggccggaaggagctttaaaggctaccctcagtctcctggaacgagttctcatgaaagatatagtgaccccagtgccccaggaggaggtgaaaacggtgatccggaaatgtctggaacaagcagctctcgtgaattattcgcggctgtccgagtacgcaaagatcgaggaaaaccaaaaggatgccgagaatgttggaagactcatcactcctgctaagaaactcgaagatacgatccgactcgctgaactggtaatcgaagtcctgcaacagaacgaagagcaccatgccgaaccacacgtggataagggagaagcattcgcttggtggtccgatctgatggtggagcatgctgagacatttctctccctgttcgccgtggatatggacgccgcactggaggtccaaccccctgatacatgggattcttttcctctgttccagcttctgaatgactttctgaggaccgactacaacctttgtaatggaaaatttcacaagcacctgcaggacctttttgctcctctggttgtgaggtacgtggatctgatggagtcatctatcgcccagagcattcatagggggtttgaacgagaatcctgggagccagtgaaatcacttacctcaaatttgcctaacgtgaatcttcccaatgtgaatctgccgaaggtacccaatcttccagttaacataccgctcggcatcccccagatgccgaccttcagtgccccatcctggatggcagcaatctatgatgccgataatggcagcgggacttccgaagatctcttttggaaactggatgcgctgcagaccttcattcgggacctgcactggccagaagaagaattcggcaagcatctcgagcagcgcctgaaactcatggcatcagacatgatagaatcatgcgtgaagcgaacacgcatcgcatttgaggtgaaattacagaagacaagccggtctaccgactttcgcgtgcctcagtctatctgcactatgtttaatgtgatggttgacgcaaaggcccagtccaccaagttatgcagtatggagatgggacaggaacatcagtaccattcaaaaattgacgagttgattgaggagacagttaaggaaatgattacactgctggtcgcaaaatttgtgacgattttagagggagtgctggctaaactgtctagatatgacgagggaaccttattctcgagttttctgagtttcaccgtcaaggccgcatccaaatatgtggatgtacctaagcccggtatggacgtggctgacgcttatgtaacctttgtgaggcattctcaggacgtcctacgggataaggtcaatgaagagatgtatatcgaacgccttttcgaccaatggtataacagctccatgaacgtcatttgcacttggctgaccgacagaatggacctacagcttcatatctaccaattaaagacgttgatccgcatggtgaaaaaaacttacagggatttcaggcttcagggagtgttggattcaacgttgaattccaaaacctatgagaccatccgaaataggttgaccgtggaagaagctacggcaagcgtgtccgaaggaggcggtctgcagggtatcagcatgaaggacagcgacgaggaagatgaggaagatgactag

SEQ ID NO: 216422 - DNA, 1038 bp, synthetic construct
  misc_feature 1..1038: note = Description of Artificial Sequence: Synthetic coding sequence
  source 1..1038: mol_type = other DNA
taactgccgaacgttaatcttccaaacgtgaatctccccaaggtgcccaacctccctgtgaacatccctctcgggatccctcagatgcccacattttcagccccttcctggatggcagccatctacgatgcagacaacggttcagggacaagcgaggacctgttctggaaactagacgcactgcagactttcatccgcgatctccactggccagaggaggagtttggcaaacacctggaacaacgcctgaagctcatggcttccgatatgatcgaaagctgcgttaagcggacgagaattgcattcgaagtgaagctacaaaagacctccagatccacagatttcagagtgccgcagtccatctgcactatgtttaatgtcatggtggatgcaaaggctcaatctactaagctctgttctatggaaatgggccaggagtttgctaaaatgtggcatcagtaccacagcaagatcgacgagcttatcgaggagaccgttaaggaaatgatcaccctgctggtcgctaagttcgtgaccatacttgaaggcgtgctggcaaagctgtcccgatacgacgagggtacgctgttttctagctttctcagtttcaccgttaaggctgcctcgaagtacgttgacgttccaaagcccggaatggacgtagctgatgcctacgttacattcgtccgacatagccaggacgtcttgcgagataaggtaaatgaagaaatgtatattgagcgcttattcgaccagtggtacaatagctcaatgaatgtgatctgcacatggctaactgacagaatggacctgcagttgcatatttatcaactaaaaaccctgatccgtatggtcaaaaaaacttacagagattttcgcctgcaaggcgtgttggacagcaccctgaactccaaaacatatgaaaccatccgtaatcgacttaccgtggaggaggccacggccagcgtgagcgagggtgggggacttcagggcatcagcatgaaggactcggacgaggaagatgaggaagacgactag

SEQ ID NO: 216423 - DNA, 3768 bp, synthetic construct
  misc_feature 1..3768: note = Description of Artificial Sequence: Synthetic coding sequence
  source 1..3768: mol_type = other DNA
atgctagacccttccagctcagaggaagagtccgacgaaggactagaggaagaaagcagggatgtgctggttgccgctggttcctcccagagggcacctcctgcacctacacgagaaggtcgaagggacgccccaggaagagcaggtggtggcggagccgctaggtcggtcagcccttctccatccgtcttgagtgaaggccgagatgaaccgcaacgccagttggacgatgagcaggagcggaggatacgtctgcagctgtacgtcttcgtagttcggtgcattgcctatccttttaatgccaagcagcccaccgacatggctaggcgacagcagaagctgaataagcagcagctgcagcttctgaaggaacgattccaggccttcctgaatggtgaaactcagatcgtggctgacgaagcattctgcaacgcagtgagatcatactatgaagtctttctcaaatctgatagagtggcacggatggtgcagtcaggtggatgttcagcaaatgatttccgtgaggtctttaagaagaatatcgagaagagagtccggtccctgcccgagatagatggcttaagcaaggagacagtgctctcttcttggatcgccaagtatgatgccatttatagaggagaggaggacttgtgcaagcaaccgaatcggatggccctgagtgccgtttccgagcttatactgtcaaaagagcagttatacgagatgttccagcaaatccttggcataaagaagttggagcaccagctgctctacaatgcctgccagctggataacgccgacgagcaggctgctcagataagaagggaactcgatggaaggttgcagttagctgataaaatggcaaaagagaggaaattcccaaagttcatcgccaaggatatggagaatatgtatatcgaagaactgaggtccagcgttaacctgctcatggccaacttggaatccctgcccgtttccaagggcggtccagagttcaaactgcaaaagttgaagaggtcccagaatagtgcatttctggacataggagacgagaacgaaatacagctttcgaagtcggatgtcgtgttatccttcaccttggagattgtaataatggaagtgcagggactgaagtctgtggctcccaacaggatcgtctattgtacaatggaggtggagggggagaagctccaaacagatcaggccgaggctagtaggccccagtggggaacccagggggacttcaccacgacgcaccccagacccgtggtcaaggtaaagctatttacagagagcaccggagtgctggcgcttgaggacaaggaactcggtcgagtgatactttatcctacatcgaattcaagcaaaagtgctgaactccaccgcatggtggtccctaaaaattcccaggattccgatctgaaaatcaagttagctgtgaggatggataagccagcccacatgaagcattcgggctacctatacgccctcggccaaaaagtgtggaagagatggaaaaaaaggtatttcgtcctggtccaggtgtcccagtacacgttcgcgatgtgtagttacagggagaaaaagagcgagccccaagagcttatgcagctcgagggctatactgtggattacaccgaccctcaccccggactccagggagggtgcatgttcttcaacgctgtgaaagagggtgacacagtgatttttgccagtgacgacgagcaggaccgtattctgtgggtgcaggctatgtatcgcgctactggtcagtcatacaaacccgtgccagccatccaaactcaaaagctcaatcctaagggaggtactctgcacgcagatgctcaactctacgctgatagatttcagaaacacggtatggatgaattcatatctgcaaatccctgcaaactcgatcacgcatttctcttccgcatactgcagaggcagactctggaccaccgtttaaacgacagttattcctgcttgggctggttctcccctggacaggttttcgtactggacgagtattgcgctagatatggggtgcggggatgccaccggcacctgtgctacctggccgagctgatggagcattccgagaacggcgctgtgatagacccaactctgttgcactactcctttgccttttgtgctagccacgtccacgggaacagaccggatggcatcggcaccgtatccgtagaggaaaaagaacggttcgaagagatcaaggagcggttgagctcattactcgagaaccaaatttcacattttcggtactgttttccctttggcagaccagaaggcgctttaaaggcgactctctccctgcttgagagggtgctcatgaaagatatcgccacacccatccccgcagaggaagtgaagaaggttgttcgtaagtgtctggagaaagctgcgctcataaattacaccagattgacggagtatgcaaaaatcgaggaaaccatgaaccaggcgtcgccagcccgaaaactcgaagaaatccttcatttggcagaactctgcatcgaggtgttgcaacaaaatgaagagcatcatgccgaggccttcgcgtggtggccagacttgctggccgagcacgccgaaaagttttgggccctgtttactgtggacatggatacggcgttagaagcccagccccaggatagttgggattcatttccgctatttcagcttctgaataactttttacgtaacgacaccctcttgtgtaatggaaaattccacaagcacttacaggagattttcgtgcccctcgttgtgagatacgtggatcttatggagagctctattgcacagagcattcatcggggatttgagcaagaaacctggcagcctgtgaataatggttctgcgacatcggaagatctgttctggaaacttgacgccctccagatgtttgttttcgatcttcactggcctgagcaagaattcgcgcatcatctggaacagagattaaagctgatggccagcgatatgctcgaggcttgcgtgaagcggactagaacggccttcgagctaaagttgcagaaagcttcgaagacaaccgacctcaggatcccagcttcagtatgtaccatgttcaatgtcctagtggacgcaaaaaaacagagtaccaagctgtgtgcactcgatggcggacaggaggtatgtcgcatcttccagcagtatcatagtaaaatagatgacttaattgataattctgtcaaggaaattatttcactgctggtcagcaagtttgtctcagttctcgagggagtactgtcaaagctcagccgctatgatgagggcacatttttctcaagcatcctgagcttcacagttaaggcagccgctaaatacgtagacgtgccaaagcctggtatggacttagctgatacctatatcatgttcgtgcgccaaaaccaggacattttacgggagaaggtaaacgaggaaatgtacatcgagaagcttttcgatcagtggtactcttcttcaatgaaagtgatctgcgtatggttaaccgacaggcttgacctccaactccacatttaccagctcaagaccctgatcaaaatagtgaaaaagacctatagggacttccgcctacagggggtacttgagggcacacttaattcaaagacatacgataccgttcatagacggcttactgtagaggaggccactgcctcagtatcagaaggagggggtctccagggcataacaatgaaggactcagacgaagaggaggagggatag

SEQ ID NO: 216424 - DNA, 3885 bp, synthetic construct
  misc_feature 1..3885: note = Description of Artificial Sequence: Synthetic coding sequence
  source 1..3885: mol_type = other DNA
atgttagatccctcctctagtgaggaggagtctgacgaaggcttggaggaggaaagtagagacgtgctcgttgctgcaggctcttcccagagagccccacctgctcccacccgagaggggcgtcgcgatgctccaggacgcgctggaggaggtggcgctgcgcgatcggtatctcctagtccttccgtgctatcagaaggacgcgacgaacctcagaggcagctggatgacgaacaggagcgaagaattagacttcagctctacgtgttcgtagtacggtgtattgcctatccttttaacgccaagcagccaactgacatggcaagaaggcagcagaagcttaataagcaacagctgcagctcctcaaagagcgctttcaagccttcttgaacggagagacgcagattgtagcagacgaggccttttgtaatgctgtgcgctcttattatgaggttttcctcaagagtgaccgcgtggcaaggatggtccagagtggtggttgttccgccaatgactttcgagaagtgttcaagaaaaatattgaaaaacgcgtaaggtccctgccagagatagacggtctgagcaaagagacagtgttgtcttcatggatagcaaaatacgatgctatataccgtggtgaggaagatctgtgcaagcagcccaatagaatggctctatcggccgttagcgagctcattctgagcaaagaacagttatatgagatgtttcagcagatcctgggaatcaagaaattggagcatcagttgctgtacaacgcttgccagctggacaacgcggacgagcaagccgcacagatccgtcgggagctcgatggacgtctgcagctcgccgataagatggccaaagaacgaaaatttccgaagtttattgcaaaggatatggagaacatgtacatcgaggagctgcgatcttcagtgaatctgctcatggccaacctggaatctctgcctgtgtctaaagggggacctgaatttaagctgcaaaagctgaagcgatctcaaaattcggcttttttggatatcggtgatgagaatgagatccagcttagcaagtccgacgtggtgttgagttttaccttagagattgtgatcatggaagtgcagggcctgaagtctgttgccccaaaccgaattgtatactgtaccatggaggtcgagggcgagaaactgcaaacagaccaagcggaagctagcagaccccagtggggtacccagggtgatttcacaaccacccatcctcggccagtcgttaaggtcaagttgttcaccgaatctacaggcgtgctggcattggaggacaaggagttgggaagggtgatcctttatcctactagtaacagctctaaatctgctgaattgcaccgaatggtggtgcccaaaaatagtcaggattctgacttaaagataaaattggctgtgaggatggataagcccgctcacatgaagcattccggctatttatatgccctcggtcaaaaggtatggaagcgctggaaaaagcgctacttcgtgctggttcaggtcagccagtacacatttgctatgtgctcatatcgagaaaagaaatccgagccccaggagctgatgcaactagagggctacacagtcgattacactgaccctcacccaggccttcaggggggatgcatgttttttaacgctgtgaaagaaggagacacagttatctttgctagcgacgatgaacaggatcgcattctttgggtgcaggccatgtatcgtgccacggggcagagttataagccagtccccgcaattcagactcaaaaactgaatccaaagggtggcacacttcatgcagacgctcagctttctgagttcactgacgccgacagattccaaaagcatggcatggacgagttcatctcagccaacccatgcaagctggaccacgcgtttctatttaggatcctgcagcggcagaccttggaccacagactgaatgactcatattcttgccttggatggttctcaccaggacaggtctttgtgcttgacgagtactgtgcacgatacggagtaaggggttgccaccggcacctctgctatcttgcggagctaatggagcacagcgagaatggcgctgttattgatcccacacttctccactatagctttgctttctgtgccagtcacgttcacggcaaccgccctgatggtattggaactgtgtcagttgaggagaaagaacggtttgaagagatcaaagagaggctgtcttcactgctggagaaccagatcagccactttcggtattgcttccccttcgggcgaccagaaggagccttaaaggctacactctctctgctggagcgggtgctgatgaaggatatcgccactcccatccccgctgaagaggtcaagaaggttgtccggaagtgcctggaaaaggctgctctaatcaactacactcgcctgaccgaatacgccaagattgaagagacaatgaaccaggctagccccgctcggaagctggaagagatactgcacctggctgagctgtgcatcgaagtgctgcagcagaatgaagaacatcatgctgaagcatttgcgtggtggccagaccttctcgccgaacacgcagagaaattctgggctctgttcacagtggacatggacacagccctagaggctcagccgcaggatagctgggactcctttccactcttccagctgctgaataatttcttgcgaaatgatactcttttgtgcaatggcaaattccataagcatctgcaggaaatctttgtgccgttagtagtgagatatgtggacttaatggagtcttctatcgcgcaatctatccataggggcttcgagcaggagacctggcagccagttaagaatattgccaacagcctgccaaacgtggcattgcccaaggtcccatctctgcccctcaatctgccccagatccccaatatttcaaccgcttcttggatgcccagcctttacgaatccacaaacggatcagctacaagcgaggacctcttttggaagctcgacgcattgcagatgttcgtgttcgacctgcactggcctgagcaggaattcgcccaccaccttgagcagcggctaaagttgatggcctctgacatgctggaggcttgtgtgaagaggactcgtacagcatttgagctgaagttgcaaaaggcgagcaagaccactgatctgagaatccctgcttccgtgtgtacaatgttcaacgtgctcgtagatgctaagaagcagtctactaagctttgtgctctcgatggtggccaggagcaacagtaccactccaagattgacgacctgattgacaatagcgtgaaggagatcattagcctcctggtcagcaagttcgttagtgtcctcgagggcgtacttagcaaactctctaggtacgacgagggcaccttcttcagctctattctgagcttcaccgtgaaggccgcagctaagtatgtggatgtgcctaagcccggaatggacttggcagacacctacattatgttcgttagacagaaccaggatattctacgcgaaaaagtcaacgaggaaatgtacatcgaaaagctgtttgaccagtggtatagctcctccatgaaggtaatttgtgtctggctaaccgacaggctcgacttgcaattgcatatttatcaactgaaaactctgattaagatcgtaaaaaagacttaccgcgatttccgcctgcagggggtgctggaaggcaccctaaactctaaaacatacgacactgtgcataggaggctcaccgtcgaggaggccacagccagcgtcagcgaaggcggaggcctccagggcattaccatgaaagactcggatgaggaggaggagggctag

SEQ ID NO: 216425 - DNA, 1410 bp, synthetic construct
  misc_feature 1..1410: note = Description of Artificial Sequence: Synthetic coding sequence
  source 1..1410: mol_type = other DNA
atgaatcaggcatcacccgcaaggaaattggaagaaatcttacatctcgcagaactctgtatagaagtgctgcagcaaaatgaggaacaccacgcagagcttaggcatgctttcgcatggtggccagatctactggcggaacatgcagaaaagttctgggccctattcacagttgatatggacacggcgttagaagcccagccacaggactcctgggactcattccctttgtttcaactcttaaacaatttccttagaaatgacaccctactttgcaatggcaagtttcacaaacacctgcaggagatatttgtgccactagtggtgcgctacgtggacttgatggaatcaagcatagcacaatccatccaccgtgggtttgaacaagaaacctggcagcccgttaaaaacattgctaacagtctccctaatgttgccttgccgaaggttcctagtttaccgcttaacctcccgcagattccaaacatatcaacggctagttggatgccctccctgtatgaaagtaccaatggtagcgcaacgagcgaggatttattttggaaactcgacgctctgcagatgtttgttttcgacctgcactggcctgagcaggagttcgcgcatcacctggaacagaggctgaagttgatggcctcagacatgttagaagcttgcgttaagagaaccaggactgcattcgaacttaagttgcagaaggcttctaagaccactgacctgcgtattccagcctcagtatgtacaatgtttaacgtgctcgtggatgccaagaagcaaagcactaagttatgcgcgctcgacggaggtcaggaacagcagtaccattccaagatcgatgacctgatagacaactccgtgaaagaaattatctccctgttggtgtctaaatttgtctcagtgctggaaggagtcctctctaagctctccagatacgacgagggcactttcttctcttcaattctgtcatttacagtgaaggcggctgcaaagtacgtggatgtgccaaaaccgggtatggaccttgccgacacctatattatgttcgttcgccagaatcaggacatcctgcgcgagaaagtcaacgaggagatgtacatagagaagctcttcgaccagtggtactcaagcagcatgaaggtgatttgtgtttggctcactgatagactcgacctccaattgcacatctaccaactcaagacacttataaagatagtaaaaaaaacctatagagactttcgcctccagggggttttagaagggaccctgaacagtaagacctatgacaccgtacatcgcagattgactgtggaggaggctactgccagtgtctccgaaggagggggtctgcagggcatcactatgaaagattccgatgaggaggaagagggatag

SEQ ID NO: 216426 - DNA, 2700 bp, synthetic construct
  misc_feature 1..2700: note = Description of Artificial Sequence: Synthetic coding sequence
  source 1..2700: mol_type = other DNA
tgagaaatccagctgtctaaatctgacgttgtgctgtcgttcaccctggaaattgtgattatggaggtgcagggccttaaaagcgtggctcctaatcgcatcgtatattgtaccatggaggtcgaaggcgagaagctccagactgaccaagctgaggcgagccggccacagtggggtacacagggcgactttacaacaacccacccaaggccagtagttaaagtcaaactatttacagagagcaccggtgtgctggcactcgaagataaagagctaggtagggtgattctctaccccacatctaacagcagcaagtcagccgaactgcacaggatggtagtccctaagaactcccaggatagtgatctcaagataaaattagcagtccggatggacaagcccgctcacatgaagcactcaggatacctgtacgcactgggtcagaaggtgtggaaacggtggaagaagagatactttgtgttagtgcaagtgtctcagtatacttttgccatgtgtagctacagagagaagaagtccgagccacaggaactgatgcagcttgaagggtacaccgtagattatacagatcctcatcccggactacaaggcggttgcatgttctttaatgctgttaaggagggagacactgttatttttgcctcagatgatgagcaagatagaatcctgtgggtccaggctatgtaccgtgcgaccggacagtcctataagccagtgcctgcaattcagactcagaagctcaatccgaagggcggaacgctccatgctgatgcgcagttatatgccgaccgctttcagaagcacggtatggatgagttcatatcggctaacccttgcaaattagatcatgccttcctcttccggatcctgcaaaggcagactcttgatcatcgcctgaatgacagctacagttgcctcgggtggttcagtcctggccaggtgtttgtgctggatgagtactgtgctcgctacggagtgaggggctgccaccgacacttgtgctacctggcggaactgatggaacattccgaaaacggggctgttatcgaccccacgctgctgcactattctttcgctttctgcgcatcccacgttcacgggaatcggccagacgggataggcactgtcagcgtcgaagagaaggagcgcttcgaggagataaaagagaggctgagttctcttcttgagaatcagatatcccactttaggtactgtttcccattcgggagacctgaaggggctctcaaggctaccctgtctctgctggagagagttctaatgaaggacattgccacccccattccagccgaagaagtgaagaaggtggttcgaaaatgcctcgagaaggccgctctgatcaattacaccaggctcaccgagtatgcaaaaatcgaggagacgatgaatcaggctagtccagcaaggaagcttgaggaaattttacacctggcagaactgtgtattgaagtccttcaacaaaacgaagagcatcatgccgaagccttcgcatggtggccagatctcctggctgagcacgcagaaaaattctgggctttattcactgtggatatggacacagcactagaggcacaaccgcaggactcctgggactccttccccttatttcaactgctgaataattttctaagaaatgacactttgctctgcaatggaaaatttcacaaacatctccaggagattttcgtcccgctggtcgttcgctacgtggatctgatggagtcctcaatagcacagtccattcaccggggtttcgagcaggagacctggcaaccggtcaataacggctccgccacctccgaggacctgttttggaagctcgacgctttgcagatgtttgtgtttgatctacattggccagagcaagaattcgcccaccatctggagcagagactgaaactcatggccagcgacatgctggaggcctgcgtaaagcgcacccgcacagccttcgagctgaaactccagaaggcgtctaagacaacagatttgagaatccctgcttccgtgtgcacaatgtttaatgtgttggtagatgccaagaaacaaagtactaagctctgcgccctggatggtgggcaagaacagcagtaccatagcaaaatagatgatctgatcgataattcggtcaaagaaataatctcactgctcgtatcaaaatttgtgagtgtgctggaaggagtgctgagtaaattgagccgatacgatgagggaacattctttagctccatcctgtccttcacagtcaaggccgcagcaaagtacgtggatgtgcccaaacctggtatggacctggccgatacctacatcatgttcgtgcggcaaaaccaggacatcctaagggaaaaggtgaacgaagaaatgtacattgagaaactgttcgaccagtggtactcctccagtatgaaggtgatttgcgtgtggctgacggatcggcttgatctgcagctgcacatctaccaattgaagactttgattaagatcgttaagaagacctatcgggattttcgcttgcagggggtgctggagggaactttgaacagcaaaacttacgacaccgtgcaccggaggcttactgtggaggaggccacagccagtgtgtccgaaggaggtggattacaaggaataactatgaaggattctgatgaggaagaggaagggtag

SEQ ID NO: 216427 - DNA, 3768 bp, synthetic construct
  misc_feature 1..3768: note = Description of Artificial Sequence: Synthetic coding sequence
  source 1..3768: mol_type = other DNA
atgctggatccatcatcaagtgaggaagagagcgacgaaggcctggaggaggagtcacgagatgtcctggtggctgccggaagctcccagcgagcgcctccagcccctacccgggagggacggcgtgacgcccctggccgtgccggagggggaggcgcagctagatccgtgtcacccagccccagcgtgctgagtgagggcagagatgaacctcagcgccagctggacgacgaacaggagcgcaggattcgcctgcagctatacgtcttcgtcgtgcggtgtattgcataccccttcaatgcaaagcagccaacagatatggcaagaagacagcagaagctgaacaaacagcagctgcagctgctgaaagagagatttcaggcatttctgaacggggagacccaaatcgtagcggatgaagctttttgcaacgccgtgcgctcctactacgaggtattcctgaaaagcgaccgagtggctcggatggtacaatctggagggtgctcagcaaatgattttcgtgaggtattcaagaagaatattgagaagagagtgcgcagtttaccggaaatcgatgggctgagcaaagaaactgttctgtcatcttggattgcgaagtatgatgctatataccggggagaagaagacctatgtaaacagcccaacaggatggccctgagtgctgtgtccgaactgatccttagtaaagagcagctctacgaaatgtttcagcagatactggggattaagaaacttgagcatcagctcctctacaacgcttgccaactcgataacgccgatgaacaggcagcccagattcggcgtgagttagatggaagactacaactcgcggataagatggctaaagagcgcaagttccccaagtttatagcgaaggatatggagaatatgtacatcgaggaactcaggtccagcgtgaatttgctgatggcaaacctggaatctttacccgtgagtaaagggggtcctgagtttaagctgcagaagttaaagcgttcccaaaacagcgctttcctggatatcggggatgaaaacgaaatacagctgtctaaaagcgatgttgttttgagctttacgctggaaatcgtcattatggaggtgcagggtttgaagagtgtggccccaaatcggattgtttattgcactatggaagtggagggcgagaagctccaaaccgaccaagctgaggccagccggccacagtggggcacccaaggggatttcacaactacacaccccaggcccgtcgtgaaggtgaagctattcaccgaatccacaggagtgcttgccctggaggataaggagcttggacgagtgattttataccccacaagcaactccagcaagagcgcagaacttcatcgcatggttgtacctaaaaacagccaggattctgaccttaagattaagctggccgtgcgtatggataagccagcgcacatgaaacatagcggttatttgtacgcacttggtcagaaagtgtggaaaaggtggaagaaacggtacttcgttttggtgcaggtttcacagtacacgtttgctatgtgcagctacagagaaaaaaagtctgaaccacaggaacttatgcagctggagggttatacagtcgattacactgaccctcacccaggactgcagggtggctgcatgttcttcaacgccgtcaaagaaggcgacactgtgatattcgcttccgacgacgaacaggacagaatcctgtgggtgcaggctatgtatagagccaccggccagtcctataaacctgtgcctgcgatccagacacagaagttgaatcccaaggggggtaccttacatgcagatgcgcagctctacgctgaccgtttccagaagcacgggatggacgaattcattagtgctaacccttgcaagctcgatcacgcattccttttcaggattctccaaaggcagaccctggaccaccgactgaacgactcttatagttgcctgggctggttcagtcctggacaggtgtttgtgctggacgaatactgtgcccgatacggggtgagaggatgtcacagacacttatgctacctggccgagctgatggagcactctgagaatggggcagtgatcgatcccaccctcctacattattcgttcgcattttgcgcatctcatgtgcacggaaaccggccagacggcattggaacagtctccgttgaagaaaaagaacgctttgaggagattaaggaacgactttcctcattgctggagaaccagatcagccattttcggtattgctttccattcggcagaccagaaggcgcactgaaggcaaccctgtctcttcttgaacgggtgctaatgaaggatatcgctactcccatacccgcagaggaagtgaagaaggtggtcagaaaatgcctggaaaaggctgcacttatcaactatacccgcctgacagagtacgcgaagattgaggagacaatgaaccaggccagtcctgccaggaaacttgaagagatccttcatctggcagagttatgcatcgaggtcttacagcagaacgaagagcatcatgccgaagcattcgcctggtggcctgacttgctggcagaacatgccgagaaattctgggcattgttcactgtcgatatggacactgctctcgaggctcagccccaggatagttgggactcatttcccctgttccagctgctaaataatttcctgcgaaacgatactctgctgtgcaatgggaagttccacaaacacctgcaggaaattttcgttcccctggtcgtcaggtacgtcgacctcatggaaagctctatcgcacaaagtatacatcgcggattcgagcaagagacttggcagccagttaataatggcagcgccacatctgaggacctgttttggaagctggacgctctgcagatgttcgtttttgatctccattggccggagcaggagttcgcccaccacctggagcagcgtctgaaactcatggcctcagacatgttggaggcgtgcgtgaaaagaactaggactgctttcgaactcaagctgcagaaggcctccaagactaccgatctgcgcatcccggcttccgtctgcaccatgttcaacgtcctggtggatgcaaagaagcagagcaccaagctttgtgcgcttgacggcggacaggagtttggttcccaatggcagcagtaccattccaaaattgacgacctgattgacaactcggtcaaagagatcatttccctgcttgtgtccaagtttgtttctgtgctcgaaggcgtcttaagcaagctctcgagatatgacgagggcaccttttttagctccattctgtcatttactgttaaagctgctgcaaaatacgtcgacgtccctaagccaggaatggacttagcagatacttacataatgtttgttcgacagaatcaagatatcttgcgcgaaaaggttaacgaagaaatgtacattgagaagctctttgaccaatggtactcaagcagtatgaaggtcatctgtgtgtggttgactgatagactcgacctgcaattacacatataccaactgaagaccctgattaaaatagtgaagaaaacctatcgggactttcgcctgcagggggtactcgaaggaacactgaacagcaagacctacgacaccgtgcaccgaaggttgacagttgaagaagctacagccagcgtaagcgaggggggtggcctacaaggcataacaatgaaagacagcgatgaagaagaggaggggtag

SEQ ID NO: 216428 - DNA, 3906 bp, synthetic construct
  misc_feature 1..3906: note = Description of Artificial Sequence: Synthetic coding sequence
  source 1..3906: mol_type = other DNA
atgctcgacccatcctcaagtgaagaggagagcgacgaaggcctcgaagaagaatcccgcgacgtcctggtggctgccggaagcagccagcgcgctcccccagccccaacccgcgaaggcagaagagatgctccaggacgggcaggaggcggtggggctgctagatcggttagccccagcccatctgtgctgtctgagggtcgtgatgaaccccagagacagcttgatgatgagcaggagcgcaggatcagactccagctgtacgtgtttgtggtcaggtgcatagcttaccctttcaatgctaagcagccgactgatatggccagaagacaacagaaactgaacaaacagcaacttcagctgctgaaagagagattccaggccttccttaatggcgagacccagattgtagccgacgaagccttctgcaacgcagtgaggtcgtactatgaagtctttctcaaatcagacagagtggccaggatggtccagtcaggcggatgttcggctaacgattttcgggaggtttttaaaaagaacatcgagaagcgggtccgtagcctcccagagattgacggattaagtaaggaaacggtgctgtcaagttggatcgctaaatatgacgcaatctaccgcggtgaggaggacttgtgcaaacagcccaatcggatggccttgtctgcagtgtccgaacttatcctatcgaaagagcaactctacgagatgttccagcaaattctcggtattaaaaagctcgagcaccagcttctgtataacgcgtgccagctggacaacgccgacgagcaggccgcacagattaggcgtgaactggacggccgtctgcagttggccgacaaaatggcgaaggagcgcaaattcccaaagttcattgctaaggatatggaaaatatgtatatcgaggaactgcgtagctcagtgaatttattaatggcaaacctggaatccttacccgtgtccaaaggcggtccagaattcaaactgcaaaaattgaaacgctcgcagaatagcgcttttctagacattggtgatgagaatgagatccagctctccaaaagcgatgtagttctaagcttcacattggaaatcgtgataatggaagtgcaggggctgaagagtgtcgcgccaaaccggatcgtctactgtacgatggaagtcgagggagagaaactccaaacggaccaagctgaggcgagccggccacagtggggcactcaaggcgactttactacgacccatcctagaccggtggtaaaagtcaagctgttcactgagagtacgggggtgttggctttggaggacaaggagctcgggagggttattctctacccaacatctaattcttctaaaagcgcagagcttcaccgcatggtcgttcccaaaaactcacaggacagtgatctgaagattaagttggccgtgcggatggacaagcccgcacatatgaaacactccggctatttatatgccttgggccagaaggtgtggaagcggtggaaaaagcggtacttcgttctagtacaggtgagtcagtatacttttgctatgtgcagttacagggagaaaaaatctgagcctcaagagctgatgcagcttgaagggtacacagtggattatacagacccacatcctggcctccagggaggatgtatgttttttaacgcggtcaaggagggtgatactgttatatttgcatctgacgatgagcaggatcggattttgtgggtgcaagctatgtaccgcgctactggccagagctataagccagtgccagccattcagacccagaaattgaaccctaagggaggcacactccacgccgacgcccagctcagcgagtttaccgacgccgacaggtttcagaagcatggcatggatgaattcatttccgccaacccatgcaagctcgaccacgccttcctattccggatattacagaggcaaaccctggaccaccgcttgaatgatagctatagctgtttaggctggttttctcctggccaagtgttcgtgcttgacgaatactgcgctcggtacggtgtaagaggctgccaccgtcatttgtgctaccttgccgaactcatggaacactctgagaatggcgctgttatcgatcccacactgctacactactccttcgctttttgtgccagccatgtgcatggcaaccggccagatggaatcggcaccgtttccgtggaggagaaagaaaggttcgaggagattaaagagaggctgtcttccctgctggaaaaccagatatcccactttaggtattgtttccctttcgggagacccgaaggagctctgaaagccacactgtcgctcctggagagggtgctaatgaaggacattgcaacaccaatccctgctgaggaggtgaaaaaggttgttagaaagtgtctcgaaaaggccgcactgataaattacacccgcttaaccgagtatgccaagatagaggggcctgccgaaaaagagaccgaaacaatgaatcaggcctctcctgccagaaagctggaggagatcttacatctcgccgagctgtgcatagaggtgctgcagcaaaacgaggagcatcatgccgaggcctttgcttggtggcccgacctgctggctgaacatgctgaaaagttttgggctctgtttacagtggacatggacacggctcttgaagcacagccccaagacagttgggattcttttcccttgttccagctgctgaacaactttctgagaaacgatacccttttgtgtaacggcaagtttcacaaacacttgcaggagattttcgtgccactggtcgtaaggtatgttgacttaatggagtcatctatcgctcagagtattcaccggggattcgaacaggaaacttggcagcccgtgaagaatatcgccaattcgctgccaaatgtcgccttgcccaaagtgcctagtctgccgctgaatctgccgcagattcctaatattagcaccgcttcatggatgccatccctgtacgaatccacaaacgggagcgcaacgtccgaagatctcttttggaagttggacgcgctgcagatgtttgtcttcgatctacactggcctgaacaggaattcgctcaccacctagagcagagactcaaactgatggcctcagatatgctagaggcatgtgttaagaggaccagaaccgcgttcgagctgaagttacagaaggcatcaaagactactgacctgaggatcccagcatcagtctgcaccatgtttaacgtgttagtcgatgccaaaaagcaatccactaaactgtgtgcattggacggtgggcaggagcaacagtaccacagcaagattgatgatttgatcgacaacagcgttaaggagatcatatctctcttagtgtctaagtttgtgtcagtgttagaaggggtcctgtcaaagttatcccgctatgatgaggggacatttttctcatccattttgtcttttaccgtcaaggctgccgctaaatacgtagacgttcctaagccagggatggacctggccgacacttacatcatgtttgtcagacagaaccaggacatcctgcgcgaaaaggtcaatgaggaaatgtatatcgaaaaactcttcgaccagtggtactcttctagcatgaaggtcatctgcgtctggctcacagatcgcctggacctgcaactgcacatctaccagcttaaaaccctgattaaaatcgtcaagaaaacctaccgagattttcggctgcaaggagtgctggagggcacactgaatagcaaaacatatgatactgtccacagacggctaaccgtggaggaggcgaccgctagcgtctcagaagggggtggactacagggcatcaccatgaaagactcagacgaagaggaagaaggctag

SEQ ID NO: 216429 - DNA, 3891 bp, synthetic construct
  misc_feature 1..3891: note = Description of Artificial Sequence: Synthetic coding sequence
  source 1..3891: mol_type = other DNA
atgctcgacccctcttcctctgaggaggaatcggacgagggtctcgaggaggaaagccgggatgtgttggtggccgctggcagcagccaacgtgccccaccggctccgaccagagagggccgaagggacgcccctggccgagcaggtggaggcggagccgctagaagtgtttccccatccccatcagtgctgtcagagggcagagatgagcctcagagacaactggacgacgaacaggagcgtaggatccggctgcagctgtacgtatttgtggtccgatgcattgcgtatccctttaacgcgaaacagccaactgatatggcacggcgtcaacagaagttgaataagcagcaactgcagctacttaaagaacgctttcaggcgtttttgaacggcgagactcagattgtggctgatgaggccttttgcaatgccgtgcgctcctattacgaagtgttcttgaagagcgatagggttgccagaatggtccagtctggaggatgtagtgctaatgactttagagaggtgttcaaaaagaacatcgagaagcgggtccgcagtctgccggaaatcgatgggctctcgaaggagactgtgctgagttcttggattgctaaatatgacgctatctatcgtggagaagaggacttatgcaaacaacctaatcggatggctctgtccgcggtgtcagaattgatcctcagtaaagaacagctatatgaaatgtttcagcagatactgggtattaaaaaactagaacaccagctgctgtacaatgcctgccagctggataacgctgatgagcaggctgcccaaatcagacgggagcttgacgggaggctccagctcgcggataagatggctaaggagcggaaatttccgaagtttatagctaaggatatggagaatatgtacatcgaagaattaaggagctctgtcaatctcttgatggctaacctcgagtcactccccgtgtcgaagggagggccagaatttaaactgcaaaagctgaagcgcagtcaaaacagcgcatttttagacataggagacgagaacgagattcagctcagcaaatcagacgttgtgctttccttcactcttgaaatcgttatcatggaagttcagggcctgaagtctgtggcccctaacaggattgtatactgcaccatggaagttgagggagaaaagctgcagaccgaccaagccgaggctagccggccacaatggggcacccagggtgatttcaccactacccaccctcgcccagtggtgaaagttaaactgttcaccgagtctacgggcgtcctagccttagaggacaaggagctggggagggtgatcctttatcccacttccaacagctccaaaagcgcggaattgcaccggatggtggtccccaagaattcccaagatagcgacttgaaaataaagctggctgtgagaatggataagcctgctcacatgaagcattccgggtatttgtatgccctaggccagaaggtgtggaaacggtggaagaaaagatatttcgtgctggttcaagtctcccagtacaccttcgcgatgtgttcttatcgcgagaagaagtctgagccacaagaactgatgcagctcgaaggttacaccgtagactacactgatccacaccccggtctgcagggaggttgcatgttcttcaacgctgtgaaagagggggacactgtgatttttgcctccgatgacgagcaggatagaatcctttgggtacaggccatgtacagagctactgggcagtcctataagccagtgcccgcaatccaaacacagaagctcaatcctaaaggcggtaccctgcacgctgacgcgcagctcagtggcaaagatgcagatcggtttcagaaacatggcatggacgaattcatttccgctaatccttgtaagctggaccatgccttccttttccgaatactgcagcgccagaccttagatcacaggctcaatgacagctactcatgtttggggtggttttctccgggtcaagtcttcgtgctggatgaatattgcgcacggtacggcgtgcgcggttgccaccgacacctttgctatcttgcagaactcatggaacacagtgaaaatggcgcagtcatcgacccaaccctgctccactattcgtttgccttttgcgcgagccatgtccacggaaataggccagatggtataggtactgtgagcgtcgaggagaaggaaagatttgaagagataaaggagcggttgtcttctctgctagaaaaccagattagtcatttccggtactgttttccattcggcaggcccgagggagccttgaaggccactctcagcctcctggaacgcgtgttgatgaaggacatagctacacccattcccgcagaagaggtcaaaaaggttgtaaggaagtgtctggaaaaggctgcactgatcaattatactagactcacagaatatgctaaaattgaggagacaatgaatcaagcttcccctgcaagaaagctggaagaaattctgcaccttgctgaattgtgtatcgaagttctacagcaaaacgaggagcatcacgccgaagggagggaggcctttgcatggtggcctgacctgttggccgaacatgccgaaaagttttgggcgttgtttaccgtggacatggacaccgctttggaggctcaaccccaagattcttgggacagtttcccgctgttccagctgctcaacaatttcctgcgcaatgatactttactgtgtaatggcaagtttcacaagcatctccaagagatctttgtgcctctggtcgtgagatacgttgatttgatggagagctccatcgcacagagtattcacaggggtttcgaacaggagacatggcaacccgtgaagaatatcgccaactccttacctaacgtagcccttcccaaggttccttcattgcctctcaacttacctcagataccaaacatttccaccgcatcctggatgccaagcctatacgagtccacaaatggctcagcgacctccgaggacctgttctggaagctggacgcactgcagatgtttgttttcgacctgcattggcccgagcaggaatttgcgcaccacctcgaacagaggttgaagctcatggcctcagacatgctcgaggcttgcgtgaagcgaaccagaacagcttttgaactgaagttgcaaaaagccagcaaaacgaccgacttgagaatcccagcatctgtttgtactatgtttaacgtcctggtcgacgccaagaaacagtctactaaactgtgtgccttagatggcggtcaagagcagcagtatcacagcaagatcgacgaccttatcgacaattccgtcaaagagattatctcactgctcgtctccaaattcgtcagcgtgctggaaggagtgctcagtaagctgtccaggtacgatgagggtacattcttttcttccatcctcagcttcacggtcaaggcggcagcaaagtacgtggatgtgcccaaacccggaatggatctggcagacacttacatcatgtttgtgcgccagaatcaggacatactgcgagagaaggttaacgaggaaatgtatatcgagaagttgttcgatcagtggtattcaagttccatgaaagtaatttgtgtatggttgactgacaggttggatctgcagctgcacatctatcagcttaagaccctgattaagatcgtgaaaaagacataccgagattttagacttcagggtgttctggagggtacactcaactctaaaacctacgacaccgtgcatcggagacttaccgtcgaagaagccacggcaagcgtaagtgaggggggtggactgcaggggatcacaatgaaggacagcgatgaagaagaggaggggtag

SEQ ID NO: 216430 - DNA, 1473 bp, synthetic construct
  misc_feature 1..1473: note = Description of Artificial Sequence: Synthetic coding sequence
  source 1..1473: mol_type = other DNA
tgatacacccggcttaccgagtacgctaagattgagggaccggctgagaaagagacggagactatgaaccaagcctcccccgcacgcaagttagaggaaattctccacctcgctgagctttgtatcgaggtactgcagcagaatgaggagcaccacgctgagggaagagaagcttttgcctggtggccagatctgctggctgaacacgccgagaaattttgggccttgttcaccgtggatatggatacagctctagaggctcagcctcaggattcttgggactcattccctctttttcaactgttaaataactttctgcgcaacgatactctcctgtgtaacggcaaattccataagcatttgcaggaaatttttgtccctcttgtggttcggtatgtggatcttatggaatctagtattgcccaaagcatccaccgtggcttcgaacaggaaacatggcagcccgtgaaaaacattgctaactctctcccaaacgtggccctaccaaaagtaccctctctacccctgaatctgcctcaaattcccaatataagcacggcaagctggatgccaagcctttatgagagcacgaatggtagtgctaccagcgaagatctcttttggaagttggatgccctgcagatgttcgtgttcgacttgcactggcctgaacaagagtttgcacatcacctggaacaaagacttaaattaatggcctcggatatgttggaggcctgcgttaagagaactcgaacagccttcgagcttaagcttcagaaggctagcaagacgacggacctgcggatccccgcatccgtatgcaccatgtttaatgttcttgtcgacgctaaaaagcagtctaccaagctgtgcgccctcgatgggggacaggagcagcaataccacagtaagattgacgacttaattgataactccgtcaaagagatcatcagtctgttagtgagcaagttcgtgtcagttctggagggtgtgctctctaagctcagtcgatatgacgaaggcactttcttttccagtattctaagtttcacggtgaaggctgccgctaaatacgtggacgtgccgaagccagggatggatctagcagatacttacatcatgtttgtgagacagaaccaagacatcctgcgcgagaaagtcaatgaggaaatgtacatagagaagctttttgaccaatggtatagcagctcaatgaaggtcatctgcgtgtggctgactgataggctcgatctgcagctgcacatctatcagctcaagactcttattaagattgtcaagaagacttatagagatttccgccttcagggtgtactggagggaaccctgaacagcaagacttacgataccgtccatagaaggctgacagtggaagaggcaaccgcgagtgtctcagagggtgggggtcttcaaggcattaccatgaaagattcggatgaagaagaagaaggctag

SEQ ID NO: 216431 - DNA, 3669 bp, synthetic construct
  misc_feature 1..3669: note = Description of Artificial Sequence: Synthetic coding sequence
  source 1..3669: mol_type = other DNA
atgctagatcctagttctagtgaggaagaatctgacgagggtcttgaagaggagtcccgcgatgtgctggtggctgccggatcgtcccagcgcgctccgccagcacctactagagagggccagctcgacgatgaacaggagcggcgaatccgcctgcaactgtatgtgtttgtggtacggtgtatcgcctatccgtttaacgccaagcagcctacagatatggctagacgccaacagaagcttaataaacagcagctgcagcttctcaaggagcgatttcaggcctttttaaacggcgaaacccaaatcgtggccgacgaggctttttgcaatgcggtgcgttcctattatgaggtgtttctgaaatccgaccgtgttgctcgcatggtgcagtccggtgggtgcagcgcaaatgacttccgggaagtcttcaagaaaaatattgaaaagagagtcaggtccctccctgagatcgacggactaagcaaggaaacggtcctctctagttggatcgccaagtacgacgctatctaccgcggtgaagaggatctctgtaagcagcctaacaggatggctctgtccgccgtgagtgaactcatcctgtccaaagagcagctctatgaaatgttccagcaaattctcggaatcaaaaagctggagcatcagctgttgtacaatgcatgccagttggacaacgccgacgaacaggcggctcagataagacgggagctggatgggaggttacagctggctgacaaaatggccaaggaacgtaaatttcccaagtttattgcaaaagatatggagaacatgtacattgaggaactccgctcttcggtgaatttattgatggcgaatctggaatccctcccagtttcgaagggaggcccagagtttaagttgcagaagctgaagcggagtcaaaactcagcatttttagacattggcgacgaaaatgaaatacagttgtccaaaagtgacgtggtgctatctttcaccctggagattgtgatcatggaagtgcaggggctaaagagtgttgctccgaacagaatcgtctactgcactatggaagtcgagggcgagaagctgcagactgatcaggccgaagccagcagaccacaatggggaacccagggagatttcacaaccacccatcccagacctgtggtcaaggtaaaactgttcactgaaagcaccggggtgctggccctggaagataaagagctcgggagagtgatcctgtaccctactagcaattcttcaaaatccgctgagctacatagaatggtggtgcccaaaaatagccaggacagcgacctgaagatcaaattggccgtccgtatggataaacccgctcacatgaagcactcaggctatctttatgcccttggacaaaaggtgtggaaaagatggaagaaaagatattttgttctggtccaggtgtcccagtatacctttgctatgtgctcttatcgagagaaaaagagtgagccacaagagctgatgcagctcgaagggtatacagtggactacacggatccacatccaggactccagggtggctgcatgtttttcaatgcggtgaaagaaggggatactgtgatcttcgcctcagacgacgaacaagatagaattctctgggttcaggcaatgtatagagcaacgggccagtcctacaagcctgtgcctgcaatccagacccagaagctcaatcctaagggtggcaccctccacgcggatgcacagctttacgcagatagatttcagaagcatggcatggatgagtttatttcagcgaacccttgcaagctggaccatgctttcctctttcggatattacagcggcagacactcgatcacagattaaatgactcctattcttgcctcggatggttttcgccaggccaagtctttgtcctagacgaatactgtgccagatacggagtgcgaggttgtcaccgccacctctgctacctcgctgagttgatggagcatagcgagaacggggcagtcatcgatcctactctgcttcattactcttttgcattttgcgcgtcccatgtgcacggaaacagaccggatgggattggaactgtctcagtcgaagagaaagagcggttcgaggaaattaaggaacggctatcatccttgttggaaaatcaaatctctcacttcagatactgcttcccctttggacgcccagagggcgctctgaaagccaccctcagccttctggaacgagtactgatgaaggatatcgccacgccaatccctgctgaggaggtaaagaaagtggtgcggaagtgtttagagaaagccgcactgattaactatactaggctcactgagtacgcaaagatcgaggagactatgaatcaggcctcccccgcacgaaagttggaggaaattctgcacttagccgaactgtgcattgaagtgctgcagcagaatgaagaacatcacgcagaggcctttgcgtggtggcctgacttgctggcagagcacgccgagaagttctgggcgctcttcacagtcgacatggacacagctcttgaggcccagcctcaagatagttgggatagcttccctctgttccaactgttaaataatttcctcaggaatgacacgcttctgtgcaacggcaaatttcacaagcatttgcaggaaattttcgtgcccctagtcgtacgttacgtggatctgatggaaagctctatcgcacagagtattcatcgcggtttcgaacaggagacctggcagccagtaaacaatggcagcgccacttctgaagacttgttctggaaactggatgccctgcagatgtttgtgtttgacctgcattggcctgaacaggaatttgcacatcatctggagcagcgtctaaagctgatggcctcagacatgctagaagcatgtgtaaaacgaacgaggaccgcttttgagctcaagctgcagaaagcctccaaaacaacagatttacgcatcccagcctccgtgtgcacaatgtttaacgtgttggttgacgccaagaagcaatcaacaaagttatgcgctcttgacggtggccaagaattcggatctcaatggcagcagtaccatagcaagattgatgatctgatagacaatagcgttaaagaaattatttcactcctcgtgtccaaatttgtctcggtgctggagggagtgctctcgaaactgtcacgttatgacgagggcacattcttcagcagtatcctcagcttcaccgtgaaagctgccgctaagtacgtcgacgtgcccaagcccggaatggacctagcagacacgtacatcatgttcgtgaggcagaaccaggatatccttagagagaaagttaacgaggagatgtacatagagaaactctttgaccagtggtacagcagtagcatgaaggtgatatgtgtgtggctgactgacagactggacctacagctgcacatttaccaactcaaaacactgatcaagatagttaaaaagacctacagagacttcaggctgcaaggcgtgttagaaggcaccctcaattctaagacctacgacacagtgcaccggaggttgactgtggaagaagccaccgctagcgtgtccgagggaggtgggctgcagggcataactatgaaagactcagatgaggaagaggagggttag

SEQ ID NO: 216432 - DNA, 2367 bp, synthetic construct
  misc_feature 1..2367: note = Description of Artificial Sequence: Synthetic coding sequence
  source 1..2367: mol_type = other DNA
atgactattcaccagttcttgttgctgttcctgttctgggtttgcctacctcacttttgttcccctgagatcatgtttcgccgtactcccgtgcctcagcaacggatcctgagctccagggtccctagaagtgacggaaaaatactgcatagacagaagcggggttggatgtggaaccagttttttctgttagaggagtacacagggtctgactaccaatatgtgggcaagctccactcggaccaggataagggagatgggtcgctaaagtatatactgagcggcgatggcgctggaaccctcttcattatcgatgagaaaacaggcgatattcacgccacgagacgcattgaccgcgaagaaaaagccttttacaccctgcgcgctcaagcaatcaaccggaggactctccggccagtggagccagaatccgaattcgtgatcaagattcacgacatcaatgacaatgagccaacatttcccgaggaaatttacactgcctcagtccccgaaatgagcgtggtgggcacttcagtagtgcaggtgacagctactgatgccgacgatccatcatacggcaatagcgccagggttatatattccatcctgcagggccagccgtactttagcgtcgaacctgaaaccgggatcatcaggactgcgttacccaacatgaaccgggaaaaccgagagcagtatcaggtcgtgatccaagcgaaggatatggggggacagatgggaggtcttagtgggactaccaccgtaaacattaccctcacggacgtcaacgataatcctcctcgttttccacagaatactattcacctgcgcgtgctagaatcaagcccagtgggaacagccattggatctgtgaaagcaaccgatgcggatacgggcaaaaacgctgaggtggaatacaggatcatcgatggcgacggaaccgacatgtttgacatcgtaactgaaaaagatacgcaggagggcatcataacagtgaaaaaacctcttgactatgagtcaagaaggctgtatacgttgaaggttgaggccgagaacactcacgtggacccacggttttattatttggggccatttaaggataccaccatcgttaagataagcatcgaggacgtggacgaaccacctgtgttcagtaggtctagctacctattcgaggtgcacgaggacatcgaagtgggaactatcatcgggacagtgatggccagggacccagacagcatttcatctcccatccggttttcacttgacaggcatacagatctggatcggatctttaacatccacagtggcaacgggtccctatacacctctaaaccgctggaccgtgagctgtcacagtggcataacctgaccgtgatcgctgcggagattaacaatccgaaagagaccacgagggtagctgtgtttgtgcggatactcgatgtaaacgacaacgcacctcagttcgccgttttttatgacaccttcgtatgcgaaaatgcgcgaccaggacaactgatccagacaatcagtgccgtggacaaagatgaccctctgggcggtcagaagtttttcttctctttggcagccgtaaatccaaacttcaccgtccaggacaatgaggacaatacggcgcgtatcttgacaagaaagaacggattcaataggcatgaaatcagcacctacctcctgcctgtggtcatctctgataatgattaccctattcagtcttccacagggacactaactattcgagtgtgcgcttgtgacagtcagggaaatatgcagtcatgttcagcagaagcattgctgctcccagctggcctttccacgggtgcactgattgcaatcctattgtgcatcataatcctgctggtgatcgtggtgctcttcgctgccctcaagaggcaacgaaaaaaggagccgctcatactgagcaaggaagatatcagagacaacattgtaagttataacgatgagggaggtggagaagaggacacccaagcattcgacatcgggaccctacggaatcccgcagccatcgaagagaagaaactgcgcagggacatcattcccgaaacgttatttattcccagacgcacccctacagctccagacaacacagatgtacgcgacttcattaacgagcgcctgaaggagcacgacctggatcccaccgctccgccatacgattcgctggccacctatgcatacgaggggaatgactctatcgctgaatctctctctagtctcgagagtggaactacagaaggcgatcagaattacgactatcttagagagtggggtcctcgctttaacaaactcgctgaaatgtacggcggaggcgagtccgataaagacagctag

SEQ ID NO: 216433 - DNA, 2385 bp, synthetic construct
  misc_feature 1..2385: note = Description of Artificial Sequence: Synthetic coding sequence
  source 1..2385: mol_type = other DNA
atgcttactcggaactgcctgagcctactgctgtgggttcttttcgacggagggctccttacgccgctccagccccagccccagcaaacccttgctacagagccacgggaaaacgtgattcaccttccgggtcagcgatcgcacttccaaagagttaaaaggggttgggtttggaatcagttctttgttcttgaagaatatgtgggaagtgagccacaatacgttggtaaacttcactcagatctggataagggggaaggtaccgtgaaatataccctgtccggggatggcgctgggaccgtgttcactatagacgaaacaacaggcgacatccacgcgattcggtccctcgatagggaggaaaagcctttctacacattgcgcgctcaggctgtcgacattgaaacacgcaagccactggaaccggaatctgagtttatcataaaagttcaggatatcaacgataacgaaccgaagttcctcgacggtccttatgtcgcaacggtgcccgagatgtccccagtcggcgcatacgtgctacaagttaaggcaaccgacgccgatgatcctacatatgggaacagcgccagggtagtatacagtatccttcagggacagccatatttttcaatcgatccaaagacaggagtgatacgcactgcgctgccgaacatggatagagaagttaaggagcagtaccaggtgctgatccaggctaaagatatgggaggtcagctcggcggacttgccggaacaacaatcgttaatatcacactcactgacgttaatgacaatcccccacgattcccgaaatccatcttccacctgaaggttcccgagtcaagtccgattggctcagccatcggccgtatccgggctgtggatcctgacttcgggcaaaacgcggagatcgaatacaatatcgtccctggcgacggcggaaatctgtttgatatcgtgacggacgaggacactcaggagggggtgattaaacttaagaaacctctcgactttgagaccaagaaggcatacactttcaaggttgaagcatcaaacctgcacctggatcatcgctttcattcagctggtccatttaaagatacagccaccgtgaagatctcagtgcttgacgtcgatgagccccctgttttttccaagcccttatacaccatggaggtttacgaggataccccagtggggactatcattggcgctgttacagcccaggaccttgacgttgggtcctctgccgtgcgctactttattgactggaaaagtgatggagattcctattttacaattgacggcaacgaggggacaattgcaactaatgagctgctggacagagagagcacagcccagtataattttagcatcatcgccagcaaagtcagtaaccctctgctgacctcaaaagtgaatattctcatcaacgtgctcgacgttaatgagtttcctcccgaaatcagcgtcccgtatgagaccgcggtttgcgaaaacgccaagcccggtcaaatcatccagatcgtcagtgccgcagacagggatctttccccagccggtcagcagtttagctttcgccttagtccggaagccgcaattaaaccaaacttcactgtcagagacttccgcaacaatactgcaggcatcgagacaaggcgtaacgggtactccagacgccagcaagaactgtattttctccccgtggtcatcgaggacagttcataccctgttcagtcatcaacaaatactatgactattcgggtgtgtaggtgcgactctgacggcactatcctctcttgcaatgtggaagccatcttcctaccagtgggtctgagcacaggggcactcatcgcaatcctactgtgcatcgtcatccttctcgcaattgtggtcttgtacgttgcattgagaagacagaaaaagaaggatactctgatgacctcaaaagaagacatcagagacaatgtgatccactacgacgatgaaggaggaggtgaggaagacacacaggcctttgatatcggcgcactcaggaacccaaaggtcatcgaggaaaacaagatacgcagggacataaagcccgatagcctgtgtctgcccaggcagcggcctccaatggaggataacacagatattcgggattttattcaccagcgactgcaggaaaacgatgttgatccaaccgctcccccttatgattcattggcaacctacgcttacgaaggatctgggtctgttgccgaatcactgtcctccattgatagtttgaccactgaggcagaccaggattatgactacttaactgattggggccctcgattcaaagttctagccgacatgttcggcgaggaggaaagttacaaccccgacaaagtgacctag

SEQ ID NO: 216434 - DNA, 2385 bp, synthetic construct
  misc_feature 1..2385: note = Description of Artificial Sequence: Synthetic coding sequence
  source 1..2385: mol_type = other DNA
atgttgaccagaaattgtttatctctcctgctctgggtcctgtttgacggcggactcctgactccactacaaccccaacctcaacagaccttggcaacagagcctcgggaaaacgtgatccacctacctgggcagcgttcgcattttcagcgagtgaagcggggatgggtgtggaatcagttctttgtgctcgaagagtatgtaggctccgaaccacagtacgtcggcaagctgcactccgacctggacaaaggggaaggcacggtcaagtacacattgtctggcgatggagcaggcactgtctttactattgacgagacgaccggtgacatacacgccatcaggtctctggacagggaagagaagcctttttacactctccgcgcacaggcagtggacatagaaaccaggaaaccgctggagcctgaatccgagtttataataaaggtgcaagatattaatgataacgagcccaagttcctcgacggcccatacgtagctactgtgcctgaaatgtctccggtgggggcatacgtcctccaggtgaaggcgacagacgccgatgatccaacatacgggaattctgctagggttgtatattcaatcctccagggtcaaccttacttcagcatcgacccgaagacaggggttatccggaccgcgctccctaacatggaccgcgaggtgaaagaacagtaccaagtgttaatccaagccaaggatatgggagggcagctggggggactggccggaactacgatagtgaatatcacgctgactgatgttaatgataatccccctaggttccctaagtctatatttcacctgaaagttccggaatcttcccccatcgggtctgccattggccgaatccgagcggtcgacccagacttcgggcaaaatgccgagatagaatataatattgtgcctggagacggaggcaacctgtttgatattgtcacagatgaagacacgcaggagggcgtaatcaagctaaagaaaccgctggactttgaaacgaaaaaagcttatacttttaaggtggaagcaagcaatttacacctggaccatagatttcacagcgccggaccattcaaggacacagctacagtgaaaatctcagtgcttgatgtggatgagccacccgtattcagtaagcccctctatacaatggaagtgtacgaagataccccagtcggcacgatcatcggggctgttactgcccaagatctggatgtcggcagctccgctgttagatacttcattgattggaaaagtgacggcgactcctatttcacaatcgatggtaatgaaggaaccattgccaccaacgaacttttagatcgggaaagtaccgcacagtacaacttttcgatcatagccagtaaagtgtccaatccactgttgacctccaaagtgaatatcctcatcaatgtgttggatgtgaacgagtttcctccagagatctccgtgccctatgaaaccgctgtgtgcgaaaacgccaaacccggacagataattcagattgtgtcagccgctgatagagatcttagtccagctggacaacaattttccttcagattgtcccccgaggccgcaatcaagcctaactttactgtgagggactttcggaacaacacagccggtatcgagacccggagaaatggctatagtaggcggcagcaggaactatactttctgcccgtcgtgatagaagattcctcctaccccgttcagtccagcacgaacaccatgaccattagggtgtgcagatgcgattccgatggaactattctgagctgcaacgtagaagccatcttcctccccgtggggctctcaacaggagccctcatcgcaatcctgctttgcattgtaatcttactggccattgtcgtactgtatgtggcgctccgccgtcagaagaaaaaagatactctgatgacctctaaagaagacatccgagataacgtgatacattatgatgatgagggagggggagaagaggacacgcaggcctttgacataggagcattgagaaatcccaaagtcatcgaagagaataagatcaggcgggacatcaagccagattctttatgtcttccaagacagcggcctcccatggaggacaacactgacataagagattttattcaccagaggctccaagaaaatgatgtagaccccaccgcacctccatatgactctcttgctacctacgcttatgaaggatccggctctgtcgctgagtcactgtcctctatcgattcactgaccaccgaggcagatcaggactatgactatttgactgactggggtccaaggtttaaagtgctggcggatatgtttggggaggaggagtcatacaatcctgacaaggtgacgtag

SEQ ID NO: 216435 - DNA, 2265 bp, synthetic construct
  misc_feature 1..2265: note = Description of Artificial Sequence: Synthetic coding sequence
  source 1..2265: mol_type = other DNA
atgctgacaaggaactgcttgagcttgctgttgtgggtattattcgatggcggactattgacccccctgcagcctcagcctcagcagacacttgccacagaaccccgagagaatgtaattcacttaccaggacagagatcccatttccagcgcgtaaagcggggttgggtttggaaccaatttttcgttctggaagaatacgttggaagcgagccccagtacgtggggaagcttcatagcgacctagataagggtgaggggacagtcaagtacacgcttagtggggatggagcaggaactgtgttcacaatcgacgaaacgaccggtgacatccatgccatcagatccctagacagagaagagaagcctttctatacgctgagagctcaggcagtggatatcgaaacccgaaagccgctagaacctgaatccgaattcattatcaaggtgcaagacatcaacgataacgagccgaaatttcttgatgggccatatgtggccaccgtgcccgaaatgagccccgtgggagtgattcgcacagcactccctaatatggaccgggaagtcaaagaacagtatcaggtgcttatacaggcaaaggatatgggcggacagttaggtggtctcgcaggcactaccatcgtgaatatcaccctcacagatgtgaatgataatccacccaggttccccaaatccatcttccacctcaaggtgccagaaagctctccaataggaagtgctatcggtcggatacgtgctgtggaccccgactttggacaaaacgcagaaattgaatataatattgtgcctggggacggcggtaatctgtttgatatcgtgacagacgaggatacgcaggaaggggtgatcaaactgaagaagccccttgacttcgaaaccaaaaaagcatacacattcaaagttgaggctagtaacctgcacctcgaccatcggtttcattcagccggtccatttaaagacacggccactgtgaagatttccgtcctcgatgtggatgagccaccagtgtttagcaagccactgtacaccatggaggtgtatgaagatacacctgtggggaccataattggagccgtgacggcacaggatttagacgtcggaagttccgcagtgcgctacttcatcgactggaaaagcgatggcgacagttatttcaccatcgacggaaatgagggaactatcgctacaaatgaactgctcgaccgggagagtaccgcgcagtacaatttctctatcatcgcaagcaaggtgagcaatcccctcctgacatccaaggtgaatatccttatcaatgttctggacgtcaatgagtttccgcctgaaatctccgtcccctatgagactgctgtgtgtgaaaatgccaaacccggtcagatcattcagatcgtgagcgcggctgacagggatctctcaccggctggccagcaattctccttcaggctgagccctgaagccgcaattaaacctaatttcactgtcagggacttcaggaataataccgcgggaattgagacaagacgtaacggatactcacgcagacagcaagagctctattttcttccagtcgtcattgaggatagctcttatccagtacagtcaagcacaaatactatgactatccgcgtgtgcagatgcgactcggatggtaccattttaagctgcaacgtcgaagccatattcctgcccgtgggactttcgacaggtgccctcatcgcaattctcctgtgcatcgtgatcctgttggctattgtcgttctctacgtcgctctgagacgtcagaaaaaaaaagacactctcatgacttcaaaagaggacatccgggataacgtgatccattatgatgatgaggggggaggcgaagaggatacccaggcctttgatatcggcgctcttaggaaccccaaggtcatcgaggaaaacaagatccgcagggatattaagcccgactctctgtgcctgccacggcaacgtccccctatggaagataataccgatattcgggatttcatccaccagaggctgcaagagaatgacgtggatcccaccgccccaccttatgattccctagccacttatgcctacgagggctcgggctccgttgccgagagcctgagctcgatcgactccttaacaacagaagctgaccaagactatgactatcttaccgactgggggcctaggttcaaggtgctcgccgacatgttcggggaggaggagagctacaaccctgataaagtcacttag

SEQ ID NO: 216436 - DNA, 2445 bp, synthetic construct
  misc_feature 1..2445: note = Description of Artificial Sequence: Synthetic coding sequence
  source 1..2445: mol_type = other DNA
atggacgcagctttcctcctggtgctaggcttactggcacaatcgttatgcctgagtttgggggtgcccggatggcgcagacctactaccctatatccatggcgacgtgcaccggctttatcccgggtgagaagggcgtgggttattccacctatttccgtgagtgaaaaccacaagaggctgccgtaccccttggtccaaatcaagtccgataaacaacagctcgggtcagtaatctatagtatccaggggcctggggtggatgaggaaccacgcggtgtctttagcatagacaagtttaccggtaaggtctttctcaatgctatgctagaccgggaaaagactgatcggtttagactgcgggctttcgctctggatcttggaggcagtacccttgaggaccctacggatctggagattgtggtggttgatcaaaacgataaccgaccggctttcttgcaggaggccttcactggcagagttctcgagggggctgtgcccggaacctacgttacccgagccgaggcaaccgatgccgacgatccggagaccgacaatgcggcactgagattctccatattacagcagggctcgcctgagctgttcagcatagatgagttgacaggagagatccggactgttcaagtcggcctagaccgagaagtggtggcggtctataatctcacccttcaggttgctgatatgtcaggtgacggactaaccgcaaccgcttctgctatcatcacacttgacgatatcaatgacaatgcacccgagttcactcgagacgagtttttcatggaggcaattgaagccgtctccggggtagatgttggcagactggaagtcgaagacagagacctccctggctcccctaactgggtggccagattcaccattctggagggcgatccggacgggcaattcacgattcgaacagacccaaagactaacgagggcgtgctctccattgttaaagcgttagactatgaatcatgtgagcattacgagctgaaggttagcgtgcagaatgaggctcccctgcaggctgcagcactgcgtgccgagcggggacaagctaaagttcgggtgcacgtgcaggatacaaatgagcccccagttttccaggagaatcctttgcggacgagtttggcggaaggggcacctcccggaaccctggtggccaccttttcagcgagggatccagatacagagcaactccaacggttgtcatatagtaaggactacgaccctgaagactggctgcaggttgacgccgcaacagggaggattcagactcagcacgtactgagcccagcctcaccattcctcaaaggagggtggtacagggctatagttcttgctcaggatgatgcctcacagcccaggacggctactggaaccttgtccattgaaattcttgaggtcaacgaccatgccccagtgctagctccccctccccctggaagcttgtgctccgaaccgcaccaaggcccaggtctactgctaggggctacggacgaagatttaccacctcacggtgcgcctttccacttccagctctctcctcgcctgccagaactggggcgaaactggtctctcagccaggtaaacgtgtcccacgccaggctgaggcctcggcaccaagttccagaaggactgcacaggctttcactgctgctcagagattcaggccagcctccccaacaacgcgaacagcccctgaatgtaactgtgtgcagatgcggtaaggatggagtctgtctgcctggcgctgctgctttactggctggcggtactggcctctctcttggggcactcgtcattgtactcgctagtgccctgctgttgttggtgctcgtgcttctggtcgccctcagggccagattctggaaacagtccagggggaaggggctgttgcatggccctcaggacgacttacgagacaatgtcctgaattacgacgagcagggcggtggcgaggaggatcaggacgcctacgacatttcgcagctgcggcacccaacagctctgagcttgcccctgggccctcctccccttaggagggacgcaccccagggtcggctccaccctcagccccctcgcgtacttcccacatcgcccctagacattgccgactttataaatgacgggctagaagcagccgattctgacccatcagtgcccccatacgacaccgctttaatctatgattatgagggcgacggcagcgtcgccggaaccctgagcagtatcctttcctcccagggtgacgaggaccaggactatgattatttacgtgactgggggccacgattcgccagactcgccgacatgtacgggcacccctgtggattagagtacggcgcacgctgggaccaccaggcccgagaaggcctctcacccggagcccttttgcccagacaccgcggacgcacagcatag

SEQ ID NO: 216437 - DNA, 2373 bp, synthetic construct
  misc_feature 1..2373: note = Description of Artificial Sequence: Synthetic coding sequence
  source 1..2373: mol_type = other DNA
atggtcccggcttggctctggctgctttgtgtttcggttccacaggcactgccgaaggcccagcccgcagaactctcagttgaagtgccagagaattacggtgggaacttcccactgtatctgaccaagttacctctgcccagggagggcgcagagggccagatcgttctgagtggagacagcgggaaagctaccgagggtccatttgccatggacccagacagcgggtttttgcttgttacacgcgctttggacagggaggagcaggcagagtaccagttgcaggtgacattggaaatgcaggacggtcacgtactatggggaccacagcctgttctggtccatgttaaggatgagaatgatcaagtcccacatttttcccaggccatctatagggctaggctgtccagggggacacgaccaggtatcccttttctgtttctggaagcgagtgacagggatgaacctgggacagcaaatagcgatttacgcttccacatcctcagtcaagctcccgcacagccaagtccagacatgttccagctcgaacccagacttggcgctctggcgctgtcaccaaagggaagtacttctttagaccatgcacttgaaaggacttaccagctgctggtgcaggtgaaagatatgggtgaccaagcatccggacaccaggcaacagctacagtggaggtctccattatcgagtccacctgggtctccctcgagccaatccatcttgcagagaaccttaaagtcctgtatcctcaccatatggcgcaagttcactggtcaggcggagacgtgcactaccatctggaatcccaccctcccggtccttttgaagtgaatgcagagggaaacctttacgtgactagggaattggaccgagaggctcaggcagagtaccttcttcaagtgcgggctcagaacagccacggggaagactacgctgctcctctggagctacatgtactggtgatggacgagaacgacaacgtccctatctgccccccacgagatccgacagtctctatccctgagctctccccacctggtactgaggtgacgaggttgagtgcggaagacgctgatgcccctggaagccccaattcacacgtcgtgtatcagctcttgtcccccgagcctgaggacggagttgaaggaagggccttccaggttgaccccacttccgggtccgtcacccttggagtgttgccactgagagccggacagaacattttactgctcgtcctcgccatggacctcgccggagctgagggtggattctcttctacatgtgaagtagaggtcgctgtcactgatataaacgaccatgcccctgagttcatcaccagccagattgggccaatctctctcccggaggacgttgagcctggtactctggtggcaatgctaacagccatagacgctgacctagaacctgcctttcggctgatggacttcgctattgaaagaggggacaccgaaggaacattcggactggactgggagccggattccggccatgtccgccttcgcctctgcaagaatctttcatatgaggccgctccaagtcacgaggtcgttgtagtcgttcagagtgtagcgaaattggtgggtccaggtccaggcccaggggctactgccactgttacggttcttgtggagcgtgtcatgccgccacccaagctagatcaagaaagttatgaggctagtgtgcccatctcggccccagccggttcatttttgctgacaattcaaccatccgaccccatcagtcgaacactgcggtttagcctcgttaatgactccgaagggtggctgtgcatagagaagttttccggtgaagtccataccgcgcagtccctccagggcgctcagcctggagacacctacacagtgctcgtggaggcccaagataccgaccacggccttatcgtttccggccctagtaaggaccccgatctggcttccgggcacgggccttattcctttaccctgggacccaaccccaccgtgcagcgggactggcggcttcagacccttaacgggtcacatgcctatttgacgctcgcattacattgggtcgagccacgcgagcacattatccctgtagtggtgtctcacaacgctcagatgtggcagctccttgtaagggtgatcgtgtgcagatgtaatgtggaaggtcagtgtatgcgtaaagtcgggaggatgaagggcatgcccactaaactgagtgcggtgggaatccttgtcggaactcttgtggcgataggcatcttcctgatcctgatctttacgcattggactatgtcacgcaagaaggaccctgaccagccggctgatagcgtcccactgaaagccacagtctag

SEQ ID NO: 216438 - DNA, 2199 bp, synthetic construct
  misc_feature 1..2199: note = Description of Artificial Sequence: Synthetic coding sequence
  source 1..2199: mol_type = other DNA
atggttccggcttggctctggctcctgtgcgtgagtgtccctcaggcactccctaaagcccagccagccgagctcagcgtggaggtgcctgagaactacggaggtaactttcccttgtacttaaccaaactaccactgcctcgagagggagccgagggtcagatagtgctgtcaggagactccggcaaagccaccgaagggcctttcgctatggatccagactccggttttctattggtcacccgcgctcttgatagggaagagcaggctgagtaccaactgcaggtcacactcgagatgcaggacggccatgtgctctgggggccacagcctgttttggtccatgtcaaagacgagaatgaccaagcctctggccaccaggcaaccgctactgttgaggtatctatcattgagtccacctgggttagtctggagccgatccatttagccgagaatctgaaggtgttgtatccacatcacatggcccaggtgcattggtcaggaggtgatgtgcattatcatctcgagtcgcaccccccaggaccgtttgaagttaacgctgaaggcaatctgtacgttaccagagaattggaccgcgaagcgcaagctgaatatttgctgcaggttcgcgctcaaaactcacatggcgaggattacgccgctcccttggaacttcacgttttagtaatggacgaaaatgacaatgtgccaatttgtcctccgagagaccccaccgtcagcatccctgagctgtctcccccaggcacggaggtgacccggctatccgcagaagatgcggacgctcccggttccccgaacagtcacgtcgtatatcagctgctatcccctgagcccgaagatggtgtagagggtagggcctttcaggtggatcccacctccggctctgtgactctaggtgtgctgcctttacgggctggacagaatatattattgctggtactggcaatggacttagctggagcggaaggcggatttagttcaacatgtgaagtggaagtggccgtcaccgatattaatgaccacgcccctgagttcatcacaagccagattggacctatttcgctacctgaggacgtcgaacccggaacattagtggctatgctgaccgctatcgacgctgatctggagccggctttccgcctcatggatttcgctatcgagcggggagatacggaaggaacttttggactggattgggaacctgactccgggcatgtacggctccggttgtgtaaaaacctcagctacgaggcagcccctagccatgaggttgtggtggtagtgcagtctgtcgccaaactcgtgggccctggacccggacccggagccacagcaaccgtgacggtgctcgtggagcgtgtgatgcccccacctaagctcgaccaggaaagctacgaagcaagcgtgccaatttctgcacccgctggcagcttcctgctgacaatccagcctagtgacccaatctctcggactctgcggttttctctcgttaacgactcggaaggttggctctgcatcgaaaagttctccggggaagtgcacactgcgcagtctctgcagggcgctcagcccggtgatacttatacagtgctcgtcgaggcccaggacactgatgagcctaggctgtcagcgtccgctcctcttgtgattcactttctcaaggctcctccggctcctgcgctcaccctcgcccctgtgccctcgcagtacctgtgcactccgagacaggaccacgggctgatagtgtccgggccaagcaaagacccagaccttgcttcaggccacggaccttactcatttactcttggacccaacccaaccgttcagcgcgactggcgacttcagactctgaacggcagccatgcctatcttacgctggcactccattgggtggagcctcgcgaacatatcataccagtagtggtaagccacaatgcccaaatgtggcaactgcttgtccgtgttatagtgtgccggtgtaatgtggaaggacaatgcatgcggaaggtagggagaatgaagggaatgccaactaagctctcagctgtgggtattctggtgggaaccctcgtggctattgggatcttccttattctgatctttacacactggactatgtcaaggaagaaagaccccgatcagccagccgactctgtgccactaaaagcaactgtgtag

SEQ ID NO: 216439 - DNA, 2490 bp, synthetic construct
  misc_feature 1..2490: note = Description of Artificial Sequence: Synthetic coding sequence
  source 1..2490: mol_type = other DNA
atggttcctgcttggttatggcttttgtgcgtctctgtcccccaggccttgccaaaggcccaacctgctgagctgagtgtggaagtccctgagaactacggcggaaactttcccctgtacttgaccaaactccccctcccgagggagggagcagagggtcagatcgtgttgtcgggagattccggtaaggcaaccgaggggcctttcgcaatggatcctgactccgggttcctgctggtaaccagggccctcgatcgggaggagcaggcagagtatcagcttcaggtgactctcgaaatgcaggatggtcacgtactgtgggggccacagcccgtgctcgtgcatgtgaaggatgagaacgatcaagtgcctcacttttctcaagcaatctatagagcacgcctgtctagagggacccgaccaggaatcccgtttttgttcctcgaggcatcggacagggacgagcctggaactgcgaacagcgatctccgcttccacatcctcagtcaggccccagctcaaccctcaccagatatgttccagttggagcccaggctgggtgcactggccctgtcccctaaaggatctacatcgttagaccacgcacttgagcgcacttaccagctcctagtgcaggttaaggatatgggagatcaggccagcgggcaccaggccaccgcaacggtcgaggtcagcatcatcgaatccacatgggtgtcgttggagccgatccatctggccgaaaatcttaaagttttgtaccctcaccatatggcccaagtacactggtcagggggagatgtgcattatcatctggaatcacacccacccggaccctttgaggtgaacgcggagggaaatctctacgtgacaagagaactcgaccgcgaggctcaggccgaatacctacttcaggtgcgcgctcagaactcgcacggagaagactacgcagcacccctggagctgcatgtgctggtgatggatgagaacgataatgtgcccatctgcccacctagggaccccaccgtgtctattcctgaattgtcacccccagggaccgaggtgaccaggctaagcgccgaggacgctgatgccccaggctcacccaacagccacgtggtataccaactcctgtctcctgaacccgaagacggcgtggaggggagagcctttcaggtggacccgacatctggcagcgtgacactgggcgttcttcctctcagagccggacaaaacatcctgctgctggtactggctatggacttggccggtgcagagggaggctttagctccacttgcgaggtcgaagttgctgtcacagacatcaatgatcacgccccagagttcatcacatcgcagatcggccctatcagcctaccggaggacgtggagcccggaacattggtcgcaatgcttactgccattgacgccgacctggagcccgcatttcgcttaatggactttgctattgagagaggcgatactgaaggcacttttggactggactgggaaccagactccgggcatgtccgcttgcgtctttgtaagaatctgagctacgaagcagccccttcacatgaagtggttgtagtggtgcagagcgtcgcaaagcttgtgggacccggtcccggtccaggggcaactgcgaccgttacagtgttagtcgagagggttatgcctccgccaaagcttgatcaggaaagctatgaggccagcgtcccaattagcgcaccggctggaagctttctgctgaccatacagccctctgacccgatcagcagaactctgcgattttccctcgtgaatgattccgaaggctggctctgcatcgaaaaattttcaggggaagtgcatacggcccagagtctgcaaggcgcacagccgggtgatacttatacagtgctggttgaggcgcaggatactgacgaacccaggctgtccgccagcgcaccgctggtaatccactttctgaaagcccctccagcaccagctctgacactggctcctgtgcctagtcagtacctgtgcacaccacggcaggaccacggtctgatcgttagcggcccatccaaggatcctgatttagcctccggacacggcccttactcctttactctaggaccaaaccctacagtccagcgggactggcgattacagaccctgaatggatctcacgcctatctcaccctcgctctccactgggtcgaaccacgtgaacatattatccccgttgtcgtgagccataacgctcagatgtggcagcttctggttagagtgatagtgtgtcgctgcaacgttgagggtcaatgtatgcggaaggtcggaaggatgaaggggatgcccaccaaactcagtgctgtgggcatcctggttgggacactcgtcgccatagggatctttctgatcctgatcttcactcactggacaatgtctcgaaaaaaagacccagatcagcccgctgattcagtgcctttgaaggccacagtctag

SEQ ID NO: 216440 - DNA, 2424 bp, synthetic construct
  misc_feature 1..2424: note = Description of Artificial Sequence: Synthetic coding sequence
  source 1..2424: mol_type = other DNA
atggtgcctgcctggttatggcttctgtgtgtctcagtgcctcaggccctgcccaaggcccaaccggcagaattatccgtcgaggtgcctgagaattacgggggaaacttcccattatacctcacaaagttgccgcttccaagagaaggggcagagggccagatcgtactgtcaggtgactccggcaaggcaaccgaagggccatttgctatggatcccgacagcgggttcctgctggttacgcgcgcactggaccgggaggaacaggccgagtaccagcttcaggtgaccctcgagatgcaggatggacacgtcctctggggcccacagcccgtgctggtgcacgtgaaggacgagaatgaccaggttccacacttctcccaggccatctatcgagctaggttatcaaggggaacacgtccgggaattccgtttctgtttctggaagcctctgacagagatgagcccggtaccgccaatagcgatttgaggtttcacattttgtctcaggccccagcccagccctccccggacatgttccagctagagcctcggctgggagcgctggcactgtctcccaaggggagtacgagtctggatcatgcattggaaaggacataccagctgttagtgcaagtcaaagacatgggcgaccaggcgtctggtcaccaggccaccgctactgtggaagtgtccattatcgagtcaacgtgggtgtctcttgagcctatccatctcgccgagaacctgaaagtgctgtatccacaccatatggcacaggtgcactggagcggaggcgacgttcattatcatctggagagccaccctcctggcccttttgaagtgaacgccgagggtaacctttatgtgacaagggagctcgatcgcgaagcccaggcagagtacctactgcaggtccgtgcccaaaactcacacggggaagactacgcggctccccttgagctgcacgtgctggtcatggatgagaatgacaacgtccctatatgtccaccccgagaccctaccgtctcgatcccagagctgagcccaccaggtacagaagtgacgagattgtctgctgaggacgccgatgctcccggatctccaaatagtcatgtggtgtaccagctgctgtccccggagcctgaagatggggtggaaggtagagcctttcaggtcgatccgacttcaggttcggtcacactgggagtcttacccctcagagccggacaaaatatcctgttacttgtgctcgccatggaccttgctggagctgaggggggatttagttccacctgtgaggtcgaggttgctgtgactgacatcaacgatcacgccccagagttcattactagtcagatcgggccaattagtttgccagaggacgtagaacctgggactcttgtcgccatgcttacagcaatcgacgctgacctagaacccgcattcaggttgatggatttcgccatcgaacgaggcgatactgaaggtaccttcggactggattgggaaccagatagcggccacgtgagactcaggctgtgcaagaatctctcttacgaggcagctccctcccacgaagtagtggtggtggtgcagtccgttgcaaagttggtggggccaggcccaggcccaggcgctaccgccacggttacagttttggtggagcgtgtgatgcccccacctaagcttgatcaggaaagctatgaggcttcagtgcctatttccgcgccagcaggtagttttctgctcactatccagccttcagaccctatttcgaggacattgcggttttccctggtgaatgactccgagggctggctttgcattgagaagttttccggggaggtgcatacggcccagtccctgcagggcgctcaaccaggcgacacttacacggtgttagtcgaggcccaggatactgcactgaccttggcgccagttccgagccaatacctttgcacacctagacaggaccacggattgatcgtgtccggacccagcaaagatcctgacttggcctctggccatgggccatatagcttcaccttggggccaaacccaaccgtacagagagactggcgcctccagaccttaaatggatcccatgcctaccttactctggcactgcactgggttgagccgcgtgagcatattataccagtggtagtttcccacaacgcacaaatgtggcaactcttggtgcgggtaatagtgtgccgttgtaacgttgagggtcagtgcatgaggaaggtggggagaatgaagggcatgccaacaaagcttagcgcagttgggatactggtgggtacgctggtggctatcggaatttttctgatactgatattcacacactggacaatgtccaggaaaaaagaccccgatcagcccgctgattctgtccctctgaaggcaacagtgtag

SEQ ID NO: 216441 - DNA, 2382 bp, synthetic construct
  misc_feature 1..2382: note = Description of Artificial Sequence: Synthetic coding sequence
  source 1..2382: mol_type = other DNA
atggttccagcctggctatggctgttgtgcgtatctgtgccccaagcccttccaaaggcccagccagccgaactgtcagtggaggtgcctgaaaactacggcggaaatttccccctatatctgacaaagttgccgttgcccagagaaggggctgaaggccagatcgttctctccggagaacaggccgagatgcaggacggacacgttttatggggccctcagcccgtgcttgttcatgtaaaagatgaaaacgatcaagtgccccacttttcacaagccatatatcgcgctagactctcacgcggaaccagaccgggaatacctttcctgttcctggaggctagtgatcgagatgagcctggcaccgctaactccgacctccgcttccacatcctgagtcaggctcccgctcagccttctccagacatgtttcagctggagccaaggcttggcgctttggcactgtctccgaaggggtccaccagcttagatcatgctctggagagaacgtatcaacttttagttcaggtcaaagatatgggtgatcaggcctccgggcatcaggcgacagctaccgtggaggtctcaatcatcgagagcacctgggtgagccttgagccaattcacctagccgagaacctcaaagtcctctatcctcaccacatggctcaggtccattggtctgggggtgacgtgcattatcacctcgagtcacatcctccgggtccatttgaagtgaacgcggagggaaacttgtacgtaacccgtgagctggatcgcgaagcccaggcagaatacctcttgcaggtacgagcccaaaacagccatggagaggactatgccgcacctctggagctccacgttctcgtcatggacgagaacgacaacgtcccaatctgcccgccacgggaccccactgtaagcattccagaattatcaccacctggaaccgaggtgacacggctgagtgccgaagacgccgatgcccctggatcacccaacagccacgtggtttaccagctgctatccccagaaccggaagacggtgtggaaggcagagcttttcaagtagatcccacatctgggagcgtcactctgggggtgctgccactccgtgctgggcagaacattctgctgttggtgctggccatggacctggccggtgcagaagggggattctcttccacctgtgaagtagaggtggccgtgactgatataaacgatcatgcccctgagttcattaccagccaaataggtcccatatctctgccagaagacgtggaaccgggtacgttggtggccatgctcacggctattgacgccgatcttgaacctgccttccgcctgatggactttgccatagagagaggggatactgaaggaacgttcggactcgactgggaacctgacagcggacacgtcagactccggctttgtaaaaatctctcctacgaagctgctccatcccacgaagtggtagtggtggtgcaaagcgtcgccaagctggtggggcctggccctggtcccggagccactgcaacggtaaccgttttggtggagagagtaatgccgccaccaaaactggaccaagagagttacgaagcaagcgtgcccatcagtgctcctgccggaagtttcctgctgactatccaaccaagtgatccgatttctcgtactctgaggttctccctcgtgaatgattctgagggttggctgtgcatcgagaagttttccggggaagtgcacaccgctcaatcactgcaaggcgcacagccgggtgatacttatacagtcttagtcgaagcccaggatactgacgagccaaggttgtcggcctctgcgcctctcgtgatccacttcctgaaagccccaccagccccagcgctgactctggcacccgtcccgagccaatatctgtgtacccctagacaggatcacgggctgattgtctcaggtccatctaaggaccccgatctagccagtggacacggcccatactcctttacccttggacccaaccccaccgtacagcgtgattggcggctccaaactctgaacggcagccacgcctacctaactctggccctccactgggtggaaccaagggaacacataattcccgtagtggttagccacaacgcacaaatgtggcaactgttggtgagggtgatcgtctgccggtgtaacgtagagggccagtgtatgagaaaggttgggcgaatgaaggggatgcccactaaactgtcggccgtgggcatactcgtaggcacactggtcgctattggaatcttccttatcctcatcttcacccactggacaatgtcacgtaagaaagacccagatcaacccgctgattcggttcctctgaaagctaccgtgtag

SEQ ID NO: 216442 - DNA, 2499 bp, synthetic construct
  misc_feature 1..2499: note = Description of Artificial Sequence: Synthetic coding sequence
  source 1..2499: mol_type = other DNA
atgatcttgcaggctcaccttcacagcctttgcttgttgatgctgtatctagctacgggatatggtcaggaagggaagttctccgggccactgaagcctatgacgttttctatctatgaggggcaagagccgtcccagataatcttccagtttaaagctaatccccctgctgtgacattcgaacttaccggggagaccgacaatatttttgtcatcgaacgcgagggcttgttatactacaatagagcattggatagagagaccagatctacccataacctgcaggtcgccgctctggatgctaacggcattattgtggaaggccctgtgccaattaccattaaggtaaaggacattaacgataacaggcctacgttccttcagagtaaatatgagggctccgtccggcagaacagcagacctgggaagccgtttctgtacgttaacgcaaccgatctcgacgacccggcaacacccaacggacagctgtattaccagatcgtcatacagttaccaatgattaataacgtcatgtattttcagatcaataacaagactggtgctataagcctgacaagagaaggaagccaggagctcaatccggctaaaaatcccagctataatctcgtgataagcgtgaaggatatgggcggacagagtgaaaacagcttttcagatacaacgtccgttgacatcatcgtaaccgaaaatatctggaaagctcccaaacccgttgagatggtcgagaactctacggaccctcatcccatcaagatcacgcaggttagatggaacgaccccggagctcagtatagcctcgtagacaaagagaagcttcccaggttccctttcagcatagatcaggagggcgatatctatgtcactcagcctctggatagggaagagaaggatgcatacgttttctacgccgtggctaaagatgagtacggaaaacccctttcatatcccctcgaaattcatgtaaaagtcaaggatatcaatgacaatcctcccacctgtccatccccagtgacagtttttgaagttcaggagaacgaaagactgggaaactccatcgggacattgaccgcccacgaccgcgacgaggaaaataccgcaaactcgttcctcaattatagaattgtagagcagacacctaagctacctatggacggcctattcttgatacagacctacgctggtatgctgcagctcgccaagcagagtctgaagaaacaggacacgccccagtataatctgacgatcgaagtgtcagataaggactttaagaccttgtgttttgtgcagatcaacgtaatagatatcaacgaccagattcccatttttgagaaaagcgactatggaaatctgacgcttgccgaagacacaaatattggcagtaccatattaaccattcaggccactgacgccgatgaacccttcactggcagctcaaagatattgtatcacatcatcaagggagattctgaaggcaggctgggcgtcgatactgacccccataccaatactggttatgtcataattaaaaaaccgctggactttgagactgctgccgtctccaatattgtcttcaaggctgaaaacccagaacctctggtttttggtgtcaagtacaatgcgtctagcttcgccaaattcaccctaatcgtcacagatgtaaacgaggccccacagtttagtcaacacgtgtttcaggccaaggttagcgaagatgtcgccatcggcacgaaggtggggaacgtgactgccaaggacccagagggcctagacatttcgtacagtttgcgtggtgataccagaggatggctaaagatagatcatgtgaccggggaaattttctctgtggcacccctcgatcgtgaggccggatccccctacagggttcaggttgtcgcaacggaggtcggcggatcctccctttcctctgtgtccgaatttcatctgatcctcatggacgtgaacgataatccgcctaggctcgccaaagactacacgggcttattcttctgccatccactatctgccccaggatcactgattttcgaggctacagatgacgaccagcacctcttccgcggaccccacttcacattcagtctgggcagcggatccctacaaaacgattgggaggtctccaaaattaacggcacccatgctcggctgtcaacccggcataccgaatttgaggaaagagaatatgtggtgttaatcaggattaacgatggagggaggccaccactggaagggatcgtgagccttcccgttaccttctgttcctgcgttgaaggcagctgctttcgaccggcagggcaccagacgggaattccaactgtcggaatggctgtggggatactgctgaccacactacttgtgattggcataattttggccgtggtttttattcgtattaaaaaggataagggaaaggacaatgttgaaagtgcccaagcgtccgaggtgaagcctctcagatcttag

SEQ ID NO: 216443 - DNA, 2499 bp, synthetic construct
  misc_feature 1..2499: note = Description of Artificial Sequence: Synthetic coding sequence
  source 1..2499: mol_type = other DNA
atgatcttacaagcccatttacactccctgtgtttattaatgctgtacctcgcaaccggttatgggcaggagggtaagtttagtgggcctttgaaacccatgacttttagcatctatgagggtcaggaaccttcccaaatcattttccagtttaaggccaacccacccgctgtgacctttgaactgactggcgagaccgacaatatcttcgtgatcgagcgcgaagggttactctactacaaccgggctctggatcgggaaaccagatccacccataatctgcaggtggctgcccttgatgcaaacgggataatcgtggaaggccctgtgcctataacgatcaaggtcaaggacatcaacgacaaccggccaacattcctccagtctaagtatgaaggttctgttcgccagaactctcgccctggaaaaccttttttatatgtgaacgcgacagatctggacgatcctgctacacctaacgggcagttgtactaccaaattgtcattcaactgcctatgatcaataatgtgatgtattttcagattaacaacaagaccggcgctatcagtcttacccgcgagggttcccaggagcttaatccagccaagaacccatcatataatcttgtgataagtgtgaaggacatgggcggacagtcagaaaatagcttttctgacaccacgtccgtggacataatcgtgaccgagaacatttggaaggcccctaaacccgtggagatggtcgaaaactctaccgacccccaccccatcaaaatcacacaggtccgctggaacgacccaggcgctcagtattccttggtggataaggaaaagctcccccgtttcccttttagtatcgatcaggaaggtgatatctatgttactcaacctctcgacagagaggagaaggacgcttacgtgttctacgctgttgctaaagatgaatacggaaaacctctttcatatccactggaaatccatgttaaagtgaaggatatcaacgacaaccccccaacttgtcctagcccggtcaccgtgttcgaagtgcaggagaacgagaggctcggaaactctattgggacgcttacggctcatgacagagacgaggagaatactgctaattcctttctcaactaccgcattgttgaacagacgccgaaattgcctatggatggcctgttcttaattcagacttacgccggaatgctgcagctggcaaagcagtcactcaagaaacaagatactccccaatataacttgaccatcgaggtttcagataaggactttaaaacactttgctttgtgcagatcaatgtaatcgacatcaatgaccagatcccaatattcgaaaaatcagattacggtaaccttacacttgccgaagacacaaatattggtagtacgatcctcactattcaggcaacggacgctgacgaaccattcacagggagtagtaaaatcctgtatcacattatcaagggggattcagagggtcgcctgggcgtcgacactgacccgcacacaaataccggctatgtgataatcaagaagcctttagatttcgagaccgcagccgtctctaacatcgttttcaaagcagagaaccctgaaccacttgttttcggggttaagtacaatgcctcgagcttcgctaagtttactctgatagttaccgatgtgaacgaggctccacaattctcacagcacgtgttccaggcaaaggtatcggaggatgtagcaatcggcacaaaagtgggaaacgtgaccgctaaagaccccgaggggttggatatctcatacagtctgagaggcgatacaagaggctggcttaaaatcgatcacgtgacgggagagatttttagcgtggcacctctcgacagagaagcagggtcaccttatagagtccaggttgtcgccaccgaggtaggcggatcctcgctgagctcggtgtccgagttccacctcattctgatggacgtgaatgataatccaccgaggttagcaaaggactacacagggttgtttttttgccaccccctgtccgcacccggtagtttaatttttgaagccaccgatgacgatcagcatctgtttagaggcccacatttcacattctccctcggctccggaagtttacagaacgactgggaggtctccaaaatcaatggaacgcacgccaggttgtcaacacgccacactgagtttgaagaaagggagtatgtggtattgataagaataaacgacggcggtaggcctccactcgaaggcatcgtttcactgccggtgactttctgttcttgcgtcgagggcagctgcttccgtcccgctggccaccaaacgggaataccaactgttggcatggcggttggcattctgctgacaaccctgctcgtcattggaatcattcttgccgtggtgtttattcgcataaaaaaagacaagggaaaggacaatgtggaatctgcccaggcgagcgaagtgaaaccactgcgctcatag

SEQ ID NO: 216444 - DNA, 444 bp, synthetic construct
  misc_feature 1..444: note = Description of Artificial Sequence: Synthetic coding sequence
  source 1..444: mol_type = other DNA
atgatcctgcaggcgcacttacactctttgtgcctcttaatgctgtatctggcaaccggatatggtcaggagggcaagttcagcggacctctcaagccaatgacgttctcaatctacgaagggcaggagccgtctcagattatttttcaatttaaggcgaatccacccgcagtgacctttgagctgaccggtgagaccgataacatctttgttatcgagagggaaggcctgctgtattacaacagggcgttagatcgggaaactcggtcgacgcacaatttgcaggtggccgctctggatgccaacggtatcatcgtcgaaggacctgtgccaatcaccattaaagtaaaagacattaatgataatcggcctactttcctgcagtccaagtatgagggaagtgtacgtcagaacagccgacccggtaagcctttcctctattag

SEQ ID NO: 216445 - DNA, 2373 bp, synthetic construct
  misc_feature 1..2373: note = Description of Artificial Sequence: Synthetic coding sequence
  source 1..2373: mol_type = other DNA
atgaagatcaccagtacctcttgtatatgccccgtactagtctgtctatgcttcgtccagcgttgttatggtaccgcgcaccacagtagtatcaaggtgatgcgaaaccagacgaaacacatcgagggagaaactgaggtccatcacagaccaaaaaggggctgggtctggaaccagtttttcgttctggaggaacacatgggccctgaccctcagtatgtgggaaaactccattctaacagcgacaagggcgacgggtctgtaaagtatatcctcacaggtgaaggcgctggtactattttcatcatcgatgatacgacgggcgatatccacagcaccaaatccttggatcgggagcagaagacccactacgtcctgcatgcccaggcaatcgaccggcgaaccaataagccgcttgaaccggagagtgaattcataattaaagtccaggatataaacgataacgcccctaagtttaccgacgggccttatatcgtgacggtgcccgaaatgtcagacatgggcacttccgtcctacaagtcacagcaactgacgctgacgatcccacctacgggaactcagctagggtcgtttatagcatccttcagggacagccttacttttcggtcgacccaaagacaggagtgattcgaacagcactgcacaacatggatcgggaggccagggagcattattctgtggtaatccaggctaaggacatggctggacaggtgggcggtctcagcggctcaaccacagttaatattaccctgacagacgtcaatgacaaccctccgagattcccacagaagcactatcaactctatgtccccgaaagcgcacaggtggggtcggctgttggcaaaattaaggcaaacgacgctgatacagggtccaacgccgacatgacttattccatcatcaatggcgatggcatggggatttttagcattagtaccgataaagagacaagagaggggattctctctttaaaaaaaccgctcaactatgaaaagaaaaagtcgtacacccttaacattgagggtgccaatacccacctggacttccgcttctcccacctaggaccctttaaagacgccacgatgcttaaaataatagtgggcgatgtggacgagcctcccctgttttctatgccaagctatctgatggaagtttatgagaacgccaaaatcgggaccgtggttgggaccgtccttgcacaggatccagacagcaccaactctctcgtacggtacttcatcaactacaatgtggaggatgatcgcttttttaatatagacgcaaatacaggtacaatccgcaccactaaggtgctcgatagagaggagacaccatggtacaatattaccgttaccgcctcagaaatcgacaatcctgatctgctctcgcatgtgaccgtggggattagagtgcttgacgtgaacgataatccacctgaactcgccagggagtatgacatcatcgtatgcgagaactcgaaacctggacaagtgattcacactatctccgccactgacaaagacgatttcgcgaacggacctcggttcaacttcttccttgacgaacgactcccagtgaaccccaactttaccctgaaagataacgaagacaataccgcttctatcttgacccgcagaagacgattctctcgcacggtgcaggacgtctattaccttcccatcatgatctccgatggcggtatacccagcctctcctcctcatccaccctgacgatccgcgtgtgcgcgtgcgagagagatgggagggtacggacttgtcacgcagaggcattcctgagctctgcaggcctcagcaccggcgctctaattgcaattctactttgcgtgctcattttgctggcaatcgtggtgttgtttattaccctgagaaggagcaaaaaagagcccttgatcatttctgaagaggacgtgcgcgaaaatgttgtgacctacgatgatgaaggaggcggagaagaagacaccgaagccttcgatattaccgccctaaggaacccctctgccgcagaagaattaaagtaccggcgtgacatacggccagaggtgaagctgactcctagacaccaaacctccagtacactggaaagcatagacgtgcaggagtttataaaacagcgcctcgctgaggctgacctggatccctctgtgccaccttacgatagccttcaaacctatgcctacgagggccaacgctcagaagccggatctatctcttccctggactccgcaactacacagagcgatcaggattaccattacctgggcgattggggtcccgaattcaaaaaacttgctgaactgtatggtgagatagagagcgaaaggaccacttag

SEQ ID NO: 216446 - DNA, 2373 bp, synthetic construct
  misc_feature 1..2373: note = Description of Artificial Sequence: Synthetic coding sequence
  source 1..2373: mol_type = other DNA
atgaaaatcactagcactagctgtatctgtcctgtgctggtatgcctgtgttttgtgcaacggtgctacggaacagctcaccacagcagcataaaggtgatgagaaatcaaaccaagcatatcgagggcgaaaccgaagtccaccataggccaaagcgtggttgggtgtggaatcagttctttgtcctcgaagaacacatgggcccagatcctcagtatgtgggcaagcttcatagtaatagcgacaaaggagacgggtccgttaagtacatactgaccggagagggtgctggcaccatattcataatcgatgatacaactggcgatatccacagcacaaaatctctggacagggagcagaaaacccactacgtattgcatgcacaggccatcgaccgcaggaccaacaagcctttagaaccagagagcgagttcattatcaaggttcaggacataaacgataacgccccaaagtttaccgatgggccttacattgttacggtgccagaaatgtcagacatgggcaccagtgtcctgcaagtaactgctaccgacgcagacgacccaacctacggcaatagcgcccgagtcgtttactccattctgcaggggcagccctacttctcggtggatcctaaaactggagtgatccggacagcgttacacaacatggatagagaagcacgcgaacactattctgtggtgatccaggccaaagatatggctggtcaggtggggggtcttagcggctcgaccaccgtcaacatcaccctgactgatgtgaatgataatcctccaagatttcctcagaagcactatcaactgtatgtgccagaatctgcccaggtcggctctgccgtgggaaaaatcaaagccaatgatgccgataccggaagtaacgctgatatgacttatagcataatcaatggggacggcatggggattttctccattagcactgataaggaaacaagggaagggattttgagtctcaaaaaaccgctgaactacgaaaagaaaaaatcttacacactgaacatcgaaggtgccaacacgcacctcgactttcgctttagccatctcggtccttttaaggatgcaactatgttgaaaattattgtgggagatgtggatgaacccccactgttcagtatgccatcttatttaatggaggtttatgaaaacgcaaagatcggcacagtggtgggaaccgttctggctcaagaccctgatagtactaatagcctggtgcgctatttcattaactacaatgttgaagatgacaggttctttaatattgatgccaataccgggacaatccgcaccaccaaagtactcgatcgagaagaaaccccctggtataacatcactgtcactgcctccgaaatcgacaatcccgatctcctgtcgcacgtgacagtaggcattcgcgtgctcgacgtgaacgacaatcccccagagttggctagagagtatgacatcatagtttgcgagaatagtaaaccaggccaggtgatacacaccatcagcgcaacagacaaggacgattttgctaatggccctcgtttcaattttttcttggacgagcgcctaccggtaaaccccaactttaccttgaaagacaatgaggataacaccgcatccatcctcacccggagacggaggttcagccgcaccgtacaggacgtgtactacctcccgataatgatctcggacgggggaattccctctctctcatcttcttctacccttactatacgagtgtgcgcctgtgaaagggatggtagagtgcgaacctgtcacgcagaggccttcctgtcttccgccggactctccacaggtgcactgatcgcgatacttctctgcgtcttgatccttttagccatcgttgtactgtttataacgctccggaggtccaagaaggagccactgatcattagcgaagaagacgtgcgggaaaatgtggtgacatatgatgacgaaggcggaggagaagaggacaccgaggcttttgatatcaccgcgctgcggaatccctccgctgccgaagagcttaagtaccggcgagacattagacctgaggttaagttgactcctagacaccagactagctctacacttgaatccatagacgtccaggagttcatcaaacaacgcttggccgaagccgatttggatcctagcgtccctccctatgactctctgcaaacatacgcatacgaagggcagcgcagtgaggcaggttcaatctcctcccttgactctgctaccacccagtccgaccaggactaccactacctaggagattggggccctgagttcaagaagctggccgaattgtacggggaaattgaaagcgagcgaactacttag

SEQ ID NO: 216447 - DNA, 1725 bp, synthetic construct
  misc_feature 1..1725: note = Description of Artificial Sequence: Synthetic coding sequence
  source 1..1725: mol_type = other DNA
atgaagatcacttctacgtcctgcatttgtcctgtacttgtgtgcttgtgctttgttcagaggtgctatgggaccgctcaccattcctcaatcaaagtcatgaggaaccagaccaagcatatagaaggggagacagaagtgcatcatcgacccaagcggggatgggtctggaaccagttcttcgtgctggaggagcacatgggtcccgacccacaatacgtcggaaagctccactcgaatagcgacaaaggtgatggctcagtgaaatacatcttgacaggcgaaggggcagggaccatcttcatcatcgacgatacaacaggggacatccacagtactaaatctttggatcgtgaacagaaaactcattacgtgctgcacgcacaggccatcgacaggagaaccaataagccactggagccagaaagcgaattcataattaaggtgcaggatatcaacgacaacgcccctaagttcaccgacggtccatatattgtgaccgtccccgaaatgtccgatatgggcaccagtgtgctacaagttactgccacagacgccgacgaccctacgtacgggaattcagcccgtgtcgtctatagcatattgcaggggcagccctacttctcagtggacccaaagactggagtgatacgtacagctttgcacaatatggatagggaagccagagaacactacagcgtcgtgattcaggccaaagatatggccggacaggtgggcggtctgagtggtagcactacagtgaatatcaccctgacagatgtcaacgacaacccccctagattcccacagaagcactaccagttgtacgtccccgaatctgctcaggttggatctgcagtcggaaagataaaggctaacgatgcagacactggcagcaatgcagacatgacctattcaataattaatggagacgggatgggtatctttagcatctcaaccgacaaagaaacaagagaaggcatccttagtctgaagaaacccctgaactacgagaagaaaaagtcttacactctaaacatcgagggagccaatactcatctggatttcaggttctcccatttaggaccatttaaagacgcaacaatgctgaagatcatcgtaggcgacgttgacgaacctcctctattttccatgccaagctacttgatggaggtttatgaaaacgcaaagattggaacggtcgtcggcacggtcctggcacaggaccccgacagtactaactccctcgttagatatttcataaattacaacgtcgaggacgacagattttttaacatcgatgctaacacgggaactatccggacaacaaaggtgctggatagggaggaaacaccatggtacaacattaccgtgacggcatctgaaattgataatcctgacctgctatctcatgtgacggtcggtatccgggtcctcgatgttaatgacaaccccccagagcttgcacgggaatatgacataattgtgtgtgagaactccaagcctggccaggtgatccacacaatcagcgctaccgacaaggacgacttcgcaaatggacctcgctttaatttcttcctggacgagcggctgcctgttaacccgaacttcaccctgaaggacaacgaagctgcagccccttccccatccggcttcgtgcatgctcgggagatgggggtttgcggacccgctatgcagaagccctcgtgccctagactagtttag

SEQ ID NO: 216448 - DNA, 2373 bp, synthetic construct
  misc_feature 1..2373: note = Description of Artificial Sequence: Synthetic coding sequence
  source 1..2373: mol_type = other DNA
atgaaaatcacatccacctcatgtatttgccctgtgctggtgtgtctgtgttttgtacagcggtgttacgggaccgcacaccactcatccattaaggtgatgagaaaccagaccaagcatatcgagggcgaaaccgaagtgcatcatagaccaaaaagaggatgggtctggaaccaattcttcgtgctggaggaacacatgggcccagatccccagtacgttggcaagctccattctaatagcgataaaggggatggttcggtgaagtacatactgaccggggagggcgcaggcactatcttcatcatagatgatacaaccggcgatattcatagcactaagagtttggaccgcgaacagaaaacacattacgtgctccatgcccaagcaattgaccgcagaaccaacaagcctctggagccagagagtgagttcatcattaaggtccaggacattaatgataatgctccaaaatttacagatggaccatatatcgtcacggtaccagaaatgtctgacatgggcaccagcgtattgcaggtaaccgctactgacgctgacgatcctacttatggcaacagtgctagagtggtgtactctatcctgcaaggccagccatattttagcgtggaccctaagacaggcgtcatcagaaccgctctccacaacatggatcgtgaggccagagagcattattcagtggtcatacaggcaaaagacatggctggtcaggtgggaggcctcagcggctccactaccgtgaacatcacacttactgacgtgaatgataacccacctcgatttccgcagaagcactatcagctgtacgtccctgagagcgcccaggtcggaagcgccgtcggcaagattaaagccaatgatgccgacaccggcagcaacgccgacatgacgtactctataatcaacggcgatggaatgggaatcttcagtatttcaaccgacaaggagaccagagagggcatcctgtctctcaagaagccgctaaattacgagaaaaagaagtcttatacactaaacatagaaggagcgaatacgcacttggactttcgcttctcccacctcggacctttcaaagatgctaccatgctcaaaattattgtcggggacgtcgacgaacccccactcttctctatgccctcatatctgatggaagtgtacgaaaatgcaaagattgggacagtagtggggactgtcctcgcccaggatccagactctactaactcactggtcaggtacttcataaactataacgtcgaggacgaccggttcttcaacatcgacgcgaataccgggaccattcgcactaccaaggtcctcgatagggaggagactccttggtataatatcacagtgaccgcttccgaaatcgataatccggatttactttcccacgtgaccgtgggcatccgcgtcctcgatgtcaacgacaatcccccagagctcgcaagagaatatgatatcatagtctgtgaaaacagtaaacctgggcaggtcatccataccatatcggccaccgacaaggatgacttcgcaaatggacccaggttcaacttctttttagatgagaggttgccggtgaatcccaactttacactgaaagataatgaggataatactgcaagtattttgacccggaggcgcagattctctagaacagttcaggacgtgtattatttgcctattatgatctcagacggcggtattccatccctctcttcatccagcactcttacaattcgtgtgtgtgcctgtgaaagggatggccgagtacgtacgtgccacgccgaggctttcctctcttcggcaggactgagtaccggagctctaattgcgatattgctgtgcgtcttgattttgctggcaatagtcgtgctgttcatcacccttcgcaggagtaaaaaggagcccctaatcatcagtgaggaagacgtgcgggaaaacgtggtgacatacgatgacgagggcggtggtgaggaggatacggaagctttcgacatcaccgctctccgtaacccttctgccgctgaggagctgaagtatcgcagggatataaggcctgaggttaagctgactccgcgacaccagacctctagcactttagaatccatcgatgtgcaagagttcatcaagcagcgactcgccgaggcggatctcgaccctagcgtccccccttatgacagtttacaaacctacgcctatgaaggacagagatctgaggcgggaagcatctcttccttagactccgctacaacacagtctgatcaggactatcattacctcggtgattggggccctgagttcaaaaagttagctgagctgtatggcgaaattgagtctgagcgcaccacatag

SEQ ID NO: 216449 - DNA, 2373 bp, synthetic construct
  misc_feature 1..2373: note = Description of Artificial Sequence: Synthetic coding sequence
  source 1..2373: mol_type = other DNA
atgaagatcacaagtactagttgcatttgtcctgtcttggtctgcctctgtttcgtccagcggtgctacggaactgcccaccatagtagtatcaaggtgatgcggaatcagaccaagcacatagaaggcgagactgaagtccaccacaggccgaagcgtgggtgggtgtggaaccagttcttcgtgctcgaagagcacatgggaccggatccccaatatgttggcaagttacatagcaactcagataagggcgacgggagcgtgaagtatattctcactggggagggagccggaacaattttcattattgatgacaccactggggatattcacagcacaaagtcactggaccgcgagcaaaagactcattacgttcttcatgctcaggccattgaccgcaggacaaacaagccattagagccggaaagcgagttcattatcaaagtccaagacatcaatgataatgccccaaaattcacagacgggccatatatcgtgacagtccctgagatgagcgacatgggcactagcgtgcttcaggtgaccgccacggatgccgacgatccaacgtacggaaatagtgctagagtggtgtactctattctgcagggccagccctacttttctgtggaccccaagactggcgtgatccgaaccgcactgcacaatatggatcgcgaggccagagaacactactccgtggtgattcaagcaaaggacatggcaggacaggtcggcggtttgtcagggtccacaaccgtgaatattaccctaaccgacgtgaacgataatcctcctagatttccacagaaacactaccagttgtatgtacctgagagcgctcaagtggggtcagccgtgggcaaaatcaaagcaaatgacgctgacactggaagtaatgccgatatgacatactctattatcaatggggatggcatgggcatcttctcgatttctacagacaaggaaactagggagggcatcctttcactaaagaagcctctgaactacgaaaagaagaagtcctacacgttgaatattgaaggtgctaatacgcatctcgattttcggttctctcatttagggccttttaaggacgcaactatgctgaagatcatagtgggcgacgttgacgagcccccattgtttagcatgccctcatatctgatggaggtctacgaaaacgcgaagattgggactgtggtgggaacagttctggcccaagatccggactcgaccaacagtctcgtcaggtatttcattaattacaacgtcgaagacgaccgcttcttcaacatcgatgccaacaccggtactattcggacgacaaaagtactcgatcgcgaagagactccttggtacaatattacggtcacagcttccgagatcgacaacccagatctgctgagtcacgtgacagttgggatcagggtgctggacgtcaacgataatccccctgaattggcacgcgagtacgacatcatcgtatgcgagaattccaagccgggacaagtgatccacacaatttccgctacggataaagacgattttgccaatggccctaggttcaacttcttcctggatgaacgtcttccagtgaaccctaattttacattaaaagacaacgaagataacacggcatctattttgaccaggagacgccgtttttctaggacagtccaggacgtctattacctgccaattatgatctccgatgggggtatcccctccctttcttcgtcaagtacgttaaccatcagagtgtgtgcctgcgagcgagacggtcgggtacggacgtgccatgcggaggctttcctctcctctgctggtctctccactggcgcactgatcgcgatcctcttatgcgtccttatcttgcttgcaattgtcgtactgtttatcacattaagacggtcgaagaaggaacctctcattatcagcgaggaggacgtgcgagaaaatgtcgtcacatacgacgacgaagggggaggcgaggaggacaccgaggcatttgatatcaccgctttgaggaacccgagtgccgctgaggaactgaagtatcggagagatattcgcccagaggtgaaactgacgcctaggcaccaaacatctagtaccctggaatccattgacgtccaggaattcatcaagcaacgcttagcagaggccgatttggatccttctgtgccaccttatgactctttgcagacctacgcatacgagggtcaacggtctgaggctggcagcatttcctcactggattcagccacaacgcagtctgaccaggattaccattacctcggggactggggtcccgagtttaagaaattggctgagctctacggcgaaatcgaatccgaaaggacaacttag

SEQ ID NO: 216450 - DNA, 2319 bp, synthetic construct
  misc_feature 1..2319: note = Description of Artificial Sequence: Synthetic coding sequence
  source 1..2319: mol_type = other DNA
atgaactgctacttactgctacgattcatgctgggcatccccctcctttggccctgtcttggagcaacggaaaatagccagaccaagaaggtgaagcagccggtgagatcccacttgcgcgtgaagagaggctgggtgtggaatcaatttttcgtccctgaggagatgaataccacaagccaccacatcggccagctccggtccgatttggacaacggcaataatagcttccagtacaagcttctcggagccggagctggctccaccttcattatcgacgaacgtactggcgacatttacgctatccagaaactggatagggaggaacggtccttgtacattctgagagcgcaggtgattgatatcgctactgggcgagcagtagagcccgagtccgagttcgttattaaggtgtctgatattaacgataatgaacctaagtttctggacgagccctacgaggcgatagttccggaaatgagccctgagggaacactggtcatccaggtgacagcttcagatgccgacgatccatccagcggcaataacgctcgactgctctacagcctcctacaagggcaaccctatttttctgtcgaaccaactaccggtgttataaggatcagctctaaaatggacagggaactgcaggatgaatattgggtcataatacaggctaaggatatgatcggtcaacctggggctctctccgggactactagcgtcctgattaagcttagtgacgtcaatgacaataagcctatttttaaggaatctctctatcgtctgactgtgagtgaaagcgcccctacggggacgtctatcggcaccatcatggcctacgataatgacatcggggaaaacgcagaaatggactactcgatcgaggaggatgactcccagaccttcgacatcatcaccaatcacgaaacccaggaggggatcgtgatccttaagaagaaagtggactttgaacaccagaaccactatggaatccgcgctaaagttaagaaccaccacgtccctgagcagctcatgaaatatcacacagaagcctctactacctttattaaaatccaagtggaagacgttgatgagcctccattgtttctgctgccttactacgtgttcgaggtctttgaagagacacctcagggaagttttgtcggagtggtctccgctaccgacccagacaatcggaaatctccaattagatatagtattacccgctctaaggtcttcaacataaacgataacggcaccattacaaccagcaacagccttgacagggagatttcggcctggtacaacctgagcataaccgctactgaaaaatacaatattgaacagatatcaagtattcccttgtatgtgcaagtgctgaatattaacgaccatgccccagaatttagtcagtactatgaaacctatgtctgcgagaacgccggatcgggacaggttatccaaaccatatcagctgtcgaccgggatgaaagcatcgaggaacatcacttttatttcaatttatcagtagaggataccaacaactcctcttttacaattattgacaaccaagacaacaccgctgtgatattgacgaacagaactggtttcaatctccaggaggagccggttttttacataagcatcctgattgcagacaacggaatcccttccctgacgagcaccaacacgttgaccatccatgtttgcgactgcggtgatagcggatcaacccagacatgtcagtatcaggagttagtgctcagcatgggcttcaaaacagaggtgattatcgctattcttatctgcatcatgattatcttcggatttattttcctgacacttgggttgaaacagagaaggaagcagatcctttttcctgagaagagtgaagatttccgcgagaatattttccagtatgatgatgaagggggtggggaggaggatacggaagcgttcgacatcgctgagctgagaagttccacaatcatgcgggaacgcaagacccgcaaaaccactagcgccgagattcggagcctgtatagacaatccctgcaggtcggccctgacagcgccatattccgaaaattcatcttagagaagctggaagaggccaatactgatccttgcgcaccccctttcgactctctacagacttacgccttcgaaggcaccgggtcccttgcaggaagcctgagcagcctcgagtctgccgtcagcgatcaggatgagagctatgactatctgaatgagctaggccctcggttcaagcgtctcgcatgtatgttcggatccgctgtgcagtctaacaattag

SEQ ID NO: 216451 - DNA, 1173 bp, synthetic construct
  misc_feature 1..1173: note = Description of Artificial Sequence: Synthetic coding sequence
  source 1..1173: mol_type = other DNA
atgaacaccacatcccaccatattgggcaactgaggtccgacctagacaacggcaataatagtttccagtataagctgctgggcgcaggcgcaggatcgacctttattatcgacgaacgaaccggagatatttatgctattcaaaaactggatagggaagaacgatccctatacatcctgcgggctcaggtgatcgacatcgcgaccggcagggcagtcgaacccgaatccgagtttgttataaaggtaagcgatatcaatgacaacgagcctaaattcttagatgaaccttacgaagccattgttccagagatgagccctgaaggcacgctagtaatccaagtcaccgcatcagacgccgatgacccctcatccggcaataatgccaggctcctgtactcattactccagggacagccttacttttctgtcgaaccgaccacaggagtcattaggataagtagtaaaatggaccgggagttgcaggatgaatactgggtgatcatccaagctaaggacatgatcggacagccaggtgctctaagtggcacaaccagtgtgctcattaagctctccgatgtaaacgacaataagccaatctttaaagagagcttataccgactaacagtgtccgaatctgcccctacaggaacctccattggaactattatggcctacgataatgacattggcgaaaacgcggaaatggactattctatcgaggaggacgacagccagaccttcgacatcatcactaatcatgaaacgcaggagggaatcgtaatcctcaagaaaaaagttgatttcgaacatcaaaaccactatggaattagagctaaggtgaagaatcaccacgtgcctgagcaattgatgaagtaccatacggaggcatccacaaccttcatcaaaatccaggtcgaggacgtggacgagccccctctattccttctcccttactacgtttttgaggtattcgaagagacaccgcagggatcattcgtgggggtggtgagcgccactgaccctgacaatagaaaatcacccattcgctattccattaccagatctaaggtgtttaatattaatgacaacggaaccataacaacctccaactctctagaccgggaaatttccgcttggtacaacctgagcatcactgctaccgagaagtag

SEQ ID NO: 216452 - DNA, 1473 bp, synthetic construct
  misc_feature 1..1473: note = Description of Artificial Sequence: Synthetic coding sequence
  source 1..1473: mol_type = other DNA
atgaactgttacttgcttctaaggttcatgctgggtatccccctactgtggccctgtctgggcgcaaccgagaactcccagacaaaaaaggtgaagcaaccggtccgctctcatctgagagttaagcgcggttgggtgtggaaccagttcttcgtcccggaggagatgaatactacttctcaccacatcgggcagctccggagcgacctggataacggcaacaattcctttcagtacaaacttctcggcgcaggagccggatcaacctttattatagacgagcgaaccggtgatatttacgccatccaaaagctggatcgcgaggagcggtctctgtacattctccgcgcacaggtaatcgatattgcaactggtagagctgtcgaaccagaaagtgagtttgtgataaaggtcagcgatattaacgacaacgagcccaagtttctggacgaaccttatgaggccattgtgcccgagatgagccctgagggtaccctggtgattcaggtgacggctagcgatgcagatgatcccagttccggtaacaatgccaggctgctatacagtctgctgcaggggcagccttattttagtgtcgagcccacaacgggtgtgattcgcatttccagcaagatggacagagagttgcaggatgagtactgggtgatcatccaggctaaggacatgatcgggcagcccggtgctctgtcaggcactacctccgttctgatcaagctcagcgacgtgaacgacaacaaaccaattttcaaggaatccctgtataggctgaccgtgagtgaatccgccccaactggcaccagcatcgggactatcatggcctatgacaatgacattggggagaacgccgagatggattattccatcgaggaagacgactcccaaacctttgatatcatcacgaaccacgagacccaggaggggatagtgatacttaaaaagaaggtagactttgagcatcagaatcactacggcatacgggcaaaggtcaagaatcatcatgtgcctgagcagttaatgaagtaccataccgaagcctcaacgacatttatcaagatccaagtagaagacgtggacgaacctcccttgttcctgctgccatattacgtttttgaggtgtttgaagagactcctcaaggttccttcgttggtgtagtctctgcgacagatcccgacaaccgaaaatctcccatccggtactcaatcactcgctccaaggtgttcaatattaatgacaatggcaccattaccacttccaacagcttagatcgagaaattagcgcttggtataacctctccattactgccactgagaagtacaatatagaacaaatttccagcatccccctgtacgtccaagtcctcaatatcaacgatcatgcaccagaattttcccagtattatgaaacctacgtgtgtgaaaacgccggttccggacagggactgttcttttag

SEQ ID NO: 216453 - DNA, 2406 bp, synthetic construct
  misc_feature 1..2406: note = Description of Artificial Sequence: Synthetic coding sequence
  source 1..2406: mol_type = other DNA
atgtggacatcgggccgaatgagcaatgctaaaaattggctcggcctggggatgtccctttatttctgggggctcatggatttgacaactactgtgctgagcgatacacccacaccacagggagaacttgaagctctgctctcggataaaccacagtcccaccagcggactaaacgatcatgggtgtggaaccagttctttgttcttgaggagtacacaggcacagatcccctctacgtaggaaaacttcatagcgacatggaccggggagacggaagtatcaagtacatcctgtcaggggagggggcaggcatcgtgtttacaatagatgacacaacaggcgatatccatgctatacagagactcgacagagaggaacgtgcgcagtatacgttgagggcgcaggctcttgatagaaggacaggcagaccgatggagcccgagtccgaattcatcattaagatacaagacattaatgacaatgagcctaaattcctggatggtccctacgtggcaacagtccccgagatgtcacctgttggcacgtcagtgattcaggtcaccgccacggacgccgatgatcctacgtatggtaacagcgcacgtgttgtgtactccatactgcagggacagccttatttctctgtggacagcaagactggagttattcggacagcgctcatgaacatggatcgggaggccaaggagtattacgaagttatcatacaagccaaagatatgggaggccagttgggagggctggccggaacaaccacagtgaatattacgctcagcgacgtcaacgacaatccgcctcgatttccacagaaacattatcagatgagcgtcctggaaagtgcgcctatttcttcaacagtggggagggtatttgcaaaagacctggacgaaggcatcaacgctgaaatgaaatataccattgtcgacggagatggagctgacgcttttgacatttccactgaccccaactttcaagttgggattatcactgtcaaaaaacctctgtcgtttgagtctaaaaaaagttacacactcaaggttgagggtgccaatccccacctggaaatgcgtttcttaaacctgggacccttccaagatactacaaccgtccacatctctgtggaggacgtggatgaacctcctgtatttgaacccggattctactttgtggaggtccccgaagatgtggctattgggacaaccattcagataattagtgctaaggatccggatgtcaccaataacagtatccggtactcaatcgatcgaagttcagaccccggtcgatttttttatgtcgatattacaacgggggctctcatgaccgcacgcccactggacagggaggaattctcttggcacaatatcacagtgcttgccatggagatgaataaccccagtcaggtgggttccgtccccgtgactattaaagtcttagacgttaacgataatgccccagagtttccccgattttacgaggctttcgtgtgcgagaatgctaaggcaggacagcttatccagacagtctctgccgtagatcaggatgaccctaggaacgggcaacacttctattattctctggccccagaggcagcaaataaccccaactttaccattcgcgacaatcaggataacactgcaagaatcttgaccaggaggtcgggctttaggcaacaggaacaaagcgtattccatctcccaatcttaattgcagacagcggccagcccgtcttgtcctctaccgggacgctgaccatccaggtttgtagttgtgacgacgacggccatgtgatgtcttgctccccagaagcgtatatgttgccagtgagcctcagcaggggagccctcatagccatactagcatgcatttttgtcctgcttgtgttagtgctgctgatactgtccatgagaagacatcgaaaacagccgtacataattgatgatgaggagaacattcatgaaaatatcgtcaggtatgatgacgagggcggaggcgaggaggacacagaagccttcgacatagccgcaatgtggaatcctcgtgaagcacaggccggagctgccccaaaaacacgtcaggacatgctgcctgagattgagtctctgtcacgctacgtaccccaaacctgtgctgttaatagcactgtgcactcttatgtcctcgccaagctatatgaggccgacatggatctgtgggctccaccttttgacagcttgcagacttacatgttcgaaggcgacggcagtgtggctggcagcctgtctagcttgcagtccgcaacttcggattccgaacaaagcttcgatttcctgaccgattgggggcctcgctttcgcaagctggcagagctctatggtgcctcagaaggcccagctcctctgtggtag

SEQ ID NO: 216454 - DNA, 2406 bp, synthetic construct
  misc_feature 1..2406: note = Description of Artificial Sequence: Synthetic coding sequence
  source 1..2406: mol_type = other DNA
atgtggaccagcgggaggatgtctaatgccaaaaattggctaggcttgggtatgtccctttacttctgggggttgatggatctgaccactaccgtacttagcgatactccaacccctcaaggagagctggaagctttgctttctgacaagccccagtcccaccagagaaccaagcgatcttgggtgtggaaccaattcttcgtgctcgaagagtataccggtaccgacccactgtatgtcggtaagctgcattctgacatggaccgcggagatggcagcattaagtacatattgtctggcgaaggtgcaggaatcgtcttcaccattgatgacactactggcgacatccatgctattcaaagattagatcgtgaggagcgtgctcagtacaccttacgcgcacaggcactcgatcggcgtactgggcgaccgatggagccagaatccgaatttatcattaaaatacaggacatcaacgataacgaacccaagtttctcgacggaccttatgttgcaaccgtgccggaaatgtcccccgtgggcaccagtgttattcaggttaccgctacagatgccgatgatccgacttacggaaacagcgcccgtgtggtgtatagcatcctgcaggggcagccctacttctccgtcgatagtaagaccggggtgatacgtaccgccctgatgaatatggaccgcgaggcgaaggaatactacgaggtcatcatacaggccaaagatatgggcggacagctcggtggcttggccggaaccactactgttaatattaccttgtcagacgttaatgataatcctcccaggtttccgcagaaacactatcagatgtctgtgctggagtccgctccaattagctcaaccgtggggagggtgtttgccaaggacttagacgaaggcatcaacgcagaaatgaaatacactattgttgatggagatggcgctgacgctttcgacatatccaccgatccaaactttcaggtcggcatcataaccgtaaagaagcccctgagctttgaatccaagaaaagttatacattaaaagtggagggggcaaacccgcatctggagatgcggttcctgaacctgggcccatttcaagacaccaccaccgttcatatttccgtggaagatgtagacgagccacccgtgtttgagcccggtttctacttcgtggaagtgcctgaggacgtcgctattggaactactatccaaatcataagtgccaaagaccccgacgttaccaacaacagtatcaggtattctatcgatcgctcctctgatccaggcagattcttctacgtagatataaccaccggcgcattaatgacggccagacccttggatagagaggagttttcttggcacaacattacagtactggcaatggaaatgaacaatccctctcaggtgggttctgtccctgtgactattaaggtcctagatgttaacgacaacgccccagagtttcctagattttacgaggcctttgtgtgcgagaatgcaaaagccggtcaactcatccagactgtgtcggccgtggatcaggacgacccacgcaatggccagcatttctactacagccttgcccctgaagccgcaaataaccctaattttaccattagagacaaccaggacaatacagctcgcattcttacgcgacgtagcggcttccgacagcaagaacagagcgtgtttcatctgcccattctgatcgccgactccggccagcctgtgctgagctctactggtaccttaacaatccaggtgtgcagctgtgatgacgatggccacgttatgtcttgctctcctgaagcttacatgctgccagtgagcttatctagaggggctctgattgccatcttggcctgcatcttcgttctgcttgtgttggtgcttctgattctttcaatgcgccgacatcggaagcaaccatacattatcgatgacgaagagaacatccacgagaatatcgtgagatacgatgacgaagggggaggcgaggaggacactgaggcctttgatatcgctgctatgtggaaccctcgggaagcacaagcaggggctgctccaaagacccggcaggatatgctgccagaaatcgagtccctttccaggtacgtgcctcagacttgcgccgttaactcaacagtgcacagctatgtgctagccaaactgtacgaagccgatatggacctgtgggccccaccatttgactccctgcagacatacatgttcgagggagacggttccgttgccggaagcctctcctcactgcagtccgccacaagcgatagcgagcagagctttgatttcctcaccgattggggcccaaggtttaggaaactggccgaactgtacggagcatccgagggtcccgctccgctgtggtag

SEQ ID NO: 216455 - DNA, 2406 bp, synthetic construct
  misc_feature 1..2406: note = Description of Artificial Sequence: Synthetic coding sequence
  source 1..2406: mol_type = other DNA
atgtggaccagtggtcgcatgtcaaatgctaaaaattggctgggtctgggtatgagtctgtacttttggggattgatggatcttactactaccgtgctgagtgacacccccacccctcagggagagttagaggcactgttaagcgacaagcctcaatctcatcagcgaacaaaacgatcctgggtctggaaccagtttttcgtgctcgaggagtatacagggacagatccactatacgtcggaaaactgcactcagacatggataggggagatgggtcaatcaagtacatactttcgggcgagggagccggaattgtgtttacgatcgatgataccacgggtgatattcacgccatccagagactggatcgcgaagaaagggcccaatacactcttcgggcacaggcgcttgatcgcaggacaggaagacctatggagcctgagagcgagttcattattaagattcaagacatcaacgacaatgaaccgaagtttctggacggaccatacgtcgcaaccgtgccagagatgtctcctgtgggtaccagtgtgattcaggttacagccacggacgcagacgatcccacatatgggaacagcgctcgcgtggtctactcaatcttgcaggggcagccttatttttccgtggacagcaagacaggcgttatccggaccgcactgatgaacatggacagggaggccaaagagtattatgaagttattattcaggccaaagacatgggcggtcagctgggaggcctggcagggacgacgactgtcaatatcacactgagtgatgtgaacgacaaccctcccaggttccctcagaagcactaccagatgagcgtgttggaaagcgcgcctatttcttcgactgtggggagagtctttgctaaggacttggacgaaggtataaatgcagagatgaagtatactattgtggatggcgatggtgccgacgcttttgacatcagtactgatcccaatttccaggtgggcataattacagtgaagaaacctctgagtttcgagtcgaagaaaagctatacactcaaggtggaaggcgctaacccacatctggaaatgaggtttttgaatctgggcccttttcaagacaccacaaccgtacacatctccgttgaagatgtggacgaaccacctgtgttcgagccaggattctacttcgtggaagtgccagaagatgtggccatcggaacaaccatccagataatttccgccaaagacccagatgtgactaataattctatacggtacagcattgatcggtcgtcagatcccggaaggttcttctatgtggacattaccaccggggctctgatgaccgccagaccattagatcgtgaggagtttagctggcataacatcaccgttttggccatggagatgaacaacccaagtcaggtcggctccgttccggtaacgatcaaggtccttgacgtgaacgataatgctcccgaatttccaagattctacgaggcattcgtctgtgagaacgcaaaagcaggccagcttattcagacagtaagcgcagtcgatcaggacgacccaaggaacggccagcatttttactactcactcgctcccgaggctgccaacaatcctaatttcaccattagagataatcaagataatactgcaagaatcctcactcgccgaagcggattccgtcaacaagagcaatctgtgttccacttacccatattaattgctgatagtggccagcctgtactgagctcgacaggtactttgaccatccaggtgtgctcatgcgacgatgacgggcacgtgatgagttgcagcccggaagcgtacatgctgccagtctccctgtcgcggggagctctgatcgctattctggcctgtatcttcgtgctcttggttctcgtgctgctgatcctgtccatgagaagacataggaagcagccatatatcatagatgacgaggagaatatccatgagaatatcgttcgctatgacgacgagggcggaggggaagaggatactgaagcctttgatatcgcggcaatgtggaacccacgagaggcccaagctggtgccgctccaaagacacggcaggacatgcttcccgagatagaatcattgagcaggtatgtcccgcagacttgcgcggtgaatagtaccgtgcatagctacgtgctggccaagctatacgaagctgacatggacttgtgggcccctccgtttgattcactgcagacgtacatgtttgagggtgatgggtctgtggctggatctcttagcagccttcagtccgctacatctgattcagaacagagctttgacttcttgaccgactggggacctcgcttccggaaactggccgagctgtacggggctagcgagggtcctgccccactctggtag

SEQ ID NO: 216456 - DNA, 2487 bp, synthetic construct
  misc_feature 1..2487: note = Description of Artificial Sequence: Synthetic coding sequence
  source 1..2487: mol_type = other DNA
atgaggccccgacctgaaggcagaggattaagggccggagtcgccctcagcccagcgttattgttactcctgcttttgccgccacctccaacactactcgggcgactctgggccgctggcacgccatccccaagtgctccaggagcacgccaggacggggctctgggagccggaagggttaaaagagggtgggtctggaaccagttcttcgtggtcgaagagtacactggcaccgagccattatacgtgggcaaaattcactctgattcagatgagggggacggtgccattaagtacaccattagcggggagggcgctggaacgatcttcctgatcgatgagctgacaggggacatccatgctatggaaagattggaccgcgagcagaaaactttctacacgttgcgagcccaggcaagagacagagccactaatcgcttgctcgagccagaatcagagtttatcattaaagttcaggatataaacgatagcgagccccgttttctgcatgggccatacatcggttccgttgccgagctttcgcccactggaactagtgtgatgcaggttatggcttcagacgcagacgatccgacttacggaagctcagccaggttggtgtatagtgtcctagatggcgagcaccattttacagtcgatccaaaaacaggcgtgatcagaacagctgtgccagatttggaccgcgagtcccaggagcgatacgaagtcgtcatacaagctaccgacatggccggtcagctcggagggctctccggaagcactactgtcactatagtagtaactgatgtgaatgacaatcctcctagatttcctcaaaaaatgtatcagttttccatccaggagtctgcccctatcggtaccgctgtgggaagggtcaaagccgaggattctgatgtaggagagaatactgacatgacatatcaccttaaggatgagagttcctccggcggtgatgtgtttaaagtcacaactgactcggatacacaggaggcaatcattgttgttcagaagaggcttgactttgagagtcaacctgtgcataccgtgatcttggaagctctgaacaagttcgtggatccccgatttgctgacctcgggacttttagagatcaggccatcgtaagggtggcggtcaccgatgtcgatgagccacccgagtttagacccccaagcggcctgctagaggtgcaggaggacgctcaggtaggatctctggttggcgttgtgaccgccagggacccagatgcggctaatagaccagtgagatacgctatagatagagagtcagacctcgatcagatattcgatattgatgctgataccggcgcaatagtgaccggcaaagggctggatagggagacggctggctggcacaatattactgtgctggccatggaggccgataaccacgcccagctgtcgcgcgcaagcctgagaattcgtattcttgatgtgaatgataatcctcccgaactggcaacaccatacgaagcagcagtgtgcgaggatgctaagccaggacagctgatccaaactattagcgtggtagacagggatgaaccacagggcggacaccgtttctacttccggctggtgcccgaggcaccgagtaatccgcacttctctctgctggacatacaagataacacagctgcggttcacacacagcacgtgggcttcaataggcaggagcaggatgtctttttcctgccaattctggtggttgacagcgggcctccaaccttgtcgagtaccggcactctcactattcgaatatgcgggtgcgactcctctggcactattcagtcgtgcaacaccactgccttcgtgatggctgcgtctctgtcacccggtgcgctgattgccctgctagtatgcgtattgatcctggtggtcctcgtgctccttatactgacactgaggcggcatcacaaatctcacctctcttccgacgaggatgaggacatgcgcgacaacgtgattaaatacaacgacgagggaggcggagaacaggataccgaagcctatgacatgagcgccctgcggtccctctatgattttggggagcttaaaggtggcgacggcggaggcagtgccggtggtggcgctggtgggggaagtggcggaggtgcaggcagcccacctcaggcgcatttgcccagcgaaaggcatagtctccctcagggtcccccatctccagaacctgactttagtgtgttccgcgacttcatcagcagaaaggtggcacttgcagacggcgatctgtcagtgcctccatacgacgctttccaaacatacgctttcgagggggctgacagcccagctgctagcctgtcctcactccattcaggctccagtgggtccgagcaagacttcgcctacctgtcttcatggggacctcggttcagacctctcgcagcactttatgctgggcatagaggtgatgatgaggctcaggccagctag

SEQ ID NO: 216457 - DNA, 2487 bp, synthetic construct
  misc_feature 1..2487: note = Description of Artificial Sequence: Synthetic coding sequence
  source 1..2487: mol_type = other DNA
atgcgcccaaggcccgaaggcagaggtctgcgagctggcgtagcgctgtccccggctcttctcctgctgcttctgctgccaccccctcccaccttgttgggaagattgtgggcagccggaactccgtcgccaagtgcccctggagcacgccaagacggagctttgggggctgggagagtcaaacggggttgggtttggaatcaattcttcgttgttgaagaatacacaggcaccgagcccctgtacgtgggcaaaatccattccgacagcgacgagggtgacggagccatcaaatataccatcagtggggaaggcgctggtaccatatttctcattgacgagttgaccggcgatatccatgccatggagagactcgaccgggaacagaaaacgttttatacactgcgggctcaagccagagacagggcaaccaaccgcctgctggagcccgagtctgagttcatcatcaaggtgcaggatataaacgattccgagccacgttttctgcacggcccttacatcggatcagttgctgagctctctccaaccggcacctccgtcatgcaagtgatggccagtgatgccgatgatcccacctacgggagctccgccaggctcgtctactctgtgctagacggtgagcaccactttacagttgaccccaagactggggtgattcgcaccgcagtgccagatttagatcgcgagtctcaggagcggtacgaagtggtgattcaggcgactgacatggccggtcagcttggcggactgagtggatcgaccaccgtcacgatagtggtgactgatgtgaatgataaccctccaaggtttcctcagaagatgtatcagttttccattcaagagtccgctccaatcggaactgctgtggggagagtgaaagcagaggattctgatgttggcgagaacaccgacatgacataccacctaaaggatgagtcctcatctgggggtgacgtctttaaagtaaccaccgatagtgatacccaagaggccataatagtcgtccagaaaaggctggacttcgaatcgcagcctgtgcacactgtgatcctggaggcactgaacaagtttgtggacccccgatttgccgatctcggaacctttagggaccaggccatcgtgagagtagcagttactgatgtggatgagcctccagagttccgtccgccaagcggcctgttagaggtgcaggaagatgcccaggttgggtcattggtgggcgtggtgacggcacgtgatccagatgcagccaatagacccgtaaggtatgcaatcgaccgtgaatcagatcttgatcaaatattcgatatagatgcagacacgggtgccatcgtgacaggaaaaggcctggaccgcgagacagccggatggcacaatataaccgtattggcgatggaggctgacaatcacgcgcaattgtcacgagcctcccttcggatcagaatcctcgacgttaatgacaacccacctgagctggccactccttatgaggcagctgtgtgcgaagatgccaaacccggacaattaatacagacgatttccgttgtggaccgggacgaacctcaaggcggacacagattttactttcgcctcgtgcctgaggcccctagcaatcctcactttagcttgctcgacattcaagataacacagccgctgttcatacacagcatgtggggtttaatcgccaggaacaagatgttttcttcttgcctattctagtggttgatagtgggcctccgaccttgtcaagcaccgggaccctgaccatccgcatctgcggctgcgacagctctggtactatccagtcctgtaacactacggcattcgtcatggctgcaagtctgtctcccggtgccctgatcgctctcctcgtctgcgtgctgattctggtggtactcgtgctgctcattctgacattgcggaggcaccataaatctcatctgtcctctgatgaggatgaagatatgagagataacgttatcaaatacaacgatgagggcggtggggagcaggacacagaggcttacgatatgagtgcccttagatcgttatatgattttggcgagttgaagggcggagatgggggtggctccgcaggcggaggtgcaggcggaggctcaggtggtggcgctggcagcccgcctcaggctcacttaccctccgagaggcattcccttccgcagggccctcccagccctgaacccgatttcagtgttttccgcgatttcatctccagaaaagtcgctctagcagacggggatctgtccgtgccaccttatgatgccttccagacatacgcgtttgagggagctgacagtccggctgccagcctgtccagtctgcactctgggtccagcggatcggaacaagattttgcctacctcagttcatggggcccaagattcaggccgctcgcagccctgtacgctggacataggggtgacgacgaggcgcaggctagttag

SEQ ID NO: 216458 - DNA, 2490 bp, synthetic construct
  misc_feature 1..2490: note = Description of Artificial Sequence: Synthetic coding sequence
  source 1..2490: mol_type = other DNA
atgggcctgccacggggacctttagcgagtctgctcttacttcaggtctgttggctccagtgcgcagctagcgagccctgtagagcagtcttcagggaggcagaggttacgctggaggcaggcggagccgagcaggagccgggtcaagccttaggaaaggtattcatgggatgtccaggacaggagccagccctcttttccacggataacgatgacttcactgtcagaaatggtgaaacggttcaagaaaggagatccttaaaggaacggaacccccttaagatctttccaagcaaacggattctacgccgacataagcgggactgggtagtggcccctatctctgtcccagagaatggaaaaggaccttttcctcagaggctcaaccagttgaaatctaataaggatcgcgacacaaaaattttttattccatcaccggtccgggagcagactcacccccagaaggcgtgttcgctgtcgaaaaagaaactgggtggttgttgctgaacaagccactggatcgcgaagaaattgcaaagtatgaattgtttggccacgcagtgagtgaaaatggagctagtgttgaggatcctatgaacataagcattatcgttaccgatcagaatgaccataagccaaaatttacgcaggataccttccggggttccgtgctcgagggtgtgctccctgggactagtgtcatgcaggtcacggccactgacgaggatgatgcaatctatacgtacaacggggtggtggcctattccattcacagtcaggagccaaaagacccccacgatctgatgttcaccattcatcgcagtactggcacgatctcggtcatctcaagtggtttagacagagaaaaggtacctgaatataccctgactattcaagcgacagatatggacggcgatggctcgacgaccacggccgttgctgttgtggagatactggatgccaacgataacgccccaatgtttgatcctcagaaatatgaggcacacgtgccagaaaacgctgtgggacacgaagttcagcgcttaaccgtaaccgatctcgacgcgcctaattcaccagcctggcgcgctacttatttgatcatgggcggagacgatggggaccactttactatcactactcaccccgaatccaatcagggtatcctcactactcgcaagggtttggactttgaggctaaaaatcaacataccctgtacgtcgaagtgaccaacgaggctcccttcgttttgaaactaccaacttcgacagcaaccatcgttgtgcacgtggaggacgtcaatgaggctcctgtgttcgtacccccttccaaggtggtggaagtacaggaagggatacctacaggggaaccggtgtgtgtctacactgccgaagaccccgataaggagaaccaaaaaatatcctataggatccttagggaccctgccggatggttagcaatggatcctgactccggacaagtcacggccgtgggcaccctggaccgggaggacgagcagttcgtgcgaaataacatctatgaagttatggtgctggctatggacaacggcagcccccctaccacgggaacaggaactctccttcttacccttatcgatgtcaacgaccacggacccgtgcctgagcctcgacaaatcacaatctgcaaccaatcccctgtgaggcaggtcctcaatataaccgacaaggacctgtccccccacacatccccctttcaagctcaactgacggacgactctgatatttactggaccgccgaagtcaacgaggagggggatacagtcgtgttatccctgaaaaagttcttgaagcaggacacctacgatgtgcatctgtccctttcggaccacggcaacaaggagcagttgacggtgatccgggcaactgtatgtgattgtcacggtcatgtagagacttgtccgggaccttggaagggcggatttatcctccctgtgcttggagctgtgctagcattgctgttcctgctcctcgtgttgttgctgctggtacgcaaaaagaggaagatcaaagaacctttgctgctgccagaagacgacactagagacaacgtgttctattatggagaggaaggcggaggggaggaggatcaggactatgacattacccagctccatcggggtcttgaagcccgtccagaagttgtattgaggaacgatgttgctcctactattatacccacaccgatgtataggccaagacctgccaatcccgacgagatcggcaattttatcattgaaaacctcaaggcagcaaacactgaccctacagccccaccctacgatacgctcttggtcttcgattacgaaggcagcgggtctgacgccgctagcctgtcctcactgacctcctcagcatcagaccaggaccaggactatgactatctgaacgagtgggggtctcgatttaagaagctcgctgatatgtatggcggaggggaagacgactag

SEQ ID NO: 216459 - DNA, 2355 bp, synthetic construct
  misc_feature 1..2355: note = Description of Artificial Sequence: Synthetic coding sequence
  source 1..2355: mol_type = other DNA
atgggactgcccagaggtccactggcatcactgctgctgctgcaggtctgttggctgcagtgcgcagcctccgaaccctgccgagcagtttttcgcgaggctgaagtcactctggaggcaggcggagctgaacaggaacccggacaagccctgggaaaagtattcatgggatgccccggtcaggagccggctctgttctcaactgataatgatgattttacggttagaaacggggaaactgttcaggagcggcgtagcctgaaagagagaaatcctttaaagatcttcccttcaaagaggatcctcagacgccacaagagggactgggtggtagctcctattagtgtgcctgagaacgggaagggtcccttcccccagagattgaatcagttgaagagcaacaaagacagagacaccaaaattttttactcgattaccggaccaggcgcagactccccgcctgaaggtgtgtttgcagtggagaaggagaccggatggctgctgctcaacaagcctctggatcgtgaggaaattgccaagtatgagttgtttggacatgccgtctctgaaaacggagcttccgtggaggatccaatgaatatatccatcatcgtcactgaccaaaacgaccacaagcccaaattcacgcaagacacctttaggggatcagtactcgaaggagtgcttcctggaaccagtgtcatgcaggtgactgcgacagacgaggatgacgcgatatatacatacaatggagtggtggcgtactcgatccactctcaggagcccaaggaccctcacgatctgatgttcactattcaccgcagtaccggaacaatctcagtcattagtagtggactcgacagggagaaggtgcccgagtataccttgacaattcaggcaacagacatggatggtgacggctctaccaccactgcagtagccgttgttgagatcctcgatgcaaacgacaatgcacccatgttcgatccccagaagtatgaggcacatgtccccgagaacgccgtcggccacgaagttcagaggttgaccgtgacagaccttgacgctcccaattcaccagcgtggcgcgcaacttacctgatcatgggcggtgatgatggagatcattttacaatcaccacccatcctgagagcaaccagggcattttaaccacaaggaagggcctggatttcgaggccaaaaatcagcacaccctgtacgttgaggtgactaacgaagccccattcgtactcaaattgcctaccagcacggccaccattgtggtgcatgttgaagatgttaatgaggccccagtgttcgtccctcccagcaaagtggtggaagtacaagaagggattcccaccggagagcccgtgtgcgtgtacaccgccgaggaccctgacaaggaaaaccagaaaatcagttaccgcatattaagagatcccgctgggtggctcgcgatggatccagatagtggccaggtgacagctgtggggaccttggatagagaggacgagcagtttgtgaggaataatatttatgaagtgatggtactggccatggacaacggctctccccctacaacagggacaggaacacttcttctaactttgatcgacgtcaatgatcacggccctgtccctgagccacgccagataacaatttgcaaccagtcaccagtgcgtcaagtgctaaatatcaccgacaaggacctgtctcctcacacttcaccctttcaagcccaattgaccgatgactccgatatctattggactgcagaagtaaatgaggagggcgacacggtggttctctctctgaaaaaatttctcaaacaggatacctatgatgtgcatttgtctctttcagaccatggaaacaaggaacagttaacggtcatccgtgccacggtgtgcgattgccacggacatgtggagacatgccccggtccctggaaaggcggattcatcctaccagtcctcggagcagtgttggcgttgcttttcctgttactggttttgttgctgttggtgcgaaagaagcgtaagataaaagagcctctgttacttccagaagacgatacaagagacaatgttttctactacggcgaggaaggaggcggagaagaagatcaagactatgatattactcagttgcaccgcggactggaagctaggccggaagtggtactgcggaatgacgttgcccctactattattcctactccaatgtaccggccacgtcccgctaacccggatgaaatcggcaactttattattgagggtcggggtgagcggggatcccaacgaggaaatggcggtctgcaactcgcgagaggccgaacacgtcgaagctag

SEQ ID NO: 216460 - DNA, 2325 bp, synthetic construct
  misc_feature 1..2325: note = Description of Artificial Sequence: Synthetic coding sequence
  source 1..2325: mol_type = other DNA
atgggctgtcccggacaggaaccggcactgttcagcaccgataacgacgatttcacagtgcgcaatggggagaccgtccaggaacggcgatctttgaaggaacgcaatcctcttaaaattttccctagcaaacgcattctccgtagacacaaacgggattgggttgtggccccaatttctgtcccagagaacggaaaaggcccattcccacagcggcttaaccagctgaagtctaacaaggacagggatactaagatattttactccataaccgggccaggggctgacagtccacctgaaggagtcttcgcagtggaaaaagagacagggtggctcctgttgaacaagccccttgacagggaagaaattgctaagtacgagctgtttggacacgcggtctcagagaatggtgcgagcgtcgaggatcccatgaacatcagtatcatagtcaccgatcagaatgaccacaaacccaagtttacccaggatacttttcggggatccgtgctggagggggtactcccaggaacttccgtcatgcaggtgactgcaaccgacgaagacgacgcaatttatacatacaacggagtagtggcctattccattcactcgcaagagccaaaggaccctcacgatctgatgttcaccatccatcgctccaccggcacaatcagcgtgatttcctccggtcttgaccgtgagaaagtcccagagtacacgctgacgatccaggccacagatatggatggcgacggctcaacaactaccgccgtggcggtggtcgagattctggacgcaaacgataacgccccaatgttcgaccctcagaagtatgaagcccacgtgcccgaaaacgcagtgggccatgaagttcagcgccttaccgttaccgatctggatgcaccaaattctcccgcttggagggcgacatacctgattatggggggtgacgacggagaccattttactataactacgcatcccgagagcaaccagggaatccttaccacacgaaaaggtcttgactttgaagcgaagaaccagcatactctttacgtggaagtcacaaatgaagccccattcgtgttaaagcttccaacgtcgaccgcaactatagtggtccatgtcgaagatgtgaatgaagcccctgtctttgtccccccaagcaaggtggtcgaagttcaggaggggatcccaaccggggaaccagtgtgcgtctacaccgcagaggacccggataaggagaaccagaaaatttcctaccgcatacttcgagatccagctggctggttagcaatggaccccgattcaggacaggtgaccgcagtaggcacactggaccgtgaggacgagcagtttgtgcggaataatatctacgaggtgatggtcctggcaatggacaatggatctccccctaccacgggaactggcaccctgttgctgactctgattgatgtcaacgatcatgggcctgtgcctgaaccacggcagattacaatctgtaaccaaagccctgtgcgacaggtgctgaacattacagataaggacctgtcgccccacacctctcccttccaggctcaactcaccgacgattccgacatttattggacagccgaagttaacgaagagggggacacagtggttctgtcactcaaaaagtttttaaaacaggatacttacgatgttcacctgagcctgtctgatcatggcaacaaagagcagttaacggtaattcgcgctacagtgtgcgactgtcacggccacgtggaaacatgccccggtccttggaaggggggtttcatcctgcccgtcctgggagctgtgctggctcttctgtttctactgttggtgctgctgctgctggtccgcaagaagaggaaaataaaagaaccactgctgctgcccgaggatgatactagagataatgtgttttactatggagaggaaggaggaggagaggaggaccaggactatgacatcacacagcttcatcgcggattagaggcccgacccgaagttgttctgcgcaacgatgtggcccctacaatcattcccactccgatgtatcgtccccgtcccgcaaaccccgacgagattggaaatttcatcatcgaaaacttaaaagccgctaatacagatccaaccgcgccaccctatgacacgcttctggtattcgactatgaagggtcgggaagcgatgccgcaagtttaagttcactgacgtcttccgcctctgatcaggatcaggattacgactatctgaacgagtggggttcaaggtttaagaagctggcagatatgtacggcggaggcgaggatgattag

SEQ ID NO: 216461 - DNA, 2751 bp, synthetic construct
  misc_feature 1..2751: note = Description of Artificial Sequence: Synthetic coding sequence
  source 1..2751: mol_type = other DNA
atgaccgcgggagccggagtgttgttactcttgctgtctttgtctggggctctcagagcccataacgaagatctgactacacgcgaaacttgcaaggccggattctccgaagacgattatactgccctgatctcccagaatatcctcgagggtgagaaactgctccaagtgaagttctcaagctgcgtcggcaccaagggtactcaatacgagacaaactccatggacttcaaggtcggcgctgatggcacagttttcgcaactcgagagctgcaggtcccctcagaacaggtcgcttttaccgtgacggcttgggattcccagaccgccgaaaagtgggacgctgtggtccgcctcctcgttgcacaaacttccagtccgcacagcggccacaagcctcaaaagggaaagaaggtcgtggcactggaccctagcccacccccaaaagacaccctgctgccgtggccacaacatcagaatgcaaacgggctccgccgaaggaagagagattgggtgatcccacctatcaatgttcctgaaaacagcagaggcccatttccacagcaactcgtgcgcattagatccgacaaggacaacgacattcccatacgatattctattacaggcgttggggcagatcagcctccgatggaagtgttctctatagactctatgagcggaaggatgtacgtgactagacctatggatagggaggaacatgcaagctaccacctgcgggcacatgccgtcgatatgaacggcaacaaggtggaaaatcccatagacctgtacatatatgtgatcgacatgaacgataatcgaccagagttcatcaaccaagtgtacaatgggagtgtggatgaaggaagcaagccaggtacttatgtaatgactgtcactgcaaacgacgccgatgattccaccactgcaaatggcatggtccgctaccgcatcgtgacccagacccctcagtcaccttcacagaacatgtttacaatcaacagcgagactggagatatcgttacggttgccgctgggttagatcgggaaaaggtgcagcagtacacagtgatcgttcaggctaccgacatggaggggaatctcaactacggcctctcaaacaccgcaactgcaattatcacagtgaccgatgtcaacgacaaccctccagagttcaccgctagtacatttgctggggaggttccagaaaaccgggttgaaactgtcgtggcaaacctcaccgtcatggatagagaccagccacacagtcccaactggaacgccgtttacaggatcatcagcggggatccaagcgggcacttttcagtgaggaccgaccctgtgacaaacgagggcatggtaacagtcgtgaaagccgttgattacgaattgaatcgggcttttatgctgacagtcatggtgagcaatcaggcccctttggcctccggcatccagatgagcttccagagtactgctggtgtcaccatatcaattatggacatcaatgaagctccatactttccttccaaccacaagctgatcagactagaggagggagtgccaccaggcactgtactcaccactttctccgctgtcgaccccgatagattcatgcagcaagctgtccgatactcaaaattaagcgacccagcctcttggctccatattaatgccactaacggacagataacaacagcagctgtcctcgaccgggagagtctctacacgaaaaataacgtatacgaggccacgtttcttgctgccgataatggaattccacctgcatcagggacagggacactgcagatatacttgattgacattaacgataacgcacccgagttgttgccaaaagaggcccaaatttgcgagaaacccaacctgaacgccattaatattacggctgcggacgccgatgtggatcccaacataggcccttacgtgttcgaattgccttttgtccctgccgctgtccggaagaattggaccatcaccaggctgaatggcgattacgctcagctttcgctcagaatcctgtacttggaggcaggcatgtatgacgttcccatcattgtcacggactctgggaaccccccactgtcaaatacgtctatcatcaaggtgaaagtttgcccttgtgatgacaatggtgactgcactacaattggggcagtggccgctgctggactgggcacaggagcgatcgttgcgatcctgatatgtatcctgatcctgctgacaatggtgctcttgttcgtcatgtggatgaaacggagggaaaaagagagacacaccaaacaactcctgatcgacccagaagacgacgtgcgagacaacatcctgaaatacgatgaggagggcggaggggaggaggaccaggactacgacttgagtcagctccagcagccggaagctatgggccacgtgccaagcaaggctccaggcgtgagacgggtggatgagaggcctgtcggggcagagcctcagtatcctatacgacctatggtgcctcaccctggcgacattggcgacttcattaacgagggacttagggctgctgataacgatcccacagcgccaccttatgattcccttctcgtgtttgattatgaaggaagcggttccacagccggatcagtttcctctctgaatagctcctcctccggggaccaggattatgactaccttaatgactggggtcccagattcaagaaactggccgacatgtatgggggaggtgaggaggactag

SEQ ID NO: 216462 - DNA, 2475 bp, synthetic construct
  misc_feature 1..2475: note = Description of Artificial Sequence: Synthetic coding sequence
  source 1..2475: mol_type = other DNA
atgcccaagtctaccgggatgctacatggcggaagggagaacgctggagttaagttcagctcgtgtgtcggaaccaagggcacccagtacgaaacttcttccccacatagcgggcataaaccacaaaaaggaaaaaaggtagtggcgcttgaccctagccctccacccaaggacacgctccttccatggcctcagcaccagaatgcaaacggcctacgtagacggaaacgtgactgggtaatcccaccaattaacgttccagaaaactctaggggacccttccctcaacaactggtgcgcattaggtccgacaaggacaacgacattcccattaggtattcaataaccggtgtcggggcagatcaaccacccatggaggtcttttcaatcgactctatgagtgggaggatgtacgtgacaaggcccatggaccgggaggagcatgccagctaccatcttcgagcccacgctgtcgatatgaatggcaacaaagttgagaatcccatagatctctacatctatgtaattgacatgaacgacaaccgccctgagtttataaatcaggtatacaatgggagtgtggatgaagggtctaaacctggcacttacgtcatgaccgtcacagccaacgacgccgatgacagcacgacggccaatggaatggtgaggtacagaatcgtgactcagacacctcaaagcccaagccagaacatgttcaccattaactccgaaaccggggacatcgtgaccgtcgccgcaggcttagatcgggaaaaggtgcagcagtacactgtcattgtgcaagcaaccgacatggaaggaaacctgaactacggcctgtctaatacagccactgcgattattacagtcacagatgtgaacgacaaccccccagagttcactgccagcacatttgccggagaggtgccggagaaccgcgtggaaaccgtcgtcgctaatctcactgtgatggatagggaccagcctcacagtcctaattggaacgccgtttataggatcatctcgggggatcccagtggccacttctccgtcagaacagaccctgtcacaaacgagggcatggtcaccgtggttaaagccgtagactatgaactcaacagggcctttatgctcactgtcatggtatcaaatcaagcccctcttgcctccggaatccagatgtcatttcagagtactgccggtgtaaccataagcatcatggacatcaatgaagccccatacttcccatcaaatcataagctcattcggctggaagaaggcgtgccacccggtaccgtgctcaccactttcagcgccgtagaccctgataggtttatgcagcaggctgttcggtactccaaacttagcgatccggcaagttggttgcatatcaacgcaacaaacggccagattaccactgcagccgtgctggacagagagagcttatacaccaagaacaacgtttacgaggccaccttcctggctgcggacaacggcattcctcctgcaagcggaaccgggacgctgcaaatttatctgattgatatcaacgataacgctcccgaactgctgcccaaggaggctcagatctgtgagaagcccaatctcaatgcaatcaacattactgccgctgacgcagacgtcgaccctaatattggcccttatgtgtttgagttaccatttgtccccgcagccgtgagaaagaactggacaattacacgcttgaatggtgactacgcccaacttagcttgcgtattctctatctggaagctggcatgtacgacgtgcctatcatcgtgaccgacagtggcaacccaccactatctaacacctcaattattaaggtgaaagtttgtccctgcgatgataacggcgattgtactacaattggggcagtggccgcagcgggacttgggactggagccattgtggctatcttgatctgtatactgattctgctgacaatggtcctactttttgtgatgtggatgaaacgaagagagaaagagcgtcataccaaacagttgctgatcgaccctgaggacgacgtgcgggataatatcctaaaatacgacgaggaggggggaggggaagaggatcaggattatgacctgagccagcttcaacagcctgaggctatggggcacgtgcccagtaaggctcctggggttcgtagagttgacgaacgccctgtaggagctgagccacagtacccaattcgacctatggtgccccatcctggcgacataggggacttcatcaatgagggcttgcgcgcagccgacaacgatcccactgcaccaccgtatgactccctgttagtctttgattatgaagggtcaggctccacagcaggttccgtctcatcattgaattcgtcaagcagcggtgatcaagactatgactatcttaacgattgggggccaaggtttaagaaactggcagatatgtatgggggaggtgaggaagactag

SEQ ID NO: 216463 - DNA, 2529 bp, synthetic construct
  misc_feature 1..2529: note = Description of Artificial Sequence: Synthetic coding sequence
  source 1..2529: mol_type = other DNA
atggacttcaaagtgggcgctgatggcaccgtgtttgccactagggagttgcaggtacctagcgagcaggtagccttcaccgtcaccgcctgggactcccagactgctgaaaagtgggacgcagtggttcgcttgctggtggcacagacatcctccccacactcaggccataagcctcaaaaaggaaagaaagtcgttgcattggatccatccccaccacccaaagacacactgctgccctggccccaacaccaaaacgccaacggccttcgtcggaggaaaagggactgggtgattcctcccatcaacgtccctgagaattcacgcggaccattcccgcagcagcttgtgcgcatccggagcgataaggataatgacattcccattcgctactcaatcactggcgtcggagctgaccagcctccaatggaggttttctccattgactcaatgtcgggccgaatgtacgttacccgtcctatggaccgagaggaacatgcttcgtaccatttacgtgcccacgccgtcgacatgaacggaaataaggtagagaatccaatcgacttgtacatctacgtaatcgatatgaacgacaaccggcctgagttcatcaaccaggtctataatggaagcgtggatgagggttctaaacccggaacctacgtcatgaccgtgactgccaacgatgctgacgattcgacaaccgctaatgggatggtgagataccgcattgttactcagacgccacagagcccgtcacagaacatgtttacaattaattcagaaacaggtgacattgttaccgtggctgccggactggatcgcgaaaaagtgcagcagtatacagtgatcgtccaagccacagacatggagggtaatctgaattatggactgtcaaacactgccacagctattattaccgtgactgacgtcaacgataaccctccagagttcactgccagcactttcgctggcgaggtgccagagaatcgagtggagactgtggtggccaatctaacagtgatggaccgggatcagcctcacagtcccaactggaatgccgtgtaccggattatatcaggcgatcccagcggacattttagcgttaggactgatcccgttactaacgagggcatggtgactgtagtcaaggccgtggattacgaacttaatagagcttttatgttgactgttatggtctctaaccaggccccactggcaagtggaatccaaatgtccttccagagtacagctggcgttacaataagtattatggatattaatgaagccccatatttcccttcgaaccataagctgattcgattggaggagggagtgcctcccggtacggtgttgaccacattttccgcagttgacccggatcgattcatgcagcaggctgtccgttactctaagctttcagatcccgcaagctggctgcacataaacgccactaatggtcagatcactactgccgctgtgttggaccgcgaaagcctgtatacaaagaataatgtgtatgaggccacgtttctggcagctgacaacgggattccacccgcttccgggactggaactctgcaaatctacctcattgatattaatgataatgccccagagttgctgccaaaagaggcccagatatgtgagaagccgaacctgaatgccatcaatataacagcagcggacgctgatgtggaccccaatatcggcccatatgtgtttgagctgcccttcgtccctgctgccgtgagaaagaactggacgattaccagactcaacggggattacgcccagctgagcctgagaatactgtatcttgaagcaggaatgtatgatgtcccaataattgtcacagactctgggaatcccccactctcaaacaccagcattataaaggtcaaggtatgcccgtgtgacgataacggggactgcaccaccatcggagcggttgccgctgcagggctgggcaccggagccattgtggctatactgatctgcattctgattctactgaccatggtcctgctgtttgtgatgtggatgaagcgcagagagaaggagcggcacaccaagcagcttctgattgatcccgaggatgatgtacgggataatattctgaagtacgacgaggagggcggtggtgaggaagatcaagactatgacctcagtcaactccagcagccggaggccatggggcacgtgccttcaaaggcccctggtgtgcgaagggtcgatgagcggccagtgggcgctgagccccagtaccccattagacccatggtgccccaccccggtgacatcggggactttattaatgagggtctccgggctgccgacaacgaccccacagcgccaccctacgattcattgcttgtgtttgactacgagggaagcggcagtactgctggatctgtgtcttcattaaacagttcaagctctggcgatcaagattacgactatctcaacgactggggaccgagatttaaaaaactggcggacatgtacggcggtggcgaggaagattag

SEQ ID NO: 216464 - DNA, 2358 bp, synthetic construct
  misc_feature 1..2358: note = Description of Artificial Sequence: Synthetic coding sequence
  source 1..2358: mol_type = other DNA
atgaaactcggtaaagtggagttttgccactttctgcaactgatcgcgctatttctctgcttctctggtatgtcacaggctgagttgtcccgctctcgcagcaagccgtacttccagtctggtcgcagccgtactaagcgttcttgggtctggaaccaattctttgtgctggaggagtatatgggctctgaccctctctacgtcggaaaactgcactctgatgtggataaaggcgacgggagcattaagtatatcttgtctggcgagggagcttcctccatattcatcattgacgaaaacactggggatattcatgcaacgaagcgcctcgacagagaagaacaggcctactacactctgcgtgcgcaggccttggatcggctgactaacaaaccggtggagccggagtcggaattcgtaatcaaaatccaggatatcaacgacaacgagcccaaattccttgatggaccctataccgcgggtgtcccagagatgagtcctgtggggacctcggtagtccaggttaccgcaacggacgcagacgacccaacgtacgggaattcagcaagagtagtctactcaatcctgcagggtcagccgtatttctcagtggagcctaaaaccggtgtgattaagacagcgctgcccaatatggacagagaggccaaggaccagtacttactggtgattcaggctaaagacatggtggggcagaacggcggattgtcaggcacaaccagtgtgactgtgaccttaaccgatgtcaacgacaaccctccgcgattccccaggagatcctatcaatacaacgtgcctgagagtttgcctgttgcttccgtggttgctcgcataaaggccgcagatgctgacatcggcgcaaacgcggaaatggagtacaagattgtggacggcgatggcctgggtatttttaaaataagcgtggacaaagagacccaggaagggattatcaccatccagaaagagctcgacttcgaagcaaaaacctcctacacccttaggattgaagctgcgaataaagatgccgacccccgatttctgagtttgggtcccttctccgacactaccaccgtgaaaatcatagtggaagacgtagacgaacctccggttttttcctcacccctgtaccctatggaagtgagtgaggcgacgcaggtaggcaatatcatcggcaccgtagccgcacatgaccctgatagctctaactctccagtgcggtatagcatcgatcgcaacaccgatctggaacgctatttcaacattgatgccaattccggagtcataactaccgccaaaagcttggatcgcgagacaaatgcaatacacaatataaccgtgctggcaatggagtctcagaacccatcacaggtgggaaggggatacgtggccatcactatactcgatatcaatgacaatgcacccgaattcgccatggattacgagacgaccgtctgtgagaacgcccaacccggtcaggtgattcagaagatctccgctgtcgacaaagatgaaccctccaacggtcaccagttctacttctccctcactacagacgccaccaataatcacaatttctctctgaaggacaataaggataacactgcttcaatccttacaaggagaaacggcttcagaagacaggagcagagcgtctactacctcccaatcttcattgtggattcaggctcaccttcattatctagcactaacaccctcacaatcagggtgtgcgactgtgacgccgacggtgtggcccagacctgcaatgccgaggcatatgtgctacccgcaggtttatccacaggcgcactgatagctatcttagcgtgcgtactgacccttctggtccttatactcctgatagtgacgatgagacgacggaagaaggagcccctaatctttgatgaggagagagacatacgggaaaatatcgtgaggtacgacgacgaggggggaggtgaggaagacacagaggcctttgatatggcagcgctgcgaaacctgaacgtgatcagggatactaagactaggagggatgtgacgcccgaaatacagttcctcagcaggcccgctttcaagtctataccagataacgttattttccgtgagttcatatgggagaggctgaaagaagccgatgtggaccctggtgccccaccctatgacagcttgcagacctatgccttcgagggcaatggttctgtcgctgagagcctgtcttcactggacagcatttcctccaacagcgaccaaaactatgattatctgtctgactggggcccacgattcaaaaggctggctgatatgtatggcaccgggcaggaatccctttattcctag

SEQ ID NO: 216465 - DNA, 2358 bp, synthetic construct
  misc_feature 1..2358: note = Description of Artificial Sequence: Synthetic coding sequence
  source 1..2358: mol_type = other DNA
atgaagctgggcaaggttgaattttgccatttcctccaactgattgcactgttcctgtgtttctccggcatgagccaggccgagctgtctaggagccgcagcaagccctatttccaatcaggccgttcgaggaccaaaaggagctgggtatggaaccagtttttcgttctcgaagagtatatggggagtgatcccctctacgtggggaagttacactcagacgtggataagggggacggttccattaagtacatcctctctggcgagggagcatcgtccatttttattatcgatgaaaataccggggatatccatgctacaaaacggcttgaccgagaggaacaagcctactacaccttgagggcccaagcactggaccgactaactaacaagccagtagaacccgagtccgaattcgttataaagatccaggacattaacgacaacgagccaaagttcctagatgggccatacaccgccggtgtcccagaaatgagtcccgtgggaacatccgtagtgcaagtcacagcaaccgacgcagacgacccaacatatggcaatagtgcgcgagtggtgtactctattctgcagggccagccctatttctccgttgaaccaaaaacaggcgttatcaagactgcactgcccaatatggatcgagaagctaaggaccaatacttactcgtcatacaggcaaaagacatggtgggccagaacggaggattatcaggaaccacgtcggtcaccgtcaccttgacggacgtgaacgacaatccaccccgattcccaagacgttcctaccagtataacgtgccagagtccctgccggtcgcctcagtagtcgctcggattaaggccgctgacgcagatattggagcgaatgccgagatggagtacaagatagtggacggtgatggtttaggaatttttaagatttccgtagacaaggaaacccaggaaggcataataactatacagaaggagttggacttcgaagccaagacatcatatacactgaggatcgaggccgctaacaaggatgctgatcccaggttcctttctctcggaccgttttccgacactaccactgtcaaaatcatcgtggaggacgtggatgagccacccgtctttagctcacccctgtatcccatggaagttagcgaggccacccaggtgggcaatatcatcggtaccgtggctgcccatgaccctgattctagcaactctcccgtgagatatagtatagataggaacaccgacctggagaggtacttcaatattgacgctaatagcggagtgattaccactgcaaagagcctagatcgcgaaacaaacgctatccacaatattacagtcctcgctatggagtctcaaaacccctcccaagttggcagaggctatgtggccatcactatcctagatataaatgacaatgcgccagaatttgccatggactatgagactaccgtgtgcgagaacgcccagcctggccaggttatccagaagatttcagctgtggacaaagacgagccatccaatgggcaccagttctatttctcactgaccactgatgcgactaataaccataatttctcgttaaaggataacaaggataacaccgcttcaatactgaccagacgaaatggatttagacgccaggagcagtcggtgtactaccttccgattttcatcgttgatagcggctctccctccctctccagtacaaacaccttaactatacgggtttgtgattgcgacgccgacggagtggcacagacgtgtaacgcagaagcctatgtgctgccggcaggtctgagcaccggcgcactgatcgcgatcctggcctgcgtgctcactcttctggtgctgatcttgttaatcgtgacaatgcgcagacggaagaaagagccgttaatcttcgacgaggagagagacatccgagaaaacatcgttagatacgatgacgagggcggtggcgaggaggacacagaagctttcgatatggcagccttgcgcaatctgaatgtgattcgggatacaaagactcgcagagatgttacaccagagattcagttcttatcacggcctgctttcaaaagtatcccagataatgttatcttcagagaatttatctgggagaggctgaaggaagcagatgtcgacccaggcgctcccccttatgacagcctacagacctacgccttcgagggaaacggctccgtcgctgagagtctctctagccttgattcaatatcgagcaacagcgatcagaactatgactacttatcagactggggcccacgttttaagcgtctggccgacatgtatggaacagggcaggaaagcctttactcatag

SEQ ID NO: 216466 - DNA, 2358 bp, synthetic construct
  misc_feature 1..2358: note = Description of Artificial Sequence: Synthetic coding sequence
  source 1..2358: mol_type = other DNA
atgaagctcggcaaagtggagttctgccattttctgcaattgatagccctgtttttgtgttttagcggaatgtctcaagcagaactgtcacgctcaagaagtaaaccatatttccagtccggacggtctaggaccaagcggtcctgggtttggaaccaatttttcgtcctggaggaatatatgggatccgaccctctgtatgttggcaaacttcatagtgacgtagacaagggtgacggctctatcaaatacatcctgtctggggagggggcttcttcaatttttatcattgacgagaacacaggagacatccacgctacgaagcgattggaccgcgaggaacaggcttactacaccctgcgagcacaggccctggacaggcttacaaataagcccgtggaacctgaatccgagtttgtgattaagatccaggacatcaatgacaatgaaccaaagtttctggatggcccatatacggctggagtaccagaaatgagtccggtgggcacatccgtggtacaggttacagctactgatgccgacgatcctacttacggcaacagcgccagggtagtctacagcatactccaggggcagccttacttcagcgtggagcctaagacaggagttatcaagacagccctgcctaacatggacagggaagccaaagatcagtacttgcttgtgatccaggccaaggatatggtaggtcagaacgggggactctcaggaactactagcgtaacagtgaccctgacggatgttaatgataatccaccaagatttcctaggcgaagctatcagtacaatgtgcccgagtctctgcccgtggcgtctgtggttgccagaattaaggcagctgacgccgatattggcgcaaatgccgaaatggaatacaagatcgtggacggcgatggtctgggcatattcaagatatcagtggacaaggagactcaggaagggattattacaattcagaaggagctcgacttcgaggccaagacctcttacaccctgcggatcgaggccgctaataaagatgcagaccccaggttcctgtctttaggtccattcagtgacaccaccaccgttaaaataatcgtggaggatgtagacgagcctccagtgttcagttctccactgtacccaatggaagtgtctgaagctacccaggtgggcaatattattgggaccgtggctgctcacgatccggacagctccaatagtcccgtgaggtactccattgaccggaacaccgacttagagagatatttcaacattgatgccaactccggcgtcattacaaccgctaaatcgttagacagagaaactaacgctatccataacatcacagtgctggctatggagtcacaaaaccccagtcaagtaggtagaggttacgtagcgattactattcttgacattaacgacaacgcaccagaattcgcaatggattatgagacaactgtgtgtgaaaatgcccagccaggacaagtaatccaaaagatttctgccgttgataaggatgagccttcaaatgggcaccaattttatttcagcctgaccactgatgccaccaacaatcacaacttctcactcaaggataacaaggataacactgcctctatcctgacacgccgaaatggcttccggagacaagagcaaagtgtgtactatctccccatctttatcgttgattccggttctcctagcctcagtagtactaatacattaacgattcgagtctgcgattgcgacgctgacggggtggcgcagacatgtaacgctgaagcttacgtgctgcccgctggcctgtccactggagctctgattgcaatcctggcgtgtgtgctgactttgctggttctaatccttttgatagtgactatgcgtaggcgtaaaaaagaacccctgatctttgacgaagagcgggatatcagggagaacatcgtcaggtatgatgatgaggggggaggggaagaggacactgaggcgtttgacatggccgcactgcgcaatctgaatgttattcgcgatacaaaaactcgcagagacgtcacacctgagattcagtttctgagtcgcccagcgttcaagtccattccagacaatgtgatcttccgcgagttcatttgggagcggctgaaagaggcagatgtcgatccaggggcacccccttatgatagccttcagacctacgctttcgaaggtaacggctctgtcgcagagtccctttcgtccttggattctattagctccaactccgaccagaactatgactacttaagtgattgggggcctcgcttcaagcgcctggctgacatgtatggtacggggcaagaaagcttgtatagttag

SEQ ID NO: 216467 - DNA, 1893 bp, synthetic construct
  misc_feature 1..1893: note = Description of Artificial Sequence: Synthetic coding sequence
  source 1..1893: mol_type = other DNA
atgaagttagggaaagtcgagttttgccatttcctgcaactgattgcactgttcctgtgtttttctggcatgagccaagccgaattgagccgaagccgttcaaaaccctactttcagagcggacgatctaggaccaaaagaagttgggtctggaaccagttctttgtgctggaggagtacatgggttcagatcctctctacgtaggaaaactccatagcgatgtggacaagggcgacggatcaattaaatatattttaagtggggagggcgctagcagtatctttattatcgacgaaaacacaggggacattcacgccactaagaggctagacagagaggagcaagcttattataccctcagggcacaagccctggatcggctcaccaataagcccgttgaacctgaatcagagttcgtcattaagatccaggatattaacgacaatgaacccaagttcctggatggcccttatacggccggtgtgccagagatgtctcctgtgggtacctctgtagtccaggtgactgcaacagacgctgacgaccccacctatgggaacagcgctagggtcgtgtactccattctgcagggtcagccttatttcagcgtggaacctaagacaggtgtaatcaaaactgccctgcctaatatggatcgggaagccaaggatcaatatctcttagtaattcaagctaaagatatggtgggccagaacggaggcttgtctggcacaacgagtgtgactgtcactctgaccgacgttaacgataatcccccacggtttccccgaaggtcttaccaatataacgtccccgagagcctgcccgtcgccagcgtggttgcgaggattaaggctgctgacgccgacatcggagccaacgcagagatggaatataagatagtggatggcgacggacttggtatttttaaaatatccgtggataaggaaacccaggagggcataataaccatccagaaggagctggatttcgaagccaagacgtcctacacacttcgaatcgaagccgctaacaaggacgcagaccctcggttcttgtcactgggcccttttagcgacacgaccaccgtaaaaatcatcgttgaagacgtggatgaaccccctgtgtttagtagtcctttatatcctatggaggtatctgaggctacacaagtcggaaacattattggtaccgtggcggctcacgatccagatagcagtaactcccccgtgcggtacagcatcgatcgaaacacagatttggagcgttatttcaatattgacgccaacagcggagtcattaccactgctaagtctcttgatcgagagacgaacgctatacacaacatcacagtcctggctatggaatcacagaatccatcccaggtggggagaggttatgtggctattacaatattggatataaacgataatgcacccgagtttgctatggactacgagaccacagtgtgcgaaaacgctcaacccggacaagtcatacagaaaattagtgctgtagacaaggatgagccctctaatgggcaccagttttacttcagtttgaccaccgacgctaccaacaatcacaatttcagcttgaaagacaataaggataataccgcctccattttgacccgtcgaaacggctttagacgccaggagcagtccgtgtactacctgccaatctttatcgtggatagcggcagcccgtcactgagttctaccaacacgttgaccatacgcgtctgtgattgtgatgctgacggtgtggctcagacctgcaacgccgaagcatacgtgttgccagcaggactgtccacgggggctctgatcgccattctcgcttgtgtcctgacattgctggggaggtattgttttcagggactactgtag

SEQ ID NO: 216468 - DNA, 2400 bp, synthetic construct
  misc_feature 1..2400: note = Description of Artificial Sequence: Synthetic coding sequence
  source 1..2400: mol_type = other DNA
atgcccgagcgcctggctgagatgctactcgacctctggacacctctcatcatcctgtggatcacccttccaccttgcatatacatggcacctatgaatcagagtcaggtgctcatgagtggatctccactggagctaaacagcctgggagaagagcagcggatcctgaacagaagtaagagaggctgggtgtggaatcagatgttcgtactggaagagttctcagggccagaacctatccttgttgggagactccataccgatctggatccagggtcaaaaaaaatcaagtacatcctcagtggcgacggcgcaggcacaatatttcagatcaatgacgtcacaggcgacatccacgcaattaaaaggctcgatagagaggaaaaggcagagtacaccctgaccgcccaggccgtggactgggaaacaagcaagcccctggagcctccttccgaatttatcatcaaagtgcaggacatcaacgacaatgccccagaattcttgaatgggccttatcacgccaccgtgccagaaatgtcgattttggggacgtccgtaaccaacgtaactgctacagatgccgacgatccggtgtacgggaacagcgccaaactcgtgtatagcatacttgaagggcagccctatttcagcatagagcccgagactgcaattataaagaccgctttaccaaacatggatcgtgaggctaaagaggagtatctcgttgttattcaggctaaggacatgggtggccattctggtggcttaagcggaacaacaacgctgacagtcacactaaccgacgttaacgacaatcctcctaaatttgcgcagtctctgtatcacttctccgttccagaggacgttgtcctgggaacggctatcggccgagtcaaggcgaacgaccaagatataggcgaaaacgcacagtccagttatgacatcatcgatggtgacggcacagcgcttttcgagattacgtccgatgcgcaggcccaggatggaattatccgactgcggaaaccactagactttgagaccaaaaagagctacaccctgaaggttgaagccgctaatgtacatatcgatcccaggtttagcggacggggacctttcaaggataccgctaccgtaaaaatcgtggtggaggacgccgatgagccccctgtgttcagctctccaacctacctgctggaagtgcacgaaaatgcggctctgaatagcgtgattggccaggtgactgctagggaccccgacataacctcttctcctataaggttttccatcgatcgccatactgatctcgagaggcagttcaatattaacgctgacgatggcaaaataactcttgccacgcccctggatagagaactgagcgtttggcataacattacaatcatagcaacagaaatccggaatcactcccagatcagtagggttcccgttgctataaaagtgttagacgtgaatgacaacgcacctgaatttgcttccgagtacgaggccttcctctgtgagaacggcaaacctggacaggtgatccagactgtgtcagccatggacaaagatgaccctaagaacggtcattatttcttgtactctcttctgcctgagatggtgaataacccaaactttaccatcaagaagaatgaagataattcattaagcatcttagccaagcacaacgggtttaatcgtcagaagcaggaagtgtatttactcccaatcattatctccgacagcggtaaccctcctctttcatccacgagcacacttacgataagagtgtgtgggtgtagcaacgacggcgttgtccaaagttgtaatgtagaagcttatgtgctgcctatcgggttgtcgatgggagctcttatcgcaatcctcgcgtgcatcattttgcttctcgtgattgtcgttctctttgtgactttgagacgacacaaaaatgagccccttatcatcaaggacgatgaagacgttagggagaatatcataaggtatgacgatgagggcggaggagaagaagataccgaggccttcgacatcgctactttgcaaaaccccgacggaatcaacgggtttctgcctcgaaaggatattaaaccagatctgcagttcatgccccgtcaagggctagctcccgtcccaaatggcgtggatgtcgatgagttcataaatgtgagactgcacgaagcggataatgaccccacagcaccaccctacgactccatacagatttatgggtacgagggcagaggaagcgtggcaggcagtctctcaagtttggagagcactacttccgattctgatcagaacttcgattacttgtcagattggggtcccagattcaagaggctaggcgaactgtatagcgtgggagagtccgacaaggaaacttag

SEQ ID NO: 216469 - DNA, 2400 bp, synthetic construct
  misc_feature 1..2400: note = Description of Artificial Sequence: Synthetic coding sequence
  source 1..2400: mol_type = other DNA
atgccagagaggctagccgagatgctgctggacttgtggaccccactaatcattctctggatcaccctccctccttgcatttatatggcacccatgaatcagagtcaggttctcatgagcggatctcccctggaattaaacagcctcggcgaagagcagcggattctcaaccgcagtaagcgagggtgggtgtggaaccagatgtttgttctcgaggaattttcagggccagagcccatcttggtgggtcgcctccatacggacttagatccaggatcaaaaaagatcaagtatatcttgagcggagatggggcaggaacgatcttccaaatcaacgatgtcacaggggacattcacgctatcaagcggctggacagagaggaaaaagcagagtacactctcacggcccaagctgtagattgggaaacgtcaaaaccactggaaccccctagcgagttcattataaaggttcaggacatcaatgacaatgcccctgagttcctgaacggaccctaccacgctacggtccccgaaatgagtatactgggcacttctgtcacaaacgttactgcaacagacgccgacgaccccgtgtacggtaactctgcaaaactggtttattctatcctggagggccaaccatactttagtattgaaccggaaaccgctattattaaaacagccctgcccaacatggatcgtgaagctaaagaagagtatcttgtagttatacaggctaaagacatggggggacacagtggcggactgagcggaacaacaaccctgacagtgacattaacggacgtgaacgacaaccctcccaagttcgcccagagcctctatcacttcagcgtgccagaggatgtggttctcggtacagcaatcgggagggtgaaagcgaacgaccaggacattggcgaaaatgcccagtcctcatatgatataattgacggcgacgggactgccttgtttgagattactagcgacgcccaagcacaggatgggatcatcaggctgagaaaacccctggacttcgaaactaagaagagctacactctgaaagtggaggccgctaatgtgcatatcgaccctagattctccgggaggggaccgtttaaagacacggccaccgtcaagattgtcgtggaggacgccgatgaacctccagttttctcatctcctacctacctgctcgaggtgcacgagaatgcggcattgaacagtgtgatcgggcaggtgacagctcgggatcccgatatcacatccagcccgatacgcttttctatcgacagacataccgatctggaacggcagttcaatatcaatgccgatgacgggaaaataactctggccacgccattggacagggagctgtccgtgtggcacaatataacgataatcgcaactgagatccgcaatcactcccagatttcaagagtgcccgtggccatcaaggtgcttgacgttaatgataatgcacccgaattcgcatccgaatacgaggctttcttgtgcgagaatggcaagcctgggcaggtaatccagaccgtctctgccatggataaggatgatccaaagaatggccactatttcttgtactctctgctgcccgagatggtgaataatcccaattttacaattaaaaagaatgaggataattcccttagtatcctcgcaaagcacaacggattcaataggcagaagcaagaggtttacttgctccctataattatctccgattctgggaaccctcccctgtccagtacctcaactttaaccattcgggtgtgcggctgttctaacgacggagttgtccagagttgtaacgtagaggcttacgtgctgccgatcggcctgagtatgggcgcactgatcgcaatactggcctgtatcatcctgctgctggttattgttgttctttttgtcactcttaggaggcacaagaatgagccactgattatcaaggatgacgaggatgttagggaaaatataatcaggtatgacgatgaggggggaggcgaggaggataccgaggcttttgatatcgctacacttcagaacccagatggcatcaacggctttttgcctcggaaagacataaaacctgacttacaattcatgcctcggcagggcctggcgcctgtgccaaatggggtggatgttgacgaattcataaatgtccgcctgcacgaggccgacaacgatcctacagctccaccctacgactcaattcagatatacggatatgagggcaggggatctgtggcgggatccctgagctctctcgagtctactacatcagatagcgaccagaattttgattacctctccgactggggaccacggtttaagagactcggggagctgtacagcgtgggcgaaagtgacaaagaaacatag

SEQ ID NO: 216470 - DNA, 795 bp, synthetic construct
  misc_feature 1..795: note = Description of Artificial Sequence: Synthetic coding sequence
  source 1..795: mol_type = other DNA
atgacaaaattttccagctttagcctatttttcttgattgtgggcgcatacatgacacacgtgtgcttcaacatggagatcatcggaggtaaggaggtcagtccccactctcgaccttttatggcttctattcaatatgggggtcaccatgtgtgcggaggcgtgctgattgatccccagtgggtgctgactgcggctcactgtcaatatcgcttcacaaaagggcagagccctaccgtcgtcttaggggcacattccctgagcaaaaacgaagcgtccaagcaaactctcgagatcaaaaaattcatccctttctcccgggttacatccgacccgcagtccaacgacattatgctggtaaagctgcagactgccgcaaagttgaacaagcacgtgaaaatgctacacattcggtccaagacatcactgcgcagcggcaccaaatgcaaagtgacaggatggggcgctacagatcctgattccctccgcccttccgacacgttgcgcgaagtcactgtgacagtactatcgaggaagttatgcaactcccagagttattataatggggatcctttcataaccaaagatatggtgtgtgcaggcgatgccaagggacagaaggattcctgtaagggcgactcaggaggccctttgatttgcaagggggtgttccacgcgattgtctctggcggacatgaatgcggcgtcgctaccaagcctgggatctacactctcctgacaaaaaaatatcaaacctggattaagagcaacttggtgccaccccacacaaattag

SEQ ID NO: 216471 - DNA, 246 bp, synthetic construct
  misc_feature 1..246: note = Description of Artificial Sequence: Synthetic coding sequence
  source 1..246: mol_type = other DNA
atgcgaacgtatcactatatccccctgtttatttggacttacatgtttcacaccgtagacactattcttctgcaagagaagcccaacagctacttgtcctctaagaaaattgctgggttgacaaaagacgatggcaaaatgttgagacgaacgaagagaggctggatgtggaaccaattcttcctacttgaggagtatactgggaccgatacacagtatgtcggaaagctgcacaccgaccagtag

SEQ ID NO: 216472 - DNA, 399 bp, synthetic construct
  misc_feature 1..399: note = Description of Artificial Sequence: Synthetic coding sequence
  source 1..399: mol_type = other DNA
atgcgaacttatcattacatccccctattcatttggacgtacatgtttcacaccgtggacacgatcctcctacaggagaagccaaactcatacctttcttctaagaaaatcgccggactcactaaggatgatggcaaaatgctgcggagaacgaaacggggttggatgtggaaccagttttttctgctggaagaatacacaggaaccgacacccaatatgtagggaaactccatactgaccaggacaaaggggatggaaatctcaaatatattctaaccggcgatggcgctggctcattattcgtcatcgatgaaaatacaggcgacatccacgccgcaaagaaactcgatcgtgaagaaaaaagcttatacatcctgcgagcgaaggctatcgattag

SEQ ID NO: 216473 - DNA, 9045 bp, synthetic construct
  misc_feature 1..9045: note = Description of Artificial Sequence: Synthetic coding sequence
  source 1..9045: mol_type = other DNA
atggcaccgcctccgcctcctgtgcttccagtgttgctgctgcttgctgccgctgcggcactcccggctatgggactgcgcgcagctgcttgggagccccgtgtgccagggggtactcgggctttcgcattgagacctggatgcacttatgctgttggggctgcctgtacacctagggcccctcgggagttgctcgatgttggacgcgatgggaggttggctgggcgtagaagagtctctggcgcaggaaggccattgcccttgcaggtgagactggtcgccagatcagctccaacagctttgtccagacgactgagagccagaacacacttaccaggctgtggggctagggcaagactgtgcggaactggggcacgcttgtgtggggctctgtgcttccctgtcccgggtggatgtgctgcagcacagcacagcgccctggctgcccctactactctccccgcttgcaggtgtcctcctagacctaggcctaggtgcccgggacgaccaatttgcctgccacccggaggctcggtgaggctgcggctgctatgcgcactgaggagagcagctggtgcagtgagagtaggtctggccctggaagcggctactgctggcacaccttccgcgtccccctccccatcaccccctctcccgccaaatttgccggaagccagagcgggtcctgcccgacgcgcaagaaggggcacctcaggccgtggctctctcaaattccctatgcccaactaccaggtcgccctgttcgagaatgagcctgccggtactctgatcttacagctgcatgcccactataccatcgaaggagaggaggaacgtgtcagctattacatggaaggcctgttcgacgagagatcccgcggttatttccgcattgacagcgccaccggtgctgtcagcaccgatagtgtgctggacagagaaactaaggagacccacgtgttgcgagtgaaggccgtggattattccaccccacctaggagtgcaacgacatatataaccgtgttggtgaaggacaccaatgatcatagcccagtctttgaacagtcggaataccgggagcgtgttcgggagaatctggaggtggggtatgaagtgcttaccatccgagcctctgacagggattcaccaattaacgctaatctaaggtacagggtgctggggggagcatgggacgtcttccaactgaacgaaagttccggtgtggtttccacacgcgctgtactcgaccgagaggaggctgcggaatatcagcttctcgtggaggcaaatgatcagggacgcaatcctgggcctttgtcagccacagccaccgtgtacatagaggtggaggatgaaaatgacaactacccacagtttagcgaacagaactacgttgttcaggtgcccgaagacgtcggactgaacacggccgtgcttcgcgtccaggcgaccgaccgcgatcagggccagaatgccgctatccactattcaattttatcaggcaatgttgctggacagttttatctgcatagcctctccggtattcttgacgtaatcaacccactcgacttcgaggacgtgcaaaaatactccttgtctatcaaggctcaagacgggggaagacccccactcatcaactcgtcaggagtggtcagcgtgcaggtgttggatgtcaacgataatgagccaattttcgtcagctccccctttcaggcaaccgtactggagaacgttccacttggataccccgtggtgcacatacaggccgttgatgccgactccggggaaaatgcccgactgcattatagactggtggataccgcatcgactttcctcggcggtggatctgccggtcctaaaaaccccgctccaacgccagactttcccttccagatccacaactcaagtggttggattactgtctgtgccgagctggatagggaggaggtggaacattattctttcggcgttgaagcagtggatcacggaagccctccgatgtccagcagcactagtgtcagcatcacagtcctggacgtgaacgacaatgatcccgtgtttactcagcctacctacgagctaagattaaacgaggatgcagccgtcggatcttccgttctcacacttcaagcacgtgaccgcgacgctaactctgtgatcacataccagttgacaggcggtaacaccagaaaccggtttgccctcagctcccagcgcggtgggggactgattacgctggctctgcccctggactacaaacaggagcagcaatacgtattagctgtgacggccagcgacgggactcgctcacatacagctcacgtacttatcaatgtgactgatgccaatacccatcgtcccgtctttcaatcgtctcactatacagtaagcgttagtgaagacagaccggtagggactagcatcgccacactgtcagcaaacgacgaagacactggagaaaacgctcgcattacatatgtgatccaggacccagtcccgcagttcagaatagatccagacagtggaactatgtataccatgatggagttggactatgagaaccaggtggcctacacactgactataatggctcaggacaacggcatcccccagaagagcgacaccactaccctggagatcctgatcctggatgccaatgacaatgccccacagtttctgtgggacttctaccagggctctatcttcgaggatgcccctccctccacatcaatcctgcaagtttcagctactgacagagatagcggacctaatggcaggttgctgtacacttttcaaggaggcgatgacggagatggcgacttctatatcgaacctactagtggggttattcgcacacagaggcgtctggacagggagaatgttgctgtatacaacctttgggccctggccgtggaccgcggttcaccaacacccttatcagcttcagtcgaaattcaggtgacgattctcgatattaatgacaatgcacctatgtttgagaaggacgaattggagctgttcgtggaagagaacaaccccgtcggctcagtggtagcgaaaattcgggctaacgatcccgacgaaggacctaatgcccagataatgtatcagatcgtggaaggagacatgcgtcacttcttccagctcgaccttctaaacggggatctgcgggctatggtggaactagattttgaagtgaggcgggaatatgttctggtggtacaggctaccagtgcccctctggtaagtcgcgcaactgtccatatcctattggtggaccagaacgacaacccccctgtgcttccggatttccaaatcctcttcaataactacgtaacaaacaagtctaactcctttcccacgggagtcatcggctgcatacctgcccacgacccagacgtctctgattccctgaattatacattcgtgcagggtaatgagctgcggctcctactgttggacccagccaccggcgagcttcagttatcacgggacctggacaataacagacctctggaggccttaatggaggtgtctgtgagcgacggaatccactccgtgaccgccttctgtactctgagggtgaccattataacagacgacatgctgactaacagcatcacggtgcggctggaaaacatgtctcaggagaagttcttaagtccactactggccctgttcgtcgagggggtggccgcagttctgagcacaaccaaggatgatgtgtttgtgtttaatgtgcagaacgacacagatgtgtcatcgaatatcctgaacgtgaccttcagcgctctcctacctggcggagttcgcggtcagttttttccgtcagaagacctccaagaacagatctatcttaacagaactctgctgacaactatttccactcaaagagtgttgccattcgacgataacatatgcctgcgcgaaccatgcgaaaactatatgaagtgtgtttcagtgctgaggttcgacagctcagctcctttccttagctcaacaacggtgctcttcagacctatccatcccatcaacgggttgaggtgtaggtgcccaccgggttttaccggtgattattgcgagacagagatcgatctatgttacagcgacccatgcggcgctaatgggaggtgtcggtcccgtgaaggagggtacacttgcgaatgctttgaagactttactggcgagcactgcgaagtagatgccagaagcggccgatgtgcaaatggagtgtgtaagaacggcggaacctgcgtcaacctccttatagggggatttcactgcgtgtgtccacccggagagtatgagcgcccttactgcgaggtgactacaaggtcattcccccctcaaagcttcgtcacttttcggggactccgccagcggttccactttacaatctcattgacatttgccacccaagagcgcaatggcctgctcctgtataatggcagatttaatgagaaacatgactttatagcactagagattgtggatgaacaggttcagttaaccttcagtgccggagaaaccaccaccacagttgccccaaaggttccgagcggtgttagcgacggacgctggcactcagtgcaggttcagtactacaataagcccaacattgggcacctggggttgccccatggaccgtccggggagaaaatggcagttgtgaccgttgacgactgtgacactaccatggccgttcgatttggaaaagacataggcaactacagttgcgctgcccagggcacccagaccggaagtaagaagagtctcgaccttacaggacctctcttacttgggggtgtccccaacctacccgaagacttccccgtacacaatagacaattcgtagggtgcatgaggaacctctctgtcgacggtaagaacgtcgatatggccggatttatagccaacaacgggactagggagggctgtgccgctcggaggaatttttgtgacggcaggagatgccagaatgggggaacgtgtgtaaaccggtggaacatgtatttgtgtgaatgcccactgcgcttcggcggaaaaaattgcgagcaagccatgcctcatcctcagttattttcaggcgagagcgtggtgtcttggagcgatctaaatataatcattagtgtaccttggtaccttggcctaatgtttcggacaaggaaggaagattctgtactgatggaagctaccagcggcggaccaacatcattccgcctgcagatacttaataactatctccaattcgaagttagccatggtccttccgatgtagaatcggtgatgctgtcgggcttgcgggtgaccgacggggaatggcatcatcttctaatagagttgaaaaacgttaaagaggactccgaaatgaaacaccttgttaccatgaccttagactatggaatggatcagaacaaggcggacattgggggaatgctgccagggctgacagtgcgatcagtggtggttggcggtgcctccgaagacaaggtgagcgtaagaagaggattcagaggttgcatgcagggagtgcggatgggcggtacccccactaacgtggcgaccttaaacatgaacaacgcgctcaaggtccgggtgaaagacgggtgtgacgtcgacgacccttgcacatctagtccatgcccacctaacagccgttgccacgatgcatgggaggactattcatgcgtttgtgacaaggggtacttaggcatcaactgtgtggacgcctgtcacctcaatccgtgtgagaacatgggagcttgcgtgaggtcacctggctcccctcaaggatacgtgtgtgaatgtggtccctcacattacggaccctactgtgagaacaaattggacctcccctgtcctagaggttggtggggtaatcccgtgtgcggcccatgccattgcgctgtaagtaagggctttgatccggattgcaataagacaaacggacagtgtcagtgcaaagagaattattacaagttactggcccaggatacttgcctcccatgcgattgctttccgcacgggtcacacagtcgaacgtgtgacatggctacaggccaatgtgcgtgcaaaccgggtgtgattggcagacaatgcaaccgttgtgacaacccttttgcagaggttacaacccttggctgcgaggttatatacaacgggtgcccgaaggccttcgaggccggtatatggtggccccaaacgaagtttgggcaaccagctgcagtgccgtgtcccaagggatccgtgggtaacgccgtgcgacactgtagtggcgaaaaaggctggttgcccccagagttatttaactgcactacaattagctttgtggatctgagggccatgaatgagaagttaagcaggaatgagactcaggttgatggcgctcgcgcattgcagctcgtccgcgcattgcgctccgcgacccagcatactggcacgttgtttgggaacgacgtaagaacggcctaccagctcctgggccatgtgctccagcacgagagctggcaacagggttttgatctggcagctacccaggacgccgattttcacgaggatgtgatacattctggctccgccttgctggcgcctgctacccgagccgcttgggaacagatccagcgttctgaagggggtacagcacagcttctgaggcgcttggaaggctacttttctaacgtggctaggaacgtgcgtcggacctacctcagaccattcgtaatagttaccgccaacatgatcctcgccgtcgacattttcgataagtttaattttacaggcgcacgtgttccgaggttcgataccatccacgaagaatttcctcgagaactcgagtcctctgtgagtttccccgctgacttcttccgtccccctgaagagaaggagggccctctactgcgacccgcaggcagaagaactacaccccagaccacccgccctggcccagggacagaacgggaggctcctatcagtcggagacgcaggcatcccgatgatgccggacagttcgcagtggcgctggtaatcatttatcgcaccctcggccaactattgcccgagcgctacgatcccgacaggaggtcactccggttgccacacagacctataatcaacactcccatggtctccacgcttgtatacagcgaaggtgctccactaccgcgacccctcgaacggccagtgctcgtggaattcgctcttctggaggtggaggaacggacgaagccagtctgtgtgttttggaaccactcactggcagtcggcggtaccgggggatggtctgctagaggctgcgagctgctgtcacggaataggactcacgttgcctgtcagtgtagccacaccgctagtttcgccgttctcatggatatttctagaagggaaaatggggaagtacttcctctgaaaattgtcacatacgccgctgtttctctgagcctcgcagccctcttagtcgcctttgtcctgctatccttagtacgcatgctgagatccaacctccattccatccataagcacttggccgtggcgctttttctgtcacagctggtgttcgtgattggaatcaatcagactgaaaacccttttctatgcaccgtggtggccatcttgctgcactatatttatatgtccactttcgcctggacactggtcgagagcctgcatgtgtacagaatgttaaccgaagtgcggaacatcgacaccgggccaatgcgtttttattatgtggtggggtgggggatcccggctattgttacagggctggcagtcggtctggatccccagggctatgggaacccggacttttgctggctgtccctccaagatactctgatctggagtttcgccggacctattggcgcagtgataataatcaatactgtcacatccgtgctgtcagctaaggtatcctgccagcgcaagcaccattattacggaaagaagggaatcgtgtctttgctacggaccgcttttttgttgctgctgctgattagcgccacctggttgctgggcctgttggccgtgaaccgcgacgcgttgtcctttcactacctgtttgcaatcttttccggccttcagggacctttcgtcttgctgttccactgtgtgctcaaccaggaggtgcgtaaacacctgaagggcgttctgggcggtcgcaaattgcatcttgaagactccgccactacccgcgcaacactgttgacaaggagtctcaattgtaacacaacattcggagacgggcctgatatgctacgcactgacctcggggaaagcaccgcgtcgctggattccatcgtccgagacgagggcatccagaagctgggagtgagcagtgggctcgttcggggatctcacggagagcctgatgcatccctcatgcccagatcttgtaaggatcctcctggacatgactcggactctgacagcgagcttagccttgacgagcagtcttcgtcctacgcgagttcacatagctctgactcagaagatgatggggtgggcgcagaagaaaagtgggacccagccagaggggctgtccactcgacacctaaaggtgatgctgtggccaaccacgttccagcaggctggcctgatcaaagcctggctgaatcggacagcgaagacccaagcgggaagcctagactgaaagtcgagactaaagtctctgtcgagctccatcgagaggaacaaggctcacatagaggggagtatccacccgaccaggagagtggaggagccgctagactggcctcatctcagccgccagaacagaggaaaggcatattaaagaataaagtgacatatcctcccccactcactcttaccgaacaaacgctgaaggggcgtcttcgggaaaagctggccgactgtgagcagagccctacctctagtaggacgagttctctgggatcaggaggcccagattgcgctattactgtcaaatcccccggacgggagccgggaagggaccatttgaacggtgttgctatgaatgtccggaccggcagtgcccaggccgacggcagtgactccgagaagccatag

SEQ ID NO: 216474 - DNA, 4194 bp, synthetic construct
  misc_feature 1..4194: note = Description of Artificial Sequence: Synthetic coding sequence
  source 1..4194: mol_type = other DNA
atggcccctcctcctccacctgtgttgccagtcctactcctgctggcagccgctgccgcattgcccgctatgggattgcgtgctgccgcttgggaacccagggtgcctggtggtaccagggccttcgccctcagaccagggtgcacatacgccgtcggggctgcctgtacacctagagcaccccgagagctcctggacgttggaagagacggcaggcttgcaggacggagacgcgtaagtggtgcaggtcggccattgccactgcaggtccgcttggtggcgagatctgctcctacagcactcagtcgacggctcagggccagaactcacctccctgggtgtggggctcgggctcgcctctgtggcaccggtgcacgcttgtgtggtgctctctgtttccctgtccccggtggctgcgccgctgctcagcattctgcactcgccgctcctactactctcccagcctgtcgatgtcctccaagaccaagacctcgctgccctgggcgacccatttgtctgccacctggaggctctgttcgactgcgcttgctgtgcgccctgagacgcgcagctggcgctgtgcgggtgggcctcgctctggaggccgcaactgccggaaccccctccgcatccccgagtcctagccctcctctgccacccaatctccctgaagctcgagctggcccagctaggcgggcaaggcgcggaacctccggcagaggatcccttaagtttcctatgcccaattatcaggtggccctgtttgaaaatgaacccgctgggactctgatactgcagctccatgcgcactacaccattgagggagaggaggaaagggtcagttattatatggaaggtctctttgacgaaagatctcgagggtattttagaattgatagtgccacaggtgccgtttctactgactccgttctcgacagggagacgaaagagacacacgtccttagagtgaaggccgtagattatagcacccccccacggtccgctacaacgtatatcactgtgctcgtgaaggatacaaacgatcactccccggtcttcgagcagagcgaatatcgcgagcgggtacgggaaaacctggaggttggctatgaagtgttgaccatcagggcctcggatcgcgactcccctatcaatgcaaacctcaggtaccgggtcctggggggagcatgggatgtgttccagcttaatgagtccagcggggtggtctccacccgtgccgtattagatcgtgaggaagccgcagagtaccagttattggtggaggccaatgaccaaggcagaaatccaggtcctttgagcgccaccgctaccgtatatatagaagtcgaggatgagaatgataactatccgcaattttcggaacagaactacgtcgtgcaggtgcctgaagacgtcgggttgaacactgctgtccttagagtacaggcgacagatagagaccagggacagaacgcagccattcactactcgatcctgagtgggaacgtcgctgggcagttctaccttcactcactatcaggtatactcgatgtgattaatcccctggacttcgaagatgtacagaagtactcattgtctattaaggcccaggatggcggacggccaccattaataaattcctctggcgtagtttctgtgcaggtcctggatgtcaacgacaacgagccaattttcgtctctagtccgttccaagcgacggtcttggaaaacgttccattggggtaccccgtggtgcatatccaggcagtggacgccgattctggagaaaatgcaaggctccactaccggctcgtagacactgcgtcgactttcctgggaggtggctccgctggccctaaaaacccggctcccacccccgacttccccttccaaatccacaactccagtggctggatcacagtatgcgcagagctggacagagaggaagttgagcattactcatttggtgttgaggctgtcgatcacgggtcaccaccaatgtcttccagcacatccgtttccataactgttctcgacgtcaatgataacgacccagtattcacccagccgacttacgagttacgacttaacgaggacgctgccgtagggagcagcgtactgacactccaggccagagaccgagacgcgaactctgtgatcacttatcagctgaccggagggaatacaaggaataggttcgccctgtctagccaacgcggtggcggtctgattactctggctctgccactggactataaacaggagcagcagtacgtgcttgcggtgactgcctcggatgggacccgctctcatactgcccatgtgttaatcaacgtgactgacgccaacacccatcggcctgtgtttcagagctcgcactacaccgtctcggtgtctgaggatcggccagttggtactagcattgccaccttgtccgccaacgacgaagataccggtgaaaacgctagaataacgtacgtgattcaagaccctgtaccacaattcagaatagaccccgactctgggaccatgtatacgatgatggagctcgattacgaaaaccaggtggcatacactcttacaattatggcccaggacaatggaatccctcagaagtctgatacaacaacactggagattctcatcctcgacgcaaacgataatgcccctcaatttttatgggacttctatcagggctccatcttcgaggacgcccctccctctacttctatcctgcaggtctccgccactgaccgcgatagtggacccaacgggaggctcctttacacctttcagggtggggacgacggcgacggtgatttctacattgaaccaacatccggagttatccgcacccaacgcaggcttgatcgcgaaaatgtggcagtgtacaatctgtgggctctggcggtggacagaggaagtcctacccctctgagcgccagcgtcgagatccaggtcacaatattagacatcaacgacaacgcaccgatgttcgaaaaagatgagcttgagttgttcgtggaggagaacaaccctgtgggtagtgtggtggcaaaaatccgggcaaacgaccctgatgaaggccctaatgcccagataatgtatcaaatcgtagaaggcgacatgcggcatttctttcagctggatctcctgaacggggacttgagagccatggtggaactggatttcgaggttagaagagagtacgtcctggtcgtccaggcaacaagcgcccctttggtgagccgcgcaacagtgcacatcttacttgtggatcagaatgataatccacccgtgctgcccgacttccagatcttattcaataactacgtaaccaacaaaagtaatagctttccaacaggtgtgattggctgcatacctgctcacgatcctgacgtttcagattcactgaattacactttcgtacagggcaacgagctacgtctgcttcttttagatcctgctactggggaactgcaactcagtcgtgacctagataacaacaggccccttgaggcattgatggaggttagcgtcagcgatgggatacactccgtcaccgcattttgtacattacgtgttacgatcataacagatgacatgctgacaaacagcattacggtgaggctagagaacatgagtcaggagaaatttctgtcacctttgttagccctcttcgtggagggcgtggccgcagtgttgtctaccacgaaagacgacgtgtttgtgtttaatgttcaaaacgacaccgacgtttcttccaacatcttaaatgtcacgttttctgctctattgcccggtggggtgcggggacaatttttcccgagtgaggacctccaggagcagatatacctaaatcgcaccctgctgacaacaattagcacgcagagagtcttacctttcgatgacaatatctgcctgcgggaaccttgtgaaaactatatgaaatgcgtgtccgtgttacggtttgacagttctgctcctttcctgagcagcaccacagtcttgtttagacctatccaccctattaatgggctgagatgtaggtgtcctccgggttttacgggcgattattgtgagaccgagatcgacctgtgctattccgacccctgcggcgcaaatgggcgatgtcgttcccgggagggaggatatacgtgcgagtgttttgaggattttacagcggtctcatag

SEQ ID NO: 216475 - DNA, 2319 bp, synthetic construct
  misc_feature 1..2319: note = Description of Artificial Sequence: Synthetic coding sequence
  source 1..2319: mol_type = other DNA
taagatttcccattccagatccacaactccagcgggtggatcacagtgtgtgcagagctggatagagaagaagtagaacactactccttcggggtcgaagcagtggaccatgggagcccacccatgagcagctccacttcggtgagcataaccgtactggatgtcaacgataacgatcccgtgttcacccaacccacatacgagctccgtctcaatgaagacgcagcagttgggagtagcgtgctcacactccaggcaagggatcgcgacgcaaactctgtgattacttatcagctgactggcggtaacacgagaaatcgtttcgcattgtcttcccagagaggcggaggcttgataacacttgcactgcctctagactataaacaggagcagcagtatgtactcgctgttacagcatctgatggcaccaggagtcacacggcccatgtcttgataaacgtcactgacgccaacactcatagaccagtattccagagcagtcactacactgtaagtgtctctgaagacaggcccgtcgggacatctatagcaacactctccgccaacgacgaggacacaggcgaaaatgccaggatcacatacgtcatacaggatccggtcccccagttcagaatcgatcctgacagtgggacaatgtatacaatgatggaactggactatgagaaccaagtagcctataccctaaccatcatggctcaggacaacggcatcccacagaagtctgatacaaccaccttggagattctgattcttgacgctaatgacaacgcacctcagttcttgtgggatttctaccaaggtagtattttcgaagatgcccctccttccacaagtatcttgcaagtgagcgcgacagacagagactcaggcccaaacggcaggttgctgtatacttttcagggcggtgacgacggagacggagatttctatattgaacctaccagcggtgtgatccgtacacaacgcaggcttgaccgggagaacgttgcagtctataacctgtgggctttggctgtcgaccggggaagccccacccctctgtccgcctccgtcgaaattcaggtgaccatcctggacatcaacgataacgctccgatgttcgagaaggacgagctggagttgtttgtagaggagaacaacccggttggttcagtggtggcaaagatacgcgctaacgatcccgacgaagggcctaacgcacagatcatgtatcagatagtcgagggcgacatgagacactttttccagttagatctgctgaatggcgatttgcgggcaatggtcgagctggatttcgaagtacgcagagagtacgttctagtggtccaggctacgtccgcaccattggtgtcgcgtgcaaccgtgcacatcctgctcgtggaccagaatgacaatcctccagtgttgccagacttccagatcctttttaacaattacgtgaccaataagagtaattctttccctaccggcgtgatcggctgtatcccagcccacgaccctgatgtttctgattctctaaattacaccttcgtgcaaggcaacgagctgaggctgctgctcttggacccagctaccggcgagctgcaattatcccgcgatctagataacaacaggcccctggaggccctgatggaagtgtctgtttcagatggtatccacagtgtgaccgcgttctgcacactcagagtgactatcattaccgatgacatgttgactaattctattacggtgcgtctggagaacatgagccaggagaagttcctgtctcctctgctggctctctttgtggagggggtggccgcagtgctcagcaccaccaaggacgatgttttcgtcttcaatgtgcagaatgataccgacgtgagcagtaacatcctcaacgtgacgttctctgccctacttcctggtggcgtgcggggtcagtttttcccaagcgaggacctacaggagcagatatacttaaaccgcacactactgacaacaatctcaacccagcgcgtgctcccatttgatgataatatctgcctgagagaaccatgcgagaattatatgaagtgcgtgagcgtactcagattcgactcgagtgccccatttcttagcagcacaaccgtgctcttcagacccatccaccccatcaacggcttaagatgccgatgtcccccagggttcacaggcgattattgcgagacagaaatcgacttgtgctatagcgatccgtgcggggcaaatgggaggtgtcgctccagagaaggcggatacacatgtgagtgtttcgaagactttaccgagatcagctag

SEQ ID NO: 216476 - DNA, 8772 bp, synthetic construct
  misc_feature 1..8772: note = Description of Artificial Sequence: Synthetic coding sequence
  source 1..8772: mol_type = other DNA
atgagatctccagctactggcgtgccgctgccgacgcctccccctccgctgctacttctcctcttgctgttgctcccaccacctctcctgggagaccaggtggggccttgtaggtcactcggaagtaggggacggggatcctctggcgcttgtgccccaatgggctggctgtgcccctcatccgcctcaaatttgtggttgtacacttctcggtgccgggatgctggcacggagcttactggccatctggtgccgcaccacgatggcctcagggtctggtgccccgaaagtgaagcacacatccccctgccaccggctccagaaggatgcccctggagctgccgactcctcggtattgggggacatctcagtccacagggaaagctgaccctgcccgaagaacatccatgcctgaaggcccctcgcctgcgttgccagagctgcaagctggctcaagcacctgggctgagggctggagagcgcagtcccgaggagtccttaggtggtcgccgaaaacggaacgtaaacaccgccccacagtttcaaccaccttcataccaggctacagtgcctgagaatcagcccgctggaacgccagttgcatcattgagggcaatcgacccagacgagggagaagcgggtcggctcgagtacaccatggatgccctgtttgactcccgcagcaaccagtttttttcactcgaccctgtgactggagctgtcacaacagcggaagagctggatagagagacgaagagtacccatgtcttcagagtgaccgctcaggaccatggcatgccaagaaggagtgctctcgctactttgacaatactcgtgaccgataccaatgatcatgaccctgtcttcgagcagcaggagtataaagaaagtctgagagaaaatctggaggtagggtatgaagtgctgacagtacgcgctaccgatggagatgcgccacccaatgccaatatactgtaccgtctgctggagggcagcgggggttccccctccgaggtatttgagatcgacccccgttcaggtgtgattcggactcgagggcctgtggatcgggaagaagtggaaagttaccaattgaccgtcgaggcttcagaccagggcagggatccgggaccgcgtagtacaactgctgcagtgttcttgagtgtggaggatgacaatgacaacgcccctcaatttagtgaaaaaaggtacgtggttcaggtgcgcgaggatgttacacctggggctccagtgctgagggtgaccgcatcagatcgcgataaagggagcaacgctgttgtccactattctataatgtcagggaacgctagaggccagttctacctggacgctcaaacaggtgcccttgacgtggtgtctccgttggattatgagactaccaaggagtatacactgcgagttcgagcccaggacggaggtcgtccaccactgtcaaatgtgtccggcctggtgacagtccaggtgctcgatataaatgacaacgccccaatttttgtgtcaacgcccttccaggccaccgtgcttgagtccgttccccttggctatttagtcctgcacgttcaagcgatcgatgccgacgctggcgataatgctcgtttggagtatcgcttggctggagtggggcatgatttccccttcactataaataacggcactgggtggatatcggtcgccgcagagcttgatcgggaagaggttgatttctacagcttcggggttgaagccagggatcacggcacccccgcactcacagcaagcgcatcagtctctgttacggtactggacgtcaatgataacaaccccactttcactcagcctgagtatactgttagactgaacgaagatgctgccgtcggaacgtctgtggttaccgtgtctgcagtcgaccgcgatgcccacagcgtcatcacctaccagatcacatccggcaacactcgtaatcgattttccattacatcccagagcgggggaggcctggtgtcactcgcactccccttggactataagctcgagaggcagtacgtgctggctgtgacggcatcggacggcactcgtcaggatactgcccagattgtggtgaacgttactgatgccaacactcacagaccagtgttccagtccagtcattatactgtcaatgtgaatgaggataggcctgctgggacgacagtggtgctgatctcggccaccgacgaagacaccggcgagaatgcacgcatcacctattttatggaggatagcattccccagttccgtattgacgcagacactggagctgtgactacccaggcggagctcgactatgaagatcaggtgtcgtacacactggccatcacggctagagacaacgggattcctcaaaagagcgacactacctatttagagatcctggtgaatgacgtcaatgacaatgctccccagtttctgcgcgacagctaccaagggtccgtgtatgaagacgttcccccatttacatctgtcctgcaaatctcagccactgacagggattcgggcctgaatgggagggtgttctatacattccaaggtggggacgatggcgatggcgacttcatagtggagtccacatcaggtatcgtgaggacattgcggaggttggacagggaaaacgtagcgcagtatgtactgagagcatacgcggttgacaagggaatgccccctgcacgaacacccatggaggtaaccgtgaccgtattagacgtgaacgataatccgcctgtgttcgaacaagacgaattcgacgtctttgttgaggaaaattctcctatcggcctggcagtcgctagggtcaccgccactgacccagatgagggtactaatgctcagatcatgtaccaaattgtagaagggaacatccctgaggtgttccagttggacatcttttccggagaattgaccgccttagtagatctggactatgaggatagacccgagtacgtcctcgtgatccaggcaacctcggcccctttggtcagtcgtgcgactgtgcacgtgcggctgctggaccggaacgataacccacctgtgttagggaactttgaaatcctatttaataattatgtcactaataggagctccagtttcccagggggagcgatcgggagggtaccggctcatgaccccgacatctcagacagcctgacatacagcttcgagcgcggaaacgaactgtctctcgttttactgaatgcatccaccggcgaacttaagctcagcagagctcttgacaataatcgccctttggaggctattatgtcggtgttggttagcgatggcgttcatagtgtcaccgcacagtgcgctctgcgtgtgacaatcatcactgacgagatgcttacacattccattactctgcgcctcgaagatatgagtcccgagcggtttctgtcgccactcttggggctgtttatccaggccgtggccgctaccctagctacgcctcccgaccacgtggtcgtcttcaacgtgcagagggataccgacgctccaggtggccacatactaaacgtttctttgagcgtgggacagccgccagggcctggaggagggcctccatttttgccatccgaggacttgcaggagagactgtatctcaatagatccctattgaccgccatcagcgcgcagagagtgctcccgttcgacgataatatttgtctccgtgaaccatgcgagaactacatgagatgtgtgagtgtcttacgatttgatagttcagctcctttcatcgcgtcctcatcagtcttatttagaccaatccaccctgtcggcggactccgctgtcgctgcccaccaggttttacaggtgactattgtgaaacggaggtggacctgtgctacagtcgcccttgcggtcctcacgggaggtgccgttctcgagagggaggctatacctgcctctgccgagacggttacacaggagaacactgcgaagtctccgctcggtccggacgttgtacccctggagtctgtaaaaacgggggaacctgtgtgaacctcttggtggggggattcaaatgtgattgcccgtcaggcgattttgagaagccctattgtcaggtgactacacgatcgtttcctgcccactcctttattacatttagggggctccggcagcgtttccatttcacgctggcactgtccttcgccacaaaggagcgagacgggctgttactgtacaatggcaggttcaatgagaaacatgattttgtggccttagaggtcatccaggaacaagtgcagctgactttctcagccggtgagtcaacaacaaccgtgtccccctttgtccccggtggggtttctgacgggcagtggcacaccgtgcagttgaagtattacaacaaacctctcctcggacaaacagggctgcctcaggggccatcggagcagaaggtcgccgtagtcacggtggacggctgcgatacaggcgtcgcactccgatttgggagtgtacttggaaactatagttgcgctgcccaagggacacagggcggaagtaagaagagccttgacttgacagggcctctgctgcttggcggtgtcccggacttgcctgaaagttttcccgttcggatgagacagtttgtgggttgcatgcgtaaccttcaggttgattctaggcacattgacatggccgacttcatagcgaataacggcactgtcccgggatgtccagccaaaaaaaatgtgtgcgatagtaacacatgccacaacgggggtacctgtgtgaatcagtgggatgccttctcttgtgaatgtcccctgggattcggaggcaaatcctgcgcacaggagatggctaatccacaacactttctgggctcaagtctggtggcctggcacgggctgtctctcccaattagtcagccatggtatttgagcctgatgttcagaacacgccaggcggatggagtgcttttacaagcaattacacgcggacgcagcacgattactctgcagctgagagaaggccatgtgatgctgagcgttgagggtactgggctccaggccagctcccttcggctggagcccggaagagctaatgatggtgactggcaccacgctcagctcgcacttggggcatccggaggccctggccacgcgatacttagctttgattacggtcagcagagggcagaagggaacttgggcccaagattacacggccttcatctgtccaacataacggtgggcggaatcccagggccagctgggggagtggctagagggtttcgcggatgtttgcagggggtccgggtgagcgataccccagagggggtcaactccttagatccaagccatggggaaagcatcaacgtcgaacaaggatgttcattaccagacccgtgtgattccaatccctgcccagcaaactcttactgcagcaacgattgggattcttatagctgtagctgcgaccctggatactacggggataactgtacaaacgtgtgcgacctgaacccatgcgaacaccagtctgtgtgtacgagaaaaccttccgcgccacacggctacacttgcgaatgcccccctaactacttaggaccttattgtgagacaaggatcgatcaaccgtgtcctcgcggatggtggggacaccctacttgcgggccatgtaactgcgatgtgtctaaaggtttcgatccagactgcaataaaacctctggggaatgccactgcaaagagaatcattatagaccacctggctctccaacttgtctgctttgtgactgctaccccacaggctccttgtcacgtgtgtgtgacccagaggacgggcagtgtccctgtaaacccggagtcatcggtcgacagtgcgatcgctgcgataatccttttgccgaggtgaccactaacggatgcgaggtcaattatgatagttgtccccgtgcgattgaagctggtatatggtggcctcgaactcggtttggtctgccagccgcagccccatgtcccaagggctcatttggtactgcagtgcgtcactgtgatgaacacagggggtggttacctcccaatctgttcaattgcacgtctatcaccttttccgagctgaagggatttgcggagagactgcagcgcaatgaatctggtctagactccgggagaagccagcaactcgctttgctgctgcgcaacgccacccagcacaccgccggttacttcggttctgatgtgaaagttgcatatcagctcgctactaggcttctggctcacgagagcacgcaaagagggtttggactttccgccactcaagacgtgcattttacggaaaatttgctgagagtgggatcagctctccttgatacagcaaacaaaaggcattgggagctgatccagcagacagagggaggaacagcctggctgctccagcactacgaggcttacgcctctgccttggctcagaacatgcgccacacttacttatctccattcactatagtaactccaaatattgtcattagcgtggtccgactggataagggaaatttcgccggtgcaaaactccctcgatatgaagcccttcgaggggagcagcccccagatctcgagacaacagtgattctgcccgagagtgtctttagggagacaccgccagtcgtgcgtcccgcagggcctggtgaagcacaagaaccagaagagctggcgagacgacagaggaggcatcctgagctgtcccagggagaggcagtggcatctgtaattatatacagaacactcgcaggtctactaccccacaactacgatcccgacaaaagatccctgcgcgtgcctaagcggccaatcattaataccccggtcgtgtcgataagtgtgcacgacgatgaagaattgctccccagggcgctagacaaaccagtgaccgtccagtttcggctgctggaaaccgaagaacgcaccaagccaatttgtgtgttttggaatcacagcatccttgtgtccggtaccggcggttggtctgctcgtggatgcgaggtggtcttcaggaatgagagccatgtgtcatgtcaatgtaatcacatgaccagtttcgccgtgctcatggacgtatccaggagagagaacggcgagatcctaccacttaagacgttgacatacgtggctttaggtgtgacactggccgctttgctgctgaccttcttttttctgaccctgctgcgcatactgagatccaatcagcatgggatccggaggaacctaacagccgctctgggtctagctcagctggtcttcttgttggggattaaccaagcagatctaccattcgcctgtaccgtgatcgcgattcttctccacttcctgtatctctgtactttctcttgggcactgctcgaagcgctccacctatacagggctctcacagaagttcgggatgtcaacaccggacccatgcgattctactacatgctagggtggggcgtgcccgcttttattacagggttggctgtcggactcgaccccgagggctatggaaatcctgacttctgttggctgtccatctacgacacattgatttggagtttcgccggacccgtggcttttgcagtgagcatgtccgtgtttctttacatattagcagcaagggctagttgtgccgcacaaagacaaggcttcgaaaaaaaagggccagtctccgggctgcagccatcttttgcagtcctcctcctcctgtctgccacctggctactggccctcctgtcggtcaattccgatacactgttgttccactatttgttcgccacttgtaattgcatacagggacctttcatttttctgagctatgtggtactcagtaaggaggtgcgcaaggcactgaagctcgcttgcagccgaaagcctagccctgatcctgccctgacaacaaaatctaccctgacgagctcatataattgccccagtccctacgcagacggacggttgtaccagccctacggagactcagccggttccctgcactctacttctcggagcgggaagagccagccgagctacataccttttctgctgcgggaagaatccgcgctgaacccaggacagggtccaccagggctgggggaccctggtagcttgttcctggaaggtcaggaccagcaacatgatcccgataccgattctgactccgacctttccctcgaagatgatcaatctggcagttacgcaagcacacacagtagcgatagcgaagaggaggaagaggaagaggaggaggaggccgctttccccggtgagcagggctgggattctctcctggggccaggggcagaacgcctccccctccacagtacccccaaagatggagggcctgggcctgggaaagctccctggcccggagacttcggaaccacggctaaagaatcctctgggaacggtgcgccagaggagaggttgcgggagaatggagatgctctctcccgtgaaggatccctcggccctttacctggttcctcagcccagcctcataagggcatactgaaaaagaagtgtcttcccacgatttccgaaaaatcatcattactcaggctcccacttgagcaatgcaccgggagctcccggggatcatcagcatcagaaggtagtcgagggggacccccaccgcgaccccctcctcgacagagcctgcaggagcagctgaatggagtgatgcccattgctatgtcaatcaaggccggaacggtggacgaagattcttccggatcagagttcctgttttttaacttcctacattac

SEQ ID NO: 216477 - DNA, 9939 bp, synthetic construct
  misc_feature 1..9939: note = Description of Artificial Sequence: Synthetic coding sequence
  source 1..9939: mol_type = other DNA
atgatggccaggagacctccatggagaggcctcgggggacgttcaacacctatcttgctgttgcttctcttgtcgctgttcccattaagccaggaagagctggggggaggcggacatcaggggtgggatcctgggctcgccgcaacaacaggacctagggcccacataggcggaggcgcactggccctatgcccagagagctcaggcgtacgggaggatggtggacctggcttgggcgttagagagccaatatttgtaggcttgcgtggcagaagacagagtgcccgaaactcaaggggcccacccgagcagcctaatgaggaattaggcatcgaacacggggtgcagcccctggggagccgggaaagggagaccggccagggtcccggttctgtactttactggcgcccagaggtgtctagctgtggcaggacaggacctttgcagcgaggcagcttaagtcctggagctttaagtagtggcgttcctgggagtggaaactcctccccacttcccagcgatttcctgattagacaccatggacccaaaccagtgagcagtcagcgcaacgcagggacgggatccagaaaaagggtaggtacagctagatgctgcggggaactctgggccaccgggtccaagggacagggggaacgggcaaccacaagcggcgcagagcggaccgcaccacggcgtaattgtctgcccggagcctctgggtctggccctgagctcgacagcgctcctagaactgctaggacggcacctgcctccggatctgcccctcgcgagtcgcggacagcacctgagcctgcccctaagagaatgagaagcaggggcctctttcggtgtaggtttttacctcagcggccagggcctcgccctccaggtttgcctgccaggccagaggctcggaaagtgacttccgcaaatagagcacggttcagacgggcagcgaaccgacatccacaatttccacaatataactaccagaccctggtgcctgaaaacgaggccgctgggacggccgtcttgcgagtcgtggctcaggaccccgatgctggcgaagccggtcgactggtgtactccctggccgcactaatgaactccaggtctctggaactgttcagcatagacccacagagtggtctcatcagaaccgcagcggcactcgatagggagtccatggaaagacattatcttcgggtcaccgcacaggaccacgggtcccctcgattgtccgccactacgatggtcgccgtgacagtggccgatcgcaatgatcattcacctgttttcgaacaggcccagtaccgagaaactctcagagaaaacgtggaagaaggctatcccattttacaacttcgggcaacggatggtgatgcaccacctaacgccaatttgcggtaccggtttgtaggcccacctgccgcacgcgctgccgcagccgcagcatttgagatagacccgaggtctggcctcatttccactagcggccgagtggaccgggagcacatggagtcgtatgagctcgtcgttgaagcctcggatcaggggcaggaacccggtcccaggtccgccactgttagggtgcacatcacggtgttagacgaaaacgataacgcccctcagtttagtgaaaagagatatgttgcccaggttagggaggatgtgaggcctcacacagtggtgctacgcgtaaccgccaccgatcgggacaaagatgcaaatggcctagtccactacaatattatcagtggaaacagtcgtggccactttgctatcgacagcctcactggagaaatccaggtggtggcaccactcgattttgaggctgagagagagtatgcccttcgtattagggctcaggacgcaggcagaccgccactgagcaacaatacaggccttgcgtcaattcaggtcgtggacattaatgaccatattcctatattcgtcagtacaccatttcaggtcagcgtgctcgaaaacgcaccgctcgggcattcagtgatccacatccaggccgttgatgccgatcatggcgaaaatgctcgtttggaatactcactgacgggggtggcgccagatacaccgttcgtcatcaactccgccactggctgggtgagtgtgagtggacccctggaccgcgagtcagtcgaacactacttttttggagtggaggccagagaccatggatcgccccctctgtctgccagcgcctccgtgactgtgactgtactggacgtgaacgacaatagacccgaattcaccatgaaggaataccatcttagactgaacgaggacgccgcagtgggcacttctgtcgtgtcagtcacagcggtggatagagacgcaaactccgctataagctaccagatcactggcggaaacacccggaatcgatttgctatttcgacccaaggtggcgtggggctagtcacacttgccctgccactggactacaaacaagagaggtactttaagctcgtgctcactgcctctgatcgcgcactgcatgatcattgttacgttcacatcaatattactgacgcgaacacccaccgaccagtcttccagtcagcgcactatagtgtgagcgtcaacgaagatcggcctatgggatctacaatcgttgtaatctctgcaagcgacgacgacgtgggggaaaatgccagaattacctatctgcttgaggataatttacctcagtttagaattgacgctgatagcggcgcaataactctccaggccccactcgactatgaggaccaggtgacttacacgctcgcgatcaccgccagggacaacggcataccccagaaagccgatacgacgtacgtagaagtgatggttaatgacgtgaatgacaatgcaccacaatttgtcgccagccactataccggactggtcagcgaagacgccccaccttttactagcgtgctgcagatctctgcaaccgacagagacgcccacgccaatggtagggtacagtacaccttccagaatggagaggacggggacggcgactttactattgagccgacatcagggatcgtgagaactgtgcggcgtctggacagagaagctgttagtgtgtacgagctgactgcatacgctgtggatcgaggcgtgccgccactgagaaccccagtgagtatccaggtcatggtgcaggacgtgaatgataatgcacccgtgttccccgcagaggaattcgaggtaagggtcaaggaaaacagtatcgtgggttctgtggtggcgcagatcaccgcagtggatccagacgagggtccaaacgctcacataatgtaccagatcgtagaaggaaatatacccgagctgttccagatggatattttttccggtgagctcaccgcattgatcgatctcgactatgaagccagacaggaatatgtgattgtggtccaggctacttcagcaccactggtgagccgagccaccgtccatgttagactcgtggatcagaatgacaattctccagttctgaacaattttcagatcctgtttaacaattacgtgtccaaccgttcagatacctttccatccggaataattggacgtatacctgcatatgacccagacgtttcggatcacctgttctacagcttcgaaagaggtaacgagcttcagctgctggtagtgaaccagacttctggcgagctccggttatctcggaagctggataacaatcgccctctggtggctagtatgttggtgaccgtaacagatggactgcactccgtgactgcgcaatgcgtgctgagggtcgtgattatcaccgaagagctgttagctaatagcctgaccgtccggctcgagaacatgtggcaggagcgtttccttagtcccctgcttggacgcttcctggagggcgtggcagcagtgctggccaccccggctgaggacgtgttcattttcaacatccaaaatgacactgacgtgggagggactgtgctgaacgtctccttttcagctttagctcccaggggcgctggagcaggtgctgctggcccttggttcagctccgaggaactgcaagagcagctgtatgttcgaagggccgctctcgccgcacgcagcctgttggacgtgctcccctttgacgacaatgtttgtcttcgcgagccttgtgaaaactatatgaagtgcgtgagtgtgcttcggttcgactcttcagctccttttttagcgtccgcatccaccctgttcagacctattcagcctattgcagggcttcggtgtcggtgccctcctggattcacaggtgacttctgtgaaaccgagcttgatctgtgttactccaacccttgccggaacggaggcgcatgtgcaaggcgcgagggcggatacacttgtgtgtgccgccctcgtttcacaggagaggactgtgaactcgataccgaagccggaagatgcgttcccggtgtttgtagaaatgggggaacctgtaccgatgccccaaacgggggtttcaggtgccagtgccccgctggcggtgcctttgagggtccacgttgcgaagtggcggcacgttccttccccccatcctccttcgtaatgtttaggggacttagacagcggtttcacctgaccttgtcgttatccttcgcgactgtgcaacaatcagggctgctgttctacaatgggaggttgaacgagaagcacgatttcctggccctagaactcgtcgctggtcaggttaggctgacttatagcactggcgaatcaaatacggtggtttccccaacggttccaggcggactctccgatggccagtggcataccgtgcacctgcgatactataataaacctagaacagacgctctgggaggagcccagggcccttctaaggacaaggtagcggtcctctctgttgacgattgtgatgtggccgtcgcattgcaattcggtgcggaaatcgggaactactcttgcgctgctgcgggtgtgcaaacctccagtaagaaatctctagaccttactggcccacttctcctcggtggcgttcccaacctacccgaaaactttccggtgtctcacaaggactttatcgggtgtatgagagacttgcacatcgatgggagacgcgtcgatatggccgctttcgtcgccaacaacgggaccatggctggttgtcaggcgaaactccatttttgcgatagtgggccatgtaagaactctggattctgtagtgaacgctggggctctttctcatgtgactgtcctgtgggctttggcggaaaggattgtcagttaacaatggctcacccccatcatttccgtggaaacggaaccctttcatggaattttgggagtgatatggctgtcagtgtaccctggtatctcggtctggcatttagaactcgggctacccaaggcgtgctcatgcaggtgcaggctggaccccacagtaccctgttgtgccagctcgatcgcggtctgttatcagtaacagtgacaaggggtagcggaagagccagtcatctccttctagatcaagttacagtgtccgacgggagatggcacgacctccgcttggaactccaggaagagccgggtgggaggcgcggacatcacgttcttatggtctctctggacttttccctatttcaggatacgatggcagtcggatctgaactccagggcttgaaagtgaagcagctgcacgtgggagggctgcccccagggagcgctgaggaggccccacagggcctcgtgggctgcatacagggagtttggttaggatctaccccgagtgggagcccggctctcctgccgccatcccatcgagtaaacgccgaaccaggctgtgtggtaaccaatgcctgcgcttctggaccttgtcctccacacgcggattgtagggacctgtggcagacattctcctgcacttgtcagcccggatattacgggcctggctgcgtggatgcgtgcctgctgaacccctgtcaaaaccaaggcagctgtaggcacctccccggtgccccacacggatatacctgtgactgcgttggcggatacttcggacaccattgcgaacatcggatggaccagcagtgcccccgaggctggtggggcagtcccacctgcggcccttgtaattgtgacgtacacaaagggtttgacccgaactgcaacaagacgaatggccagtgtcactgcaaggagtttcattacaggcccaggggctcagattcctgtctaccttgcgattgctaccctgtggggtctacctctagatcctgtgcacctcactcggggcagtgcccttgtaggccgggtgccttgggacgccagtgcaacagctgtgacagcccatttgcggaggtgactgcctctgggtgccgggtgctgtacgatgcctgtcctaaatccttaagaagtggagtatggtggccgcaaaccaaattcggcgttctcgctactgtcccttgtccaaggggcgcactgggggcagccgtgaggctgtgcgacgaagcccaggggtggttggagccagacttatttaattgtacctcccccgcattccgtgagttaagcctgctgctcgatggcctggagctgaacaaaaccgctctcgatacaatggaggcaaagaagttggctcagaggctgcgggaagtgactgggcacacggaccactacttcagccaggacgtgcgcgtgaccgccaggttgctcgcccacttgctggccttcgaaagccatcagcagggattcggtctgaccgcaactcaggacgcccactttaacgagaacctgctctgggctggttctgccctgctggcccctgaaaccggcgacctgtgggctgctcttggacagagggctcccggagggtcgcccggtagtgcagggttagtgagacatttagaagagtacgctgctacactcgccagaaacatggaactgacgtatctgaaccccatggggttagttacaccaaacatcatgctgagcatcgatcgcatggagcacccttccagtcctagaggtgctcgtcgctatccaaggtaccactccaatctattcagggggcaagacgcctgggaccctcatacccacgttctgctcccctcccagagccctaggccctcgccctcggaagttttgccaacttcctctagcattgagaacagcactacttccagtgttgttccaccccctgcccctccagaacctgagccgggaatctccatcatcattctactggtgtaccgtacactgggaggtctgctacctgcccagttccaagccgagcgcaggggcgcacgcctccctcaaaatcccgtgatgaattctcccgtggttagtgtggccgtattccacgggagaaactttctgcggggaatcttagagagcccaatttctttggagtttcggctgttgcagacagctaatcgctccaaggcgatttgcgttcagtgggatcctccagggctcgccgagcagcacggggtctggaccgctcgggattgtgaactcgtacacaggaacggctctcacgcaaggtgtcggtgttcacggacgggcacttttggagtcctgatggatgccagtcctcgcgagcgcctggaaggcgatcttgagctcttggcggtcttcactcatgtcgtggttgccgtatcagtggcagccttggtgctgaccgcagctatcctgctgtctctgcgctccctcaaaagtaacgtgcgcggtattcatgccaatgttgcagccgcactgggcgtcgccgagctcctatttttgctggggattcaccgaacccacaaccagctggtatgcaccgcggttgccatcttgcttcactacttttttctctccaccttcgcctggctattcgttcagggtttacacctgtatcgtatgcaagtggaacctcgtaatgtggatcggggagccatgagattttaccatgccctcggttggggagtgcccgctgtgcttctaggccttgccgtggggttggatccagaaggctacgggaaccccgacttttgttggattagcgtgcatgaacccctgatctggagctttgcagggcctgtggtgctggtgatcgttatgaatggcaccatgttcctgttggccgctaggaccagctgttccactggtcagcgcgaagcgaaaaagacttctgctctcacactccggagtagttttctattgctactgctggtctccgcctcttggttgttcggactcctcgccgtgaaccactcaatactagcattccactacttgcacgccggactgtgcgggctgcagggactggctgtgctgcttttgttttgtgtcttaaacgccgatgccagagcggcttggatgcccgcttgtcttggtcgaaaggctgcaccagaggaagcgagacccgctccgggtttaggccctggggcatataataacacagcactgtttgaggagagcgggttgatccggattactctgggtgcttcaactgtatccagcgtttcatctgcacggtcaggcagaacccaagatcaggattcacaaagaggtcgaagctatctgagggacaatgtgttagtacgccacgggtcagcagctgatcacactgatcatagcctacaggctcacgcaggccctactgatctcgacgtggccatgttccaccgtgatgccggtgccgatagtgactctgactctgatttaagcttggaggaagagcgcagtttgtcaataccgagttccgaatcggaggacaacggcagaaccagagggcgattccagagacctctttgccgagctgcacagagtgagcgactgctcacccatccaaaagatgtagacggaaacgatttactctcgtattggcccgctctcggcgagtgtgaagctgcaccctgcgccctgcagacgtggggaagcgaacgtcgcctcgggctcgacacttccaaggacgctgctaataacaatcaacctgacccggcattaacgtcaggcgacgaaacctccctgggaagggcccagcgacaacgcaaggggatcttgaagaatcgccttcagtaccctcttgtgccgcagactcgaggcgctccagagctatcctggtgccgagcagctactcttggtcatcgcgctgtgcccgcagcctcctatggcaggatctacgccggaggcggaacaggctctctgtcccagcctgccagcagatactctagccgcgagcaactggacctgctgttgcgacgccagttaagcagagagcgactggaggaggctcctgctcctgtgctgcggcctctgagccgccctggctcccaggagtgtatggacgcagcacctggacgcctcgagcctaaggatagaggctccaccctacctagacggcagccccctcgcgactatccaggagcaatggcaggcagattcgggtcgcgggacgctctggatctaggtgctccgcgtgagtggctgtccactctgccaccccctcgcagaacccgagatctggacccccagccacctcctctccctctgtcgcctcagcgtcagctctcccgggatccactgttaccaagcagacctcttgatagtttgtcccggagcagcaattccagggaacaacttgaccaggtgccgtcccggcatccctcccgcgaagcccttggccctctgcctcagctgctgcgggctcgggaagattccgtctctggcccatcacatggacccagcaccgagcagctcgacatactttcatcgatcctggcgtctttcaactcaagcgctctgtcgtccgtccagagctctagcacccccctgggcccacacacgacagcgactccaagcgcaaccgcgagcgtgttgggaccaagtacacccaggtccgctacatcacactcgatcagcgaactgtcacctgattcagaggtgcctcgctccgagggacacagctaa

SEQ ID NO: 216478 - DNA, 9954 bp, synthetic construct
  misc_feature 1..9954: note = Description of Artificial Sequence: Synthetic coding sequence
  source 1..9954: mol_type = other DNA
atgatggcccgacgccctccttggcgcggacttggtggtcgttcgaccccgatcctgctgctccttctactctctttgtttccattgtctcaagaggaactggggggtggaggtcatcagggctgggatccaggactggcagcgaccaccggccctagggctcacatcgggggtggcgctctggcattatgccccgaaagctcgggcgtgagagaagacggagggcctggattgggcgtcagagagcctatatttgtcggccttcgcggaaggcggcagtccgcgagaaatagtcgaggtccacctgagcagccaaacgaagaattgggaattgaacatggggtgcagcctctgggctcacgcgagcgggagacagggcagggtccaggatccgtcttatactggcgtcctgaggtttcttcctgtggccgaactggacccctacagagaggcagtctgagccctggcgctctgtcttcaggcgtgcctggaagtggcaatagttcgcctttaccatccgacttcctgatcaggcaccacggtcctaaaccggtatctagccagagaaacgctggcaccggctcaaggaagcgggtaggcactgccaggtgttgtggtgaattgtgggcgacgggctcaaagggtcaaggcgaaagagctactacgtccggtgctgagcgcacagccccaagacgtaattgtttaccgggtgcctctggtagtggacccgagctggattccgccccacgcactgcacgcacggcccctgcgtctggcagcgcccctcgcgagtcacggacggccccagagccggcaccaaagaggatgcggagcaggggtctatttaggtgtcgttttctgcctcaaaggccaggccctcgtcctccaggcctgccggcacgtcctgaagctaggaaggtgacatcagccaatcgagcgagattcagacgtgctgctaatcgacacccgcagttcccacaatacaactaccaaaccctcgtgcccgaaaatgaggccgctggcacagccgtcctgcgtgttgtcgcgcaggatcctgatgcaggtgaagccggtcgactggtgtacagtctagctgctctgatgaactctcggtccctggagctcttcagcattgaccctcagtcgggcctgatcaggaccgccgcagccctcgatagggagtccatggagcgccactacttgcgagtaaccgcccaggatcacgggagcccaaggctgtccgccacaactatggtcgcagtcacagtcgcggaccgcaatgatcactcccctgtttttgaacaggcccagtaccgagaaacacttcgcgaaaatgtcgaggaggggtatcccatcttgcagctccgtgcgacagatggggacgcccctcccaacgccaatctaaggtaccgcttcgtgggccctccagccgcacgagccgctgccgctgctgcctttgaaatcgatcctcgtagcgggctcatctcaacctctggtagggtagatcgggagcacatggagtcatatgaactcgttgtagaggcatctgatcaggggcaggaacccggtcccagatcagcaacagtgagggtgcatattaccgtgctggatgagaatgataacgctccccagttcagcgaaaagcgatacgtggcccaagtgagggaggacgtcaggccccacaccgtggtgctgagagtgactgccaccgatagagataaggacgccaatggactcgtgcactacaacatcatatccggtaattccagaggccatttcgccattgattccctgaccggtgaaatccaggtggttgcacctctggacttcgaggccgaaagggagtatgctctgaggattcgggctcaggacgccggtagacctccactttctaacaataccggccttgcttccattcaggtggtcgacattaatgatcacatcccaatattcgtgtccaccccttttcaggtgtcagtcctggaaaatgcccctctaggccacagcgtgatccatatacaagcggtcgacgccgatcatggcgagaatgccaggcttgaatattccctgacgggggtggccccagatactccctttgtcattaattcagccactgggtgggtgagcgtaagcggcccactagaccgcgagtctgttgagcattatttttttggggtcgaggctagagatcacggttccccccctctttccgcctccgcaagcgttaccgtgaccgtactggacgtcaatgacaacaggccagagttcactatgaaagaatatcacttgaggctcaacgaagatgcagccgttggtactagcgtagtgagcgtcacagccgtggatagggacgcgaacagtgccatctcctaccaaataacagggggaaatacccgtaatcggttcgccatcagtacccaaggaggagttggactggtcaccctcgcacttcccctggattataagcaagagagatattttaagctggtgctgacagcctcggaccgtgcgctgcacgaccactgctacgtgcacatcaacatcacagacgctaacacgcacagaccagtatttcaatcagcgcattactccgtgtctgtcaatgaggacaggccgatgggaagcacaatagtggttatctcagcctctgacgacgatgtgggggagaatgcgcgaatcacatacctcttagaagataacctgccccagttccgcatagatgccgattctggagctattaccctgcaggcccctctcgattacgaggatcaggttacatacaccctcgccatcaccgctcgcgacaatgggataccacagaaggccgatacgacctacgtggaggttatggtgaacgacgtgaacgacaacgccccacagttcgttgcctctcattacaccggcctggttagcgaagatgctccgcctttcacatctgtgctgcagatcagtgctactgaccgggacgcccacgcaaacgggcgtgtgcagtatacctttcagaacggcgaggacggtgacggcgatttcacaatcgagccaaccagcgggatcgttcggacagtccggcgtctcgatagggaggccgtgagtgtttatgagttgacagcctatgccgtagaccgtggcgtgccccctttaaggaccccagtgtccatccaagtgatggttcaggacgtcaatgacaacgccccagtgttccccgcagaggagtttgaggtgcgggtgaaagaaaactctatagtggggagtgtagttgctcagattacagcggttgaccctgacgaagggccaaatgcacacatcatgtaccagatcgtggaggggaatattccagagttgttccagatggatatctttagcggcgaactcaccgccctcattgatctggattacgaagcacgccaagagtatgtaatcgtcgttcaggctactagtgctccactagtctctagagccaccgtgcacgtccggctggtcgaccaaaatgacaactcacctgtgctcaacaactttcagattctctttaacaattacgtctccaatagatctgacaccttccctagcggaatcattgggaggatccccgcatacgatcccgacgtcagcgaccacctcttctattcatttgagcgcggaaacgagctgcagctcctggtggtgaatcaaactagtggcgagctgcggttaagtcgtaaactcgacaacaatcgtccattggtagcatccatgctggtgacggtcacagatggattacattcagttaccgcccagtgtgtgcttcgcgtggtcatcattacggaagaactgctggccaattctctgaccgtccgcctggaaaacatgtggcaggagagatttctcagcccccttttgggaagatttcttgaaggagttgccgctgtactggctacccctgcagaagatgtgttcatttttaacattcaaaatgacaccgatgtcggaggcaccgtcctgaatgtgtccttcagtgcgcttgcccctagaggtgctggagccggagcagccggtccatggttcagcagtgaggagttgcaggaacagctgtatgttcgacgtgctgcacttgcggctagaagcctccttgatgtacttccatttgatgacaacgtttgcctgagggaaccctgcgagaattacatgaaatgtgtctccgtgttacggttcgactcatcagccccttttcttgctagcgccagcacactgtttcgtcctatccagccgatcgctggcctgcgttgtcgctgcccgccaggattcacgggagatttttgcgaaacggaactcgatttgtgctactctaacccttgcagaaacggtggcgcatgtgctcgcagggaaggcggatacacctgcgtctgcaggccaagatttacaggggaagactgtgaactcgataccgaggccggtaggtgcgttcccggtgtgtgccgcaatgggggtacttgcactgatgccccaaacggtggcttcagatgtcagtgccccgcagggggtgcttttgaaggccctcgctgcgaggtagctgctcgatcttttcctccgtcttcgttcgtgatgtttagggggttgcgccagcgctttcacctgactctctctctgagtttcgctacagtccagcagtcaggtctcctcttttacaatggacgcctgaatgaaaagcatgattttctggcactcgagctcgttgccggacaagttcgactcacctacagtacaggagaaagcaacactgttgtcagccctactgtgcctgggggtttaagtgatggccagtggcacacagtgcatctacgctattataacaaaccacgaactgacgcgctgggcggagctcaaggccctagtaaggataaggtcgctgtgctgtctgttgatgattgcgatgtggctgtggcccttcagttcggcgcagagattggtaattactcttgcgccgcagcaggagtgcagacaagttcaaagaagtccctcgatttaacaggccctctgctcctgggaggagtaccaaacctgcctgagaattttcccgtgtctcataaggatttcatcggatgcatgagggaccttcacattgacggtagaagagttgatatggctgctttcgtggcaaacaacggtactatggctggctgccaggccaagttgcatttttgtgactctgggccatgcaagaacagcggattctgtagcgagaggtggggaagcttttcttgtgattgccccgtcggttttgggggaaaggattgccagttgactatggcacacccccatcatttccggggaaatggaaccttatcctggaatttcgggtcagatatggccgtgtctgtcccatggtatcttggcttggcttttagaacccgtgctacacagggggtcttaatgcaagtccaagccggtcctcattccactttactatgccagctggataggggtctgctgagcgtcacagtgactcgtggttcaggacgagcatcacacttgctgctggaccaggtgactgtaagcgacggcaggtggcacgacttgaggctggaacttcaggaagagcccggtggccgtcgtggacaccacgtgcttatggttagcttagacttttccctcttccaggatactatggcggtcgggtcggagcttcagggactcaaggtcaagcagcttcacgtgggcggactgccacccggttcggctgaagaggccccacaggggttggtgggttgtatccagggtgtctggctcgggtcgacaccttcgggatctcctgccctcctacccccatcccaccgcgtaaacgcagagccaggttgtgtggtgacgaacgcgtgtgccagtgggccatgcccgccacacgctgattgccgagacctttggcagacattcagttgcacctgccagccaggatactatggcccaggttgcgtggatgcctgcttactgaacccctgccagaaccaaggatcctgcagacacctgcccggtgcaccacacggatacacttgcgactgcgtcggtggttatttcggtcaccactgcgagcatcggatggatcagcaatgccctaggggatggtgggggtctccaacatgtggcccttgtaactgtgacgtgcataagggattcgatcccaactgtaataagacgaatggtcaatgccattgtaaggaatttcactaccgtccaaggggttccgactcctgcctcccgtgtgattgttatcctgtggggtctacctccagaagctgcgcccctcactctggacagtgtccttgcagacccggagctttaggccgtcagtgcaactcatgtgactcaccctttgctgaagttaccgcatcaggatgtcgagtgctgtatgatgcctgcccaaaaagtttgaggtcgggcgtgtggtggccccagactaagtttggcgttctggctactgtcccttgtcccaggggtgccttgggtcttcgcggagctggtgctgccgtgagactatgcgatgaggcacaggggtggctggaaccagacctgttcaattgcactagccctgccttcagagagctctcccttctgttagacggtcttgaactgaacaaaacagcgctagataccatggaagctaagaaactggcacagaggctccgcgaagtgacggggcatacagatcattacttctctcaggacgtgcgcgtcaccgcgcgattgctcgcacacctcctggcctttgaatctcaccagcaagggttcggcttaacggcaactcaggacgctcacttcaacgaaaacctcttatgggctggtagcgccctcctcgcacccgagacgggggacctgtgggccgctcttggccagagagcccctggagggtcaccagggtcggcagggctagtacggcacctggaagaatacgccgcaacgctcgccagaaacatggaactgacatacttgaacccaatgggtctggttacccccaacattatgctgagcatcgacaggatggagcacccctccagccctcgcggagctagaaggtatccacgctatcactctaacctctttcgaggacaggacgcctgggatcctcatacccatgtgttactgccttcccagtcccccaggcctagcccaagcgaggtgcttcctacctcctcctctatcgagaactctaccacaagttctgtagtccctccaccggcacctcccgagccggaacctggcatcagtatcatcattctgctggtgtacagaaccctgggtggattactcccagcccagtttcaagctgaacgcagaggcgctcgactccctcagaaccccgttatgaactcccccgtagtgtctgttgccgtgtttcatggcaggaattttctgcgcggaattctggaatcaccaatttcactcgagtttagattactgcagactgccaacaggtccaaagccatatgtgttcagtgggacccccctgggctggcagagcaacacggggtgtggactgcacgggattgtgagttggtgcataggaacggctcccatgccaggtgtagatgttctcggaccggcacattcggcgtgctgatggacgccagtcccagagagagactggagggggatctcgagctcctcgccgtattcacccacgtcgtggtcgcagtgtctgtggctgccctcgtcctcaccgccgcaatcctcctctctctccgaagcctgaagagcaacgtgcgaggcatccacgccaatgtggccgcagccctgggtgtggccgagctgctttttcttctggggattcatagaactcacaatcagctcgtgtgcacagcagttgctattttgcttcactactttttcctgtcaactttcgcctggttgttcgtgcaaggcctgcacctgtaccgtatgcaggtggaacccaggaacgtggacagaggagcaatgaggttttaccacgcccttgggtggggagtgccggcagtactgttaggccttgctgtcggcttggaccctgaaggctacggaaaccctgacttctgctggatcagcgtccacgagcccctcatctggtcatttgcaggccctgtagtcttggtgatagtgatgaacgggacgatgttcctgctggctgcccgaacaagctgctcaaccggccagagagaggcgaaaaagacctccgccctgaccctccgcagctccttcttgctgctgctgttagtgagcgcgtcctggttgtttggtctactcgcagtaaaccatagcatactcgccttccactatcttcacgctggcctgtgtgggctacaagggctggctgtccttctgttattctgcgtgctgaacgctgatgctagagcggcttggatgcctgcatgcctggggagaaaggcagcccctgaggaagcaaggccagccccagggctgggaccgggtgcatacaacaacacagccctgtttgaggagtcaggcttaatacggattactctcggagcctcaactgtgtccagtgtgagtagtgccagaagtgggagaacccaggaccaggattctcagcggggaaggtcatacctccgggataatgtcctcgtacgtcacggctccgccgcagatcacacagaccactcgcttcaagcccacgcgggacccacagacttggatgtggctatgtttcatcgggatgctggagctgacagcgattctgacagtgacctgtcactcgaggaagagcgctccctgtctattcccagcagtgagagcgaagataatgggaggacccggggacggttccaaagaccgctctgtcgagcagcacaaagcgaaagactgctaacgcacccaaaagatgtggatggaaacgacctacttagctattggcccgcattaggagagtgcgaagcagccccatgcgctctgcagacctggggcagcgaacgcagactgggccttgatacgagtaaagatgccgctaacaataatcagcctgatccggcattgacatccggggacgaaaccagcttaggcagagcccaaaggcagcgtaaagggattctgaaaaatcgcctgcagtaccccttggtaccccagacaaggggcgctcccgaactcagctggtgccgcgcagcaacattgggccaccgggctgtccccgctgcctcttacggcaggatctacgctggcggtgggaccggatccttgagtcagcccgctagcaggtatagctccagggagcagttagacctattacttaggaggcagttgagtcgagagcgacttgaagaggccccagcacccgtgttgcgccctctgagccggcctggtagccaagagtgcatggatgcggctcccggtcgacttgagccaaaggaccggggaagtacactgccgaggcggcagcccccaagggattaccctggagcgatggcgggtaggttcgggtctagagacgcacttgaccttggagccccacgcgagtggctgagcactttgcctccgccacgaagaacaagggacttggacccacagccccctcctctcccgttgtcccctcagaggcagctaagtcgcgacccccttctgccaagtcgacctttggactccctctctcgtagttccaattctcgagaacaactggaccaggtgccatcacggcatccctcgagggaagcgctaggtcctcttccccagctgctaagagcgcgtgaggattccgtctctggaccctcacatggccctagtacagagcaactggacattctttccagcattctagccagcttcaacagcagtgccctgagctcagtgcagtcctctagtactccccttggccctcacactactgccacacctagtgcaacggccagtgtgctgggcccatccacacctcgttctgcgacaagccacagcatatccgagttatccccagatagcgaggtccccagatcggagggccactcataa

SEQ ID NO: 216479 - DNA, 1557 bp, synthetic construct
  misc_feature 1..1557: note = Description of Artificial Sequence: Synthetic coding sequence
  source 1..1557: mol_type = other DNA
atggcgttctgggccggagggagcccttctgtggtggattactttccttcagaagacttttaccgctgtggctactgtaaaaacgagtctggctcccgttcaaatgggatgtgggctcacagtatgacggtgcaggactaccaggatttaatcgaccgagggtggcgtagatctggaaaatacgtttataagcccgtcatgaaccaaacatgctgtcctcagtatacaatacggtgcaggccccttcagtttcagccctccaagagccataagaaagttctcaaaaagatgctgaaatttctggccaagggtgaggtgcctaaaggttcctgcgaagatgaaccaatggactcgactatggacgacgcagtagcaggcgactttgcgctgattaataaattggatatacagtgtgatctcaaaactttgagtgatgatataaaggaatccctcgaatccgagggcaagaatagcaaaaaagaagagccccaggaattactgcagtcccaagattttgtgggtgagaaactggggtctggcgaaccttcgcacagcgtaaaggtccacactgtgcctaaaccgggaaagggagccgacctaagtaagccaccttgccgaaaggctaaggagatcaggaaagagcggaagagactgaagttaatgcaacagaatccggcaggcgagcttgaaggcttccaggctcagggccacccaccttccctgttccctcctaaggcaaaatctaaccagcctaagagcctcgaggatttaatctttgagagtctccccgaaaatgccagccataaactagaagtccgcgtggtgagaagctcacctccgagtagccaatttaaggcgactctgttagagtcgtatcaggtgtataagcgataccaaatggtgatacataaaaacccccctgataccccaacagaaagccagtttacacgctttctgtgttcttcaccactggaggcggagacaccacctaatggtccagattgcgggtatggatctttccatcagcaatactggctggacggtaagattatcgccgtaggcgtgatcgacattcttcctaattgcgtttcatccgtgtacctgtattacgacccggactactctttcctgtcactcggcgtttacagtgcactgagagaaattgctttcactcggcagttacacgagaagacttcacagttgagttattactatatgggattttacattcactcctgtcctaaaatgaagtacaaaggtcaataccggccttcagatctgctgtgccccgaaacctatgtatgggtcccaattgaacagtgcctgccatccctagaaaattccaaatattgccgcttcaatcaagaccctgaagccgtggacgaggatcgcagcacagagcctgatcgcctgcaggtgtttcacaaacgggctatcatgccatatggagtgtacaagaaacagcagaaagacccttctgaggaggccgcagtgctgcagtatgcgtctttggtcgggcagaaatgcagcgagagaatgttgctgttccggaattag

SEQ ID NO: 216480 - DNA, 3195 bp, synthetic construct
  misc_feature 1..3195: note = Description of Artificial Sequence: Synthetic coding sequence
  source 1..3195: mol_type = other DNA
atgggacgtcacgtcgccacttcatgccacgtcgcctggctgttggtactgatcagtggctgttggggacaggtgaaccgtttgccattttttacaaaccactttttcgacacttatttactgatatccgaggacacgcctgtcggcagtagcgttacacagttacttgcccaggatatggacaacgaccccttagtttttggggtctccggcgaggaagcttcgcgcttttttgccgtagaaccagacaccggcgtggtatggttgcgccagcccttggaccgagagactaagagcgagttcaccgtggagttcagcgtgagtgaccatcagggagttatcacccgaaaagtgaacatccaggtcggggacgtgaacgacaatgcaccaaccttccataaccaaccttactctgtgcgaattcctgaagtgggcgcaactgggaacactcccgtgggcacccccatattcattgtcaacgctaccgaccctgacttaggagccggaggctctgtcctttacagtttccagccaccctcccagtttttcgccatcgattccgctcggggtatcgtgaccgtgatcagagaactggattacgaaacaacgcaggcctaccagctgacagtgaacgcaacagaccaagataaaacacgtcccctgtcaacactggctaacctcgccataatcataacagatgtgcaggatatggaccccatcttcatcaatctcccttacagcactaacatatacgagcacagtcctccaggcactacagtacgcatcatcactgctattgaccaggataaaggcagaccacgaggcatcggctatacaatcgtgtcagggaacaccaacagcattttcgcactcgactacataagcggagtgctgacattgaatgggctccttgatagagagaacccgctatattcacatgggttcatcttgaccgttaagggcacagagttgaacgacgatcgaacaccaagcgatgccacagtcacaacaacattcaacattctggtgatcgatatcaatgacaatgctccagaatttaacagcagtgagtattcagtagctataaccgaactcgcccaagtgggttttgctctccctctgtttattcaggtggtcgacaaggacgaggggctgaactcaatgttcgaagtatacttagtgggtaacaattcccaccactttatcattagtccgacttcggttcagggcaaagccgatatcaggatacgcgttgctatcccgttggactacgaaacagttgaccgctacgactttgacttatttgctaatgagagcgtgcctgaccacgtcggctacgcaaaggttaaaatcaccctgataaacgaaaacgataaccggcctattttctcgcagcctctctataacatttccctatacgaaaatgtcaccgtcggtacgtccgtgctcacagtgctcgcgacggataacgacgctggaaccttcggggaggtcagttactttttctccgatgatcctgacaggtttagtttagacaaagacacggggctcattatgttgattgccagactggattacgagttgatacagcgattcacactaacaattatagcaagggacgggggtggcgaggaaacaacagggcgtgttcggattaacgtcctcgacgtgaatgacaatgtccccactttccaaaaagatgcgtatgtaggcgcacttagggaaaacgagccttcggtcacccagcttgtgcggcttagggcgactgacgaggactctcctccaaataaccagatcacctactccattgtatctgcctcagccttcggcagttactttgatatctcactgtatgagggctatggcgtaatttctgtgtcccgacctttagattatgagcagatcagtaatgggctgatttacctcacagtcatggcgatggacgccggaaacccaccgttaaactccaccgttcctgtgaccatcgaggtttttgacgagaacgataaccccccaactttttctaagcccgcttacttcgttagcgtcgtagaaaatattatggcaggagccacagttctgttcctgaacgccaccgatttggaccgctctcgcgaatacggccaggagagcatcatttattccctagagggaagcacgcagtttcgcatcaacgcacgttccggcgagatcacgacgacgtctctcctggatcgcgaaacgaagtctgagtatattcttatcgtgagggctgtggatggaggggtgggacataaccagaaaacggggatcgctacagtaaacatcacactgctggatataaacgacaaccatccaacctggaaggatgccccatattatataaatctcgtcgagatgacacctccagacagcgacgtaactacagtggtggccgtcgaccccgacttgggcgagaacgggacgctggtttactcaatccagcctccaaacaaattctattcactgaactctaccacaggaaaaatacggacaacgcatgccatgctcgatagagaaaacccagatccgcatgaagccgaattgatgcgtaaaattgtggtgtctgtaacggactgcggccgacccccactgaaggccacgagcagcgctacggtattcgtgaatctcttagacttaaacgacaatgaccctacgttccaaaatcttccatttgtcgccgaggtgctggagggaatcccggcaggtgtgagtatataccaggtggtggccattgacttagatgaagggctgaatgggttggtcagctacaggatgccggtcggtatgccacgcatggacttcctcattaactcatcatcaggagttgtggtgaccacaactgagcttgaccgtgaacggatcgctgagtatcaactcagagtggtggcatctgacgctgggacccccactaaaagctcaacgtcaaccctcacaatccatgtgctggacgtgaatgacgaaactccgacattctttcccgctgtttataacgtctccgtgagtgaggatgtgccacgcgaatttcgggtagtgtggctaaattgtacagacaacgatgtcggactcaacgcagaactctcttatttcatcaccggcgctgcacccgctagcgcccacttatgtaggcccccaggtgcgctccccccacccctacccgatggacagcccgattag

SEQ ID NO: 216481 - DNA, 3345 bp, synthetic construct
  misc_feature 1..3345: note = Description of Artificial Sequence: Synthetic coding sequence
  source 1..3345: mol_type = other DNA
atggttaagtcccccatgaaccgcgagctggttgctacttacgaggtaactctgtctgtcatcgacaatgcctctgatctacccgagcgatcagtgagcgtgcctaatgctaagctgaccgttaacgtccttgacgtgaacgacaacacgccgcagttcaaaccatttgggatcacctattatatggaacgtatcctggagggcgcaacccctggcacgaccctcatcgccgtggccgcagttgaccccgataaaggcttgaacggattagtgacttacacgctgctcgatcttgtgcccccaggctatgtacagctggaagacagttcggccggtaaggtcatcgcgaatcggaccgtcgactatgaggaggtgcactggctcaactttacggtgcgagcaagcgacaatgggtcgcctccccgagcagccgaaatcccagtttacctggaaatagtggacattaatgataacaaccccatcttcgatcaacccagctatcaagaagcggtgttcgaagatgtgccagtcggtaccatcatcctgaccgtgacagccaccgacgcagatagcggaaattttgccctgatcgagtattctctgggagacggagaaagtaagttcgccatcaatccaacaactggtgacatctatgtgttatctagcctggacagagaaaaaaaggaccactatatactgacagccctcgccaaggataaccctggcgacgtagccagtaacagacgcgaaaacagtgtgcaagttgttatacaggtgctggacgtaaacgactgtcgtcctcagttctcgaagccacagttttcaacttcggtatacgaaaatgaaccagccggaacttctgtcatcactatgatggccacagaccaggacgaaggtccaaacggggaactgacttattcgctggaagggccaggcgtggaggcattccacgtcgacatggattctgggctggtcacaactcagagacctttacagtcttacgaaaagttttccctaaccgtggtggctacggatggaggagaacctccgctctgggggacgaccatgcttctcgtggaggtcatcgatgtgaatgataatcgaccagtgtttgtcagaccacccaatggcacgatattacacatcagggaagagatcccactcagaagtaatgtctacgaggtgtatgccacggacaaggacgagggtttgaacggagccgtgcgctacagcttcctcaaaacagccggtaacagagactgggaattttttatcatcgatccaataagcgggctcatacaaacagcgcagcgcctcgatcgcgaatctcaggcagtttattctttgattttagtggcttctgatctaggccagccggtcccgtatgaaacgatgcaacccctgcaggtggccctggaggacatcgacgacaatgagcctcttttcgtgaggcctccaaaaggaagcccgcagtatcaattgcttacggtgccagaacattccccaaggggtacactggtggggaatgttacaggggctgttgatgctgatgagggcccaaacgccatcgtttattacttcatcgctgcaggaaacgaggagaagaatttccacctccagccagacggatgtctgctggtccttagggacctggatagggagcgcgaggccatctttagtttcatcgtgaaagcttcatccaatcgcagctggacgccacctaggggtcccagtcccaccctggacttggttgcggatttgactctgcaggaagtgcgagtcgtcctggaggatatcaacgatcagcctccaagatttactaaggctgagtacaccgcaggcgtagcaactgacgctaaggtgggctcagagctgatacaggtccttgcgctggacgcagacatcggaaacaacagtctggttttctattcaattctcgcaatccattacttccgggcactcgccaatgattctgaagacgttggacaagtctttacgatgggatcaatggacggtatcctcaggaccttcgaccttttcatggcttatagccctggttactttgtggtggatatcgtggctagagatctggctgggcacaacgacacagcgattatcggcatttatatcctgcgcgacgaccagcgagtcaaaatcgtgatcaacgagatcccagatcgggtccggggttttgaggaggagtttattcatctgttatctaatattaccggcgcaattgttaatacagacaatgttcagttccatgtggataagaagggacgggtcaactttgctcagacagagttgctgatacatgtggttaatcgtgatactaatagaatccttgacgtggacagagttatccagatgatcgatgaaaataaggaacagctccggaacctatttcggaattacaatgttctagacgtccagccagctatctccgttcgactccccgacgacatgtcagctctccagatggctatcatcgtgctagcaatactgctcttcttggcagcaatgctgttcgtcttaatgaactggtattatcgcacagtccataagagaaagttgaaagctattgtagctggctcagccggaaatcggggattcattgacatcatggatatgcccaacactaataagtactctttcgacggggcaaacccagtgtggttggatccattttgccgcaatttggaactggcggcacaggcagagcacgaggatgatctgcccgaaaatctaagtgagattgctgacctgtggaacagccctactagaacccacggaacattcggccgtgaacccgctgccgtcaaaccagatgacgaccgctacctgcgtgctgccattcaagaatacgataatattgccaaattgggccagataattcgggaaggacctataaagggttccttactgaaagttgtactcgaagattatcttcgcctcaagaaactttttgcccagaggatggtgcagaaggctagcagctgccattcatcaatttcagaactgattcagaccgagctcgatgaggaacctggagatcacagtcctggccaaggaagccttaggtttcggcataaaccgcctgtggagctgaaaggtcccgacggcattcacgtagtacacgggagtaccgggacactccttgcgacggacctcaactctctgcccgaggaagatcaaaaaggcctagggagatcactcgagacactgaccgctgctgaagctactgcattcgaaaggaacgcaaggacggaaagcgccaagtccaccccccttcataagctgcgcgatgtgatcatggaaactcctctggagattactgagctatag

SEQ ID NO: 216482 - DNA, 1368 bp, synthetic construct
  misc_feature 1..1368: note = Description of Artificial Sequence: Synthetic coding sequence
  source 1..1368: mol_type = other DNA
atgagagcttctttgggcgtatgtggaaccgcatcatccatggtgattgtctatgttgaggatattaatgatgaagccccagtgtttactcagcagcagtatagtagactgggactacgggagaccgccggtatcgggacctccgtgatcgtagtacaggcaacggacagagattccggcgatggaggactcgttaactaccgaatcctgtcaggcgcagagggcaaatttgaaatcgatgagtctactggcctgatcattacagtgaattacctggattacgagacaaaaacgtcatatatgatgaacgtttctgcaaccgaccaggctccaccattcaatcaaggattctgcagcgtctacatcaccctcctgaacgaactggatgaggccgttcaattctctaatgctagctatgaggcagcgatactggagaatctggctctcggaacagaaattgttcgagtgcaggcctacagtattgacaacctgaaccagattacctatagattcaacgcctatacctcaacacaggcgaaagccttgttcaagattgacgctatcacaggggtaataactgtgcaaggcctggtagacagggagaaaggagacttctatactcttaccgtggtcgccgatgatggcggtccaaaagtcgatagcaccgtcgtttatataaccgtgcttgacgaaaatgataactccccaagattcgatttcacttctgattctgccgttagtatcccggaagattgtcccgtgggccagagggtggcaaccgtgaaagcgtgggaccccgacgccggtagcaatggccaggtagtgttctccttagctagtggtaatatcgcaggcgcttttgaaatcgttaccaccaacgactcaatcggggaagtattcgtagctcggccattggacagagaggagctggaccattacattttacaggtcgttgcatcagatagaggaacaccaccacgaaaaaaagatcatatcttgcaggtaactattttagacatcaatgataatccgccagtgattgaaagcccatttggatacaacgtaagcgtcaacgagaacgtcggtggcggtaccgccgtggtgcaggtccgggctacggacagggatattggcattaattctgtcttatcatactatattaccgagggaaacaaggacatggcgttcaggatggatcggatttccggagagatagctactcgaccggcaccacccgatagggagcgtcagtcattttaccacttggttgccactgttgaggatgagggcacgccaacactgtcggtgtcagatgggggaggccatagagaggagcgcgtggggcagggttcctccgcgtccgaatag

SEQ ID NO: 216483 - DNA, 1593 bp, synthetic construct
  misc_feature 1..1593: note = Description of Artificial Sequence: Synthetic coding sequence
  source 1..1593: mol_type = other DNA
atggggagacacgtggcaacaagctgtcatgttgcctggttgttggtcttgatcagcggatgctggggccaggttaaccgcttaccattctttacaaatcacttctttgacacgtatctccttatttctgaagacacgccagtcggctcctctgttactcagctgctggcccaagacatggataatgacccccttgtgttcggagtcagcggagaagaagccagtaggttttttgcagtcgagcccgacactggtgtcgtgtggctgaggcagccccttgaccgggagacaaaatctgagttcaccgtggaattctcagtcagcgaccaccagggagtgattacacgaaaggtgaatatccaggttggggacgtgaatgacaacgcgcctacgttccataaccagccttacagtgttcgaattcccgaaaacacaccagttggaaccccaatcttcatcgtaaatgccacagatcccgacctgggagccggagggtcagtcctgtacagcttccagccccctagtcagtttttcgcgatagacagtgcacgaggcattgttactgtcatccgggagctggactatgaaaccactcaggcgtatcaattgacagtaaatgctactgaccaggataagactcgcccactcagtactctggccaatttagctattataattacagatgtgcaggacatggatcctatatttatcaatctcccctactccaccaacatctacgagcatagcccacctggaaccacagttaggatcatcaccgccatcgatcaggacaaggggcgacctcgtggcattggctatacaatagtgtccgggaatacaaattcaatctttgcgttggattacatttccggtgtgctgacacttaacgggttactagaccgggaaaatccactctatagtcacggatttatcttaactgtgaaggggactgaactcaacgatgaccggacgcctagtgacgcaacagttacaacaacattcaacattcttgtaattgatattaatgacaacgcaccagaatttaactcgagtgaatactccgtggccatcacagaattggctcaggtgggattcgccctgccactgtttattcaggtggtggataaagatgaaaacttaggtctcaattctatgttcgaggtttacctggtgggtaataactcacatcacttcattatttctccaacttctgtgcagggcaaagccgacattcgcataagggtggcaatcccgttagactacgagacagtcgatagatacgacttcgatctgttcgccaacgagtccgttcctgaccacgtgggttatgcgaaggtgaaaatcactctcatcaacgagaatgacaacagaccaatctttagtcagcccctgtacaacatttcattgtatgagaacgtgacagtaggcacgagtgtactgacggtcttagttagccctcgattcacagctggacctctgtcatccccgggtccaaccgtggtgaggcatcctgagggattttgccccagagacctgtctaaccaagggaggcggcaccctcagattccggagctgtgtttgcttgtgtactag

SEQ ID NO: 216484 - DNA, 3639 bp, synthetic construct
  misc_feature 1..3639: note = Description of Artificial Sequence: Synthetic coding sequence
  source 1..3639: mol_type = other DNA
atggggaggcacgtcgcaacctcctgtcacgtggcttggttactcgttctgatcagcggctgctgggggcaggtgaatcgattaccattcttcaccaatcatttctttgatacctacttactgatatccgaagatacacccgtggggagcagcgtcactcagcttttggcccaggacatggataacgatcccctggtctttggggtctccggcgaggaggcttcgaggttcttcgctgtcgagcccgacacgggagttgtgtggctcaggcagccactggatagagagacaaagtctgaatttaccgttgaattctcagtgagcgaccaccagggagtgattacgcgaaaggtgaacatccaggtcggggacgtaaacgacaacgccccaacttttcacaatcagccgtacagtgtgcgcattccagaaaatacccccgtgggaacgccgattttcattgtcaacgctacagaccccgacctgggtgccggaggcagcgtattatactccttccagccaccctcccagttctttgcgatcgatagtgccaggggaatagtgaccgttatacgcgaattggactacgagaccacccaggcttaccaacttaccgtgaatgcaacagaccaagacaagacaagacctctcagcaccttggcaaatttggccatcattattactgacgtccaggacatggatccaatattcataaacctgccttactccaccaacatctacgagcattcacccccaggtacgacggtgaggataatcactgccatcgatcaggacaaggggagacccaggggaattgggtacactattgtgagtggaaacaccaacagcatctttgccctggattacatctcgggggtcctgactttgaatggccttctagaccgggagaatcctctgtactcgcacggtttcattctgacggtaaaaggaaccgagttgaacgacgacaggactccatcagatgcaacggtgactacaacttttaacattttggtgattgatattaatgataatgcccctgaattcaactcctctgaatactcagtggcaattacagaactggcgcaggtgggatttgcactcccgctctttattcaggtggttgataaagatgagacccaaggactaaactctatgtttgaagtttacttagtgggcaacaactcacaccatttcatcatttctccaacctctgttcagggcaaggcggatatccgaatccgggtggcaatccctctggattatgagaccgttgacaggtacgacttcgatttattcgctaatgagtcagtgccagaccatgttggatatgccaaagtgaagatcaccctgattaacgagaatgataatcgtccaatcttcagccagcctctttacaacatttctctgtatgaaaatgtcacagtcggtacatctgtcctgacggtacttgctacggacaacgacgctggtacctttggtgaagtgtcctacttctttagcgacgacccagataggttcagcctggacaaggatactggtctgataatgctaatcgcaaggttggactacgagcttatccaacgatttaccctcaccatcattgcccgagatggtggcggagaggagactaccggccgagtgcgcatcaacgtgctggacgttaatgacaacgtacctacctttcaaaaagacgcttacgtgggcgctttaagggaaaacgagccaagcgtgacccaactggtccgccttcgagccaccgatgaagactctcctcccaataaccagatcacttactctatcgtgagtgctagtgccttcgggtcctactttgatataagtttgtatgaaggttacggtgttatcagcgtgtcgagacccctcgattacgaacagattagtaacgggctgatttatctgactgtgatggccatggacgccggaaatcctccattgaattctacagtgcccgtcaccatcgaggtttttgacgaaaacgacaaccctccaacttttagcaaacccgcatacttcgttagcgtggtcgagaatatcatggccggtgccacagttttattcctgaatgccacagatctcgatcggtctcgagagtacgggcaggagtccatcatatacagcctggagggatctactcaatttcggattaacgcgaggagtggcgagattacgaccactagcttgctggatagggagacaaaaagtgaatatattctaatcgtgagggcggtggacggtggggtcggtcacaatcagaaaaccggcatcgcaacagtgaatatcaccctccttgacatcaacgacaatcaccctacgtggaaggatgctccatactacatcaatctggttgagatgacaccccctgacagcgatgtcaccaccgtagttgctgtggaccctgatctcggcgagaacggaacacttgtctattctatccaaccaccaaacaaattttatagcttaaatagtaccacggggaagattaggaccactcacgctatgctcgacagggagaatcctgatcctcatgaggcagaactcatgaggaagatcgttgtatccgtgactgactgcggaaggccgcctttgaaggctacgagctcagccaccgtctttgtgaacctcttggacttgaatgataacgacccaacattccaaaacctccccttcgtggctgaggtgttggagggcattccagcgggtgtatccatttatcaggtggtagccattgatctcgatgagggcctcaacggactagtgtcctatcgaatgcctgtcgggatgccgagaatggactttttaatcaactcatcgtcaggcgttgtggttaccaccacagagttagaccgcgaacgaatagccgagtatcagcttagagtggttgccagcgatgcgggtacccctacgaagagttcaacgtctacgctgacaattcatgtgctggatgtgaatgatgaaacgccaaccttcttcccagccgtttataacgtctctgttagtgaagacgtccctagggagtttcgggtggtatggttaaattgtactgataacgacgtgggtttgaatgcagagcttagctactttattactggtggtaacgttgatgggaagttctcagtcggctatcgcgatgccgtcgttcggactgtggtcggcctggatcgtgagacaactgcggcttacatgctgatcctggaagccatcgataatggaccagttggcaaacggcataccggcaccgcaacggtgtttgtcacagtgctggatgtcaatgacaataggccaatttttctacaatcttcctatgaggcttccgtgcctgaggatatcccagagggacatagcatcctgcaggaagaggacctggccagcccctgcatttctcctgccccaccaagacgggcattccagagctcaggggagaaggagaccagccagttcccgggaaaggaattgcgccgagagcctggtccatcaaaagcacagaatcgcgcagccttcacagagccactggcagaggccccattgctggggagtaaacaagctcaggaggagagagcccctctacctcgagagcaggcccaacaactacaggggtcagagggcgagaagggagggccatag

SEQ ID NO: 216485 - DNA, 1593 bp, synthetic construct
  misc_feature 1..1593: note = Description of Artificial Sequence: Synthetic coding sequence
  source 1..1593: mol_type = other DNA
atgggtagacacgtcgcgacatcctgtcatgtggcttggctgctggtgctgatttcgggttgttggggccaagtgaatcgccttccattttttactaatcactttttcgatacgtacttacttatcagcgaagacacacccgtcgggtcatccgttactcaactgcttgcccaggacatggacaacgacccgctagtcttcggcgtctcgggggaagaagccagccgtttctttgctgtggagcccgacacaggggtcgtatggctgcgccagccattggatcgcgagaccaaaagcgagtttacagtggagttttctgtctcagaccaccagggggtgataacacggaaggtgaatatacaggtgggtgacgtcaatgacaacgcccctacgttccataatcagccctacagtgtaaggatacccgagaacactccagtggggacgcctatctttattgtgaatgcaactgaccccgatctgggagctgggggttccgtcctttacagcttccagccaccttcccagttcttcgcaatagactcagcacggggtatcgtgactgtaatccgggagcttgattatgagaccactcaagcctatcaacttaccgtcaatgcaactgatcaggacaagacccgcccactgtcaacactggccaatcttgccattatcatcactgatgttcaggacatggacccaatcttcatcaacttgccatactctaccaacatatacgagcatagtcctcctgggactaccgttaggattattactgccattgatcaagacaagggccgacccaggggcattggctacacaattgtgtccggcaacaccaattctatattcgcattagattatatctcaggtgttctgacgcttaacggcttgctcgaccgagagaatcctctctacagccacggattcattttgacagtgaagggcactgagttgaacgacgaccgcacaccctccgatgctacagttactaccaccttcaacattctcgtgatcgatattaatgacaacgcacctgagttcaattcctccgagtactccgtagccattaccgagttagcccaggtagggtttgcacttcccctgttcatacaagtggtcgataaggacgagacctggggattgaattcaatgtttgaggtctatctcgtcgggaataattcccaccactttataatttcccctacaagtgtgcaaggaaaagccgatattaggatccgagtggccatcccactcgattatgagacggttgaccggtacgattttgacctgttcgccaatgagtctgtccctgaccatgtgggttatgctaaggtcaaaatcaccctcataaatgagaacgacaaccggccaatcttttctcagcccctgtacaatatcagcttgtacgagaatgttacggtggggacaagtgtgcttacggtcctcgtatctccccgatttaccgctggtccattaagctccccaggcccaactgtggtgcgtcatcccgagggcttctgtccgagagatctgagcaatcaggggagaaggcaccctcaaattcccgagctttgcttacttgtgtattag

SEQ ID NO: 216486 - DNA, 9959 bp, synthetic construct
  misc_feature 1..9959: note = Description of Artificial Sequence: Synthetic coding sequence
  source 1..9959: mol_type = other DNA
atgggacggcatgtggctacatcctgtcacgtcgcctggctgttggtgcttattagcggttgttggggacaggtcaatcgcttgccattttttaccaatcactttttcgacacttatctcctgatctctgaagacacgccggtcggttccagcgtaacccagctgctcgcccaggacatggataacgatcctctggtattcggggtctcaggcgaagaagctagcagatttttcgcagttgaaccagatacaggtgtggtgtggcttcgtcagccgctagatcgggaaaccaagtcggagttcaccgtcgagttttcagttagtgaccaccagggcgtgatcacccgaaaagtgaatattcaggtcggcgacgtcaacgacaacgcgcctacctttcacaaccagccatacagcgtccggatacctgaaaatacccccgtgggtactcctatttttattgtgaacgcaactgatcctgacctgggagccggtggctctgtgctctatagtttccagccgccaagccaattttttgctatcgactcagctcgcggtatcgttaccgttattagggagcttgattatgagactacccaggcttaccaactgacggtcaatgcaactgatcaggacaagacacgtccactatctacattggctaatctggcgatcatcatcactgatgtccaggatatggacccaatctttataaacctgccctattctacaaatatttacgagcactcaccacccggtaccaccgtgaggatcattacagctatcgaccaggacaaagggcgacctcgcggtataggatatacaattgtgtcgggaaataccaattctattttcgcactggactacattagcggagttttgaccctgaacggcctcctggatagagagaaccccctgtactctcacggcttcatcctcaccgttaagggcaccgaacttaatgatgacagaacaccttcggacgccacagtgacaaccacgttcaacattctcgtcattgacatcaatgacaatgcccctgagttcaactctagcgagtactcagtggccatcacagaacttgcccaagttggatttgctttgcccctgttcatccaggtggtggataaagatgagacgcagggactgaatagtatgtttgaggtatacctggttggcaataatagtcaccattttattatttctccgacgtcagtgcagggcaaagcagacatccgcattcgagtggcaatccctcttgattacgaaactgtggacagatatgattttgatttgttcgccaacgagtccgtgcccgatcatgtcggctatgctaaagtgaagattaccctgattaatgaaaacgacaatagaccaatattctcccagccgttatacaatatcagtttgtacgagaatgtaaccgtgggtacatctgttttaaccgtcctggctaccgacaacgacgccggtacctttggggaggtgtcttattttttcagcgatgatccggatcgctttagtctcgacaaggacaccgggttaattatgctgattgcccgactggattatgagttgattcaaaggtttaccctgactatcattgccagggatgggggaggcgaggaaactacaggccgtgtaagaatcaacgtgctagacgtgaacgataacgttccaacatttcagaaagatgcatatgttggagctctccgtgagaatgaaccctccgtcacccagctcgtgagactgcgggcaacggacgaggatagcccgccaaacaatcagattacatatagcattgtcagcgcatctgcttttggttcatacttcgatatatcgttatacgagggctatggggtcatttcagtgtcccgccctctcgactatgagcagatctccaatggacttatctatctcacggtgatggcaatggacgcaggtaatcccccattgaattctaccgtcccggtgaccatcgaagtattcgatgaaaacgacaatcccccaactttctccaagccagcctactttgtttcagtggtggagaacatcatggctggtgctacagtgttgttcttgaacgctaccgatctcgatcggagccgcgagtatggccaggaatctattatctacagcttagaggggagtacacaatttagaattaatgcacgctctggtgagatcactaccaccagccttctggatcgggaaaccaagtcagaatacatcctgattgtcagggctgtcgatggaggagtcggccataaccagaaaacaggaatcgcgactgtgaatattacactccttgatattaatgacaaccacccgacctggaaggatgcaccatattacataaatctggtcgaaatgaccccacccgacagtgatgtcaccactgttgtagctgtcgatcctgatctcggggaaaacggaaccctggtgtactctattcagcctccaaataagttttacagcctcaactctacgactgggaaaatccgcacaactcatgctatgctggatagggagaacccagatccacacgaggcggagctcatgcgaaaaatcgtcgtctctgttactgactgtgggaggcccccactgaaggctacctcatccgctaccgtgttcgtgaacctcctggatctgaatgataatgacccaacttttcaaaatcttccctttgttgccgaggtgcttgaggggatcccagcaggggtatctatttaccaggttgttgcaatagacttggatgaggggctgaacggtttagtgagttacaggatgccggtaggaatgccaagaatggattttctcatcaattcatccagcggagtggtcgttacaaccaccgaactagaccgggagcgcatcgcggaataccagctgagagtggtggcttccgatgccggtacaccaacaaaatcctccacatccacccttaccattcacgtcttggatgttaatgacgagacacctacttttttcccagccgtctacaacgtgtcagttagcgaggatgtgcctagagagttccgggtggtgtggctgaactgtactgacaacgacgttggactgaatgccgagttgagctattttatcactgggggtaatgtcgatgggaagttttcagttgggtacagggatgctgtcgtccgaacggtcgtgggcctggatcgtgagacaaccgccgcatacatgctgattttagaggctatcgataatggtcccgttggtaaaaggcacactggtaccgccacagtgtttgtgactgtgctggatgtgaatgacaacaggcctattttcctgcagtcgtcttacgaagcctcggtgcccgaagacattcctgagggccatagcatactccaattaaaggcaacagatgccgacgaaggcgaattcggaagggtctggtacaggatcctccatggtaatcacggtaacaattttagaattcatgtctccaacggactgctcatgaggggacctaggcctctggacagggaacgcaattcatcccacgtgctcatagtggaggcctataatcatgacctgggccctatgcggtcttcagtaagagtgatcgtgtacgtagaagatatcaacgatgaggcaccggtgtttacacagcaacagtacagccgcctcggtcttcgagaaaccgccggtataggaacctctgtgatcgttgtgcaggcgacagaccgcgatagcggtgacggaggcttggttaactatagaatccttagcggggctgagggcaaattcgagattgacgagtctacgggtttgattattacggtaaactatctcgattacgagactaagacttcttacatgatgaacgtttccgcgacggatcaagcccctccatttaatcaaggattctgcagcgtttacattactctgttaaatgagctcgatgaggccgtgcagttttccaacgctagttacgaggctgctattttagagaatctggctctgggcacagagatcgttcgagtacaggcctactcgatagataaccttaaccagatcacctacaggttcaacgcctatacatccacacaagcgaaggcactgtttaagattgacgcgatcacaggcgtaatcaccgtccagggacttgtggaccgtgagaagggggacttctataccttgacagtcgttgccgacgatggcggacctaaggtcgactccacagtccaggtttatattactgtgctggatgaaaatgacaactcccctagatttgattttacttctgactctgctgtgtcgattcctgaggactgccctgtggggcagcgtgtagcaaccgtcaaggcttgggatccagacgcgggtagcaatggccaagtggtgttcagcttggccagtgggaacatcgccggagcattcgaaattgtaacaaccaatgattccatcggcgaagtgttcgtggctagaccgctggaccgagaagagttagaccactacatcctccaagtcgtggcatctgacagagggacccccccaagaaagaaggaccacatccttcaagtaacgattctcgacatcaatgacaatccccctgttattgagtccccgtttggctacaatgtgtccgttaacgagaacgtcggcggaggaacggctgtcgtacaggtgcgcgctacagaccgagacataggtataaattctgtcctgtcctactacatcaccgaggggaacaaggatatggcgtttcggatggatcggatttccggggaaattgccacccgcccagctcccccagacagggaacggcagtctttttaccacctcgtagccaccgtcgaagacgagggcacaccgaccctgtctgcgactacacacgtttacgtcaccattgtggatgaaaacgacaacgccccaatgtttcagcaacctcactacgaagtgcttttagacgagggtccggacacactgaacacgagtcttattaccattcaagcactcgacctggacgagggtccgaacggtacagtgacgtatgcgattgtagccggaaacattgtgaacaccttccgtattgatcggcacatgggagtgatcaccgcagctaaagaactagactacgagatcagtcatgggaggtataccctcattgtgactgccacagaccagtgtcccatcttatcccaccggctgactagtaccactactgtcttagtcaacgtcaacgatatcaatgataacgttccgacatttccacgtgactacgaaggacccttcgaagtcacagaaggacagccagggccaagagtctggactttcctcgctcacgaccgggactccgggcctaacggtcaggtggagtatagcattatggacggtgatccactgggcgaattcgttatatccccggttgaaggcgttctaagagtgagaaaagatgtggagctggaccgtgagaccattgcattttataacttaaccatatgtgcaagagatcggggaatgccccctcttagctctaccatgctggtggggattcgggtcctggacatcaatgacaatgaccccgtactgctgaatttgcccatgaatattacaatctcagagaatagccctgttagctctttcgtcgcccacgtgctggctagtgatgccgattcagggtgtaacgctagactgacatttaacattaccgccggtaatcgcgaacgcgcatttttcattaacgccaccaccggaatcgttacagttaatcggcctctggatcgggagaggatcccagagtacaagctgacaatctcagtcaaggataaccctgaaaatccacgcatagccagacgcgactacgacctgctgttgatctttctgagcgatgagaatgacaatcaccctctcttcacgaaatctacctatcaggcggaggtgatggaaaattcaccagccggtacaccgctgaccgtgctcaacggacctattcttgctctggacgccgaccaggatatctacgctgtcgtcacctatcagctcctgggtgcccaatctggattgttcgacatcaacagctccaccggggtggtcaccgttaggtcaggcgtcattatagaccgcgaagcatttagccctcccatactggaactcctgctgctggccgaggatattgggttgctgaatagcactgcgcatttgctaattacgatcctggatgacaacgataaccgcccaacgttcagcccggctactttaactgtgcaccttctcgagaattgccctcctggattttccgttctccaggtcactgcaactgatgaagactctggattgaacggtgagttagtgtatcgcattgaggccggagcacaggaccgctttttaattcatctagtgacaggggtgataagagtgggtaacgctaccattgatcgggaggaacaggagtcctatcggttaacagtggtggctaccgacagagggacagtgccactctcaggtaccgccatcgtaaccatcttgattgatgatattaatgattccaggcctgaattcctgaatccaatacaaaccgtgtctgtgctcgagtcagccgaaccaggcaccgtgatcgctaacattaccgcaatcgatcacgaccttaatccaaaacttgaataccacatcgtcggtattgttgcgaaagatgatacggatagattggtccccaaccaagaggatgccttcgccgttaacataaatacggggtctgttatggtgaagagtcctatgaatagagagttggtggcaacctatgaagtgaccctgagtgtgatcgacaatgcttctgatttacccgagcggtcagtgagtgtgcccaacgccaagttaaccgtaaacgtacttgacgtgaatgacaacacgccacagtttaagcccttcgggatcacctattatatggaacggattctcgagggagcaacccctgggaccacactcatagcggtcgctgctgttgatcctgacaaggggctcaatgggttggtgacatacacacttctcgatctcgtgcccccaggctacgtccagctggaggacagttcggccggaaaggttattgctaacaggaccgtggactatgaggaggtccactggctgaactttactgtccgagcttctgataatggatctccacctcgcgcagccgagatcccagtctacctggaaattgtggacatcaatgacaacaaccctatttttgatcagccctcttaccaggaagccgtttttgaggacgtaccggtcgggacaattatcctcactgtcacagccacggacgctgatagcgggaactttgctttgatcgagtactcgctaggggacggggaaagcaagtttgccatcaatcccaccactggtgacatttatgttctgtcctcccttgatagggaaaagaaggaccattacattctgacagctcttgcaaaagataacccaggcgacgtcgcctctaatagacgcgagaactcagtccaggtggtgattcaggtgctcgatgttaacgattgccgacctcagttctccaagccccagttctccacgagcgtgtatgagaatgagcccgcagggaccagcgttatcactatgatggccactgatcaggacgaagggcctaatggcgagctgacatattcccttgaggggcctggtgtggaggcgtttcatgtggatatggactctggactggttacgacgcagaggcccctgcagtcttacgagaagttcagtttaacagtcgtggctactgacggaggggaaccacctctctggggcactactatgctactcgtggaagtcattgatgtgaatgataatagacctgttttcgttaggccccctaatggaaccattctccatatacgggaggaaataccattgcggtctaatgtatacgaggtgtacgccacggataaggacgagggactcaacggcgctgtgagatactcattcttgaaaactgctggcaatcgggactgggaattctttattattgaccctattagcggcctcatccagacagctcagcggctggatagggagagccaggcagtttattctctgattctcgtcgcttccgacctggggcagcctgtcccttatgaaaccatgcagccactacaggtggccctggaggacattgacgataatgagcccttgtttgtcaggccacctaagggcagtccccaataccagctgttgaccgtacctgaacactctcctcgaggaactttggtaggcaatgtgaccggcgcagttgatgcagatgagggacccaatgcaatcgtgtattactttatcgccgcaggaaatgaagaaaagaacttccatttgcaaccagacgggtgtcttctcgtgctgagggatcttgatcgtgagagggaagccatcttcagcttcatcgtgaaagcctctagcaataggagctggacccctcctcgcggacccagccccactctcgatctcgtggccgatctgaccctccaggaggttcgagttgtcctcgaggacatcaacgaccagcctccgagattcactaaagctgaatacacggccggagtcgctactgacgctaaagtcggatctgagctgatccaggtgctggcccttgatgctgatatcgggaacaatagcctggtgttttattccatccttgccatccactacttccgagcactggccaacgactcagaagatgtgggccaagtgtttaccatgggtagcatggacggcatcctgaggacgttcgacttgttcatggcttattcccctggctatttcgtagtggatatagtagctagggacctggcagggcacaacgatactgctatcattggcatatatatcttgcgcgacgaccagagggttaaaatagtgataaacgagatccccgatagagtgagggggttcgaagaggagttcatccacctcttgtccaacatcacgggagcgatcgtgaataccgataatgtgcagtttcatgtcgataaaaaggggagagtcaattttgcccagaccgaattactgatacacgtggttaatagagatacaaacagaattctggacgtggatcgggtgatacaaatgattgacgagaacaaagagcagcttcggaatctgtttagaaactataacgtcctcgatgttcagcccgcaatttcggttcgcctgcccgacgacatgagcgctctgcagatggctatcatcgtgttagccatactgctattccttgcagcgatgcttttcgtgctcatgaattggtattatagaaccgtacacaagagaaagttgaaagctatcgttgcaggcagcgccggaaatcgcggatttatagatataatggatatgcctaatacaaacaagtatagctttgacggcgcaaaccccgtgtggctagacccattttgtaggaatcttgaattggccgctcaggccgagcacgaagacgatctgcccgaaaacctctctgagattgcagatctctggaattctccaaccagaacccatggtacctttgggagggaacctgctgccgtgaaaccagatgacgatcggtacctcagagcagcgatacaagagtacgataatatagccaagcttggccagatcatccgcgaaggccctatcaagctcatacagaccgaactggatgaggaacctggcgaccatagtcccggtcagggctccctgcgttttagacacaaaccacccgttgaactgaagggaccagacggcatccacgtggtgcatggtagcacgggcaccctcctcgccactgatcttaattccttgcctgaagaggatcagaaaggcctgggcaggtcgttggaaacactaacggctgcggaagcaactgcgttcgagcggaacgctcgaacagagagtgctaagtccacccctcttcacaagctgagagacgtgataatggaaactcctctggaaatcaccgagctgta

SEQ ID NO: 216487 - DNA, 10079 bp, synthetic construct
  misc_feature 1..10079: note = Description of Artificial Sequence: Synthetic coding sequence
  source 1..10079: mol_type = other DNA
atgggtcgacatgtggccacatcatgtcacgtggcctggctgctggttttgatttccgggtgttggggacaggtcaacagactccctttctttacaaatcacttttttgacacttatctgctcatttccgaggacacacctgttgggtcttccgtgacacaactgttggcccaggacatggacaatgatcctctcgtgtttggggtctcaggagaggaagccagtagattttttgcggttgagcccgacaccggagtagtgtggctacgacaacccctcgatagggaaacaaagtcagaattcacggtggaattctctgtaagtgaccaccagggggtgatcacacgaaaagtgaacattcaggttggagacgtgaacgataacgctccgacgtttcataaccagccttattccgtcagaattccagaggttggggcaaccggtaatactcccgtgggcactccgatcttcatcgtaaacgccactgaccccgacctgggcgcaggagggagtgtcctctatagttttcagccgcctagccaattttttgccattgacagcgccaggggcatcgtgacagtgatccgggagcttgattatgagacgactcaggcataccaactgactgtcaatgcaaccgatcaagacaaaactcggcctttatcaacccttgccaacctggcgattataatcaccgacgtgcaggatatggaccccatcttcatcaacttaccctactctaccaatatttacgagcacagtcctcctgggactaccgtcagaattatcacagccattgatcaggacaaaggcaggcctaggggtattggctacaccatcgtcagcgtggccggtaataccaattcaatcttcgctctcgactacattagcggcgtcctgaccttaaatggcctgctagatcgggaaaacccattatacagtcatggctttattctgaccgtgaaaggcacagagttaaacgatgaccggaccccatccgatgccacagtgactaccacattcaatatcttagtgatcgacataaacgataacgctccagagtttaactcctctgagtactcagtagctatcacggaactggcacaggtcggcttcgcactcccactgttcatacaggttgtagataaagacgagggcttaaattcaatgttcgaagtgtacctcgtgggcaacaactcgcaccattttattatatccccgacttctgtccagggaaaggctgacatccggatccgcgtggccatcccactagactatgagactgttgacagatatgactttgacctgtttgccaatgaatccgtccctgaccacgtcggatatgccaaggtaaaaattactttaatcaatgagaacgataatcgaccaattttttcccagccgctctacaatatatccctgtacgaaaacgtgaccgttggaaccagcgtgttgacagtgctggccacggataatgatgcgggaacattcggagaggttagctacttcttttcagacgaccccgataggttttccttggataaggataccggactgattatgctcattgcaaggctagactacgagctcatccagcgcttcacgctaaccatcatagctcgcgatggagggggtgaggagacaaccggtcgcgtccgtattaacgttctcgacgtcaatgataatgtgccgacatttcagaaagacgcctacgtgggggctctgagagaaaatgaaccatctgttacccagttggtaagacttcgcgcaaccgatgaggacagtccccctaataatcagatcacttacagcattgtgtccgcctccgctttcggcagctacttcgacattagcttgtacgaggggtacggagtgatctctgtgtccagaccgttggactacgagcagatttcaaacggtctgatttacctgactgtcatggccatggacgctgggaacccacccctgaattctaccgtgccagtgaccattgaagtcttcgacgagaatgataacccccctacattcagcaaaccagcttattttgttagtgttgtggaaaatataatggccggagccaccgtgctgtttctcaacgccactgacctcgatcgatcacgcgagtacggtcaagagtcgattatttactccctggaaggatctactcaattccggataaatgccagaagcggcgaaataaccacaacgagcttgctcgacagggaaaccaagagcgaatacattctaatcgttagggcagtggatgggggtgtggggcacaatcagaagacagggatcgcaaccgtgaatatcacgctcttggatattaacgacaatcaccccacttggaaggacgctccttattacatcaatctggtggaaatgactccacctgatagtgatgtgacgacagtcgtagccgtcgatccggatctgggagaaaatggcacgctggtgtattccatccaacctccgaataaattctattccttaaactcgactacagggaagattcggacaacccatgctatgctggatcgggagaatccagatccacacgaagccgagctgatgcgcaagattgtggtctcagtcacagattgcggcaggcccccactgaaagccactagcagcgctacagtattcgtcaacctcctggacctgaatgataacgatccgacgtttcaaaatttgccttttgtggcagaggtgttagaaggaatacccgctggcgtatccatctaccaggtggtggctatcgatttagacgagggcctcaacggactggtcagttataggatgcctgtcggcatgcccaggatggattttctaatcaactcctcctcaggcgtggtcgttactaccaccgaactggacagggaaaggattgctgaataccagcttagagtcgtcgcttctgatgcgggaacccctactaaatcttccacatcaacattgacaatccacgttcttgacgtgaatgacgagactccaaccttctttcccgctgtgtataatgtgtccgtgtccgaggacgtgcccagagaatttagggttgtgtggctcaattgtacggataatgatgtggggctgaacgctgagctatcttacttcatcactggcggaaacgtagacggcaagttctcagtgggttatcgagatgcagtggtccgcactgtagttggcctcgatagggaaactacagccgcttatatgctcatcttggaagcgattgacaacggccctgtgggcaagcgacacacgggcaccgccactgtgttcgttaccgttctcgatgtaaatgacaatagacctatctttctgcagtcaagctatgaagcatctgtgcccgaggacataccggagggacacagtattttgcagctcaaggccactgacgcagatgagggggagttcggaagggtgtggtaccgcattctacacggcaaccacggtaataacttccggattcatgtgagcaatggcctccttatgcggggaccacggccattagatagggagagaaactcatcccacgttctcatcgttgaggcatacaatcatgatttaggccctatgcgttcaagtgtccgtgtaatagtctacgtggaagatatcaacgacgaggcgccagtgtttactcagcagcaatactcaagactaggcctccgcgagacggcaggtatcggtacatcagttattgttgtacaggccaccgaccgtgactcgggcgacgggggtctggttaactataggattctttctggcgctgaagggaaatttgagatcgatgagagcacgggtctgattatcactgtgaactatctcgactacgaaactaaaacttcttacatgatgaacgtctctgctacggaccaggcgccaccattcaatcaggggttttgctctgtgtacatcactcttcttaatgaactagacgaggcagtccaattcagcaatgcgtcatacgaggctgccattctggagaacttagccctgggaactgagatcgtgcgagtccaggcctattctattgacaatcttaaccaaattacatatcgtttcaatgcctacaccagcactcaggctaaggctctattcaagatcgatgccattaccggcgttatcacggttcagggattagttgatcgcgagaagggagacttctacacattgactgtggtagccgacgatggtggtcccaaagtagattcaaccgtacaggtgtatataaccgtgctggacgaaaacgataactcacctagatttgatttcacatccgattccgccgtatccatcccagaagactgccccgtgggacaacgagtggctacagtaaaggcttgggatcctgatgccggaagcaacgggcaggtagtgttttctctcgcatccggtaatatcgctggggcttttgaaattgtgaccacaaacgattcaatcggcgaggtcttcgtggccagaccacttgatcgagaagagctcgaccattacattttacaggtggtggcgagcgaccggggtaccccgcctaggaaaaaagaccacatcctgcaagtaacaatcctggacatcaacgacaaccctccggttattgaaagcccatttggctataacgtctcggtgaatgaaaacgtgggcggaggcacagctgtggtgcaagtgagggccacggaccgggacattgggatcaactcggtgttgagctactatatcacagaggggaataaagacatggcattccggatggacagaatttcgggggaaattgcaacccgccctgctcctcctgatagagagcgacagtctttttaccacctggtggccacagtggaggatgagggcacgcccacgctttctgccaccactcacgtgtacgtgaccatcgtggatgagaacgacaatgctccaatgttccaacagcctcattatgaggtcctgttggatgagggccctgatacgctcaacacaagtcttatcacaatccaggcgctcgatcttgacgaaggcccaaacggaactgtcacgtacgcgatagttgcgggtaacattgtgaacacttttcggatcgaccgacacatgggagtcatcactgcggctaaggagctggactatgagatttcacatggcaggtacactctgatcgtgacagccaccgatcaatgcccgattttgtcacaccggctcacctccactacaaccgtgcttgttaacgtgaacgatattaatgacaatgtccctacttttcctagagattatgaaggccctttcgaagtaaccgaaggccagccgggaccacgcgtatggacatttctggcccacgacagggactctggacccaatgggcaggttgagtattccataatggatggggatcccttgggtgagttcgtgatcagtccggtcgagggcgtgcttagggtcagaaaagacgtggagttggatcgtgagacaattgccttttacaatttaaccatttgcgcccgagatcggggaatgccacccttgagttccacgatgctggtcgggattagagtccttgacataaacgataatgacccagtgctgctcaatttgcccatgaatattactatttcggagaactcccctgtgtcttctttcgtcgctcacgttctggcctccgatgctgatagcggttgcaatgccagactgactttcaacatcactgcaggcaaccgggaaagggctttttttattaacgccactactggcatcgtgacagtgaatcgaccccttgatagagagaggatccctgagtacaaattgacaatttccgttaaggataatccagaaaaccctcggattgccagaagagactacgacctgcttctgatttttctgtccgacgagaacgacaatcaccccctgttcacgaaatcgacctaccaggccgaagtcatggagaacagccctgctggcacccccctgaccgtgctcaatggtccaattctagcccttgatgcggatcaagatatctacgctgtggtgacttaccagctccttggggctcagtccggcctgtttgatattaattcatctaccggggttgtcacagtgcgaagtggcgttatcatcgaccgggaagccttctcaccaccgatattagaactgctgctgcttgcagaagacatcgggctgctgaattccacggcccatctcctcattacgatactcgatgacaatgataacagaccaacttttagtcctgctactcttactgttcatctcttagagaattgtccacccggtttctcagtgttgcaagtgacagcaacagatgaggatagcggtctcaatggtgaactagtataccggatcgaggcgggtgcacaggacaggttcctcatccacctagtgacaggcgtcatcagagtcggcaacgctacaattgacagggaggagcaggaaagctaccggctgaccgtcgttgcaaccgaccggggtacggtgcctttaagcggtactgcgattgtgactatcctgatcgacgacattaacgacagtcgtccagaatttctcaatccaattcagaccgtgagcgttcttgaaagcgcagaaccagggacggtaatcgctaatatcacggccattgaccacgatctgaatccaaaattggaataccacatagtgggtattgtggctaaagacgataccgaccggctcgtcccaaatcaggaagacgcttttgcagtcaatatcaacactggtagcgttatggtcaagagccccatgaacagagagctggttgccacctacgaggtcaccctttcagtcatcgataacgctagcgacctgcctgagcgatcagtctccgtgcccaatgctaaactgacggttaatgtgttggacgtgaacgataatacaccccagtttaaacccttcggaatcacctactatatggagcggatcctggaaggcgctacacctggcactaccctcatagccgtggctgctgtggaccctgataaaggactcaacggcctcgttacgtacacactgctcgacttggttccccctggctacgtacagctggaggacagcagcgcaggcaaggtgattgctaaccgaactgtggactacgaagaggtccactggctcaattttacggttagggccagcgacaatggctccccaccacgagcggcagaaatacccgtctacctagagatcgtcgatattaatgacaataatcccatcttcgaccagccctcttaccaggaggcagtgtttgaagatgtgccggtcgggactattattctcacagtcaccgctacggacgctgactcgggaaatttcgcgctgattgagtattccctcggcgacggagagtctaagttcgccatcaatcccaccaccggtgacatctatgtactgtcttctttagatagagagaagaaggaccattatatccttacggccctcgctaaagacaatccaggcgacgtcgcatctaacagaagagagaatagcgtgcaggtcgtgatacaagtgctcgatgtgaatgactgtcgaccccagttttccaagccacagtttagcacctccgtatatgaaaatgaacccgctggcacttcagtgatcactatgatggcgacggaccaggacgaggggcctaatggagagctcacctattctctggagggtccaggtgtggaagcctttcatgtcgacatggacagcgggttggttaccacccagcggccactccagtcctatgaaaaattttcacttaccgtagtggctacagatggcggagaacctccactgtggggaacaacaatgctgctggttgaggtgatagacgttaatgacaacagaccggttttcgttaggcccccaaatggaactatcctgcacatacgggaggaaattccacttaggtccaacgtgtatgaagtttatgctacagataaagatgaggggctgaacggcgcagttcggtattcctttctcaagactgccggaaaccgcgactgggagttttttattatagaccccatctccggtctcatccaaaccgcccagcgcttggatagggagtcccaggccgtatacagcttgatcttggtggcaagcgacctgggacagcccgtcccatacgagacaatgcaacccctgcaggttgcactggaagatatcgacgataacgagccactgttcgtacgaccaccaaaaggttctccacagtaccagcttctgacagtccccgaacatagccctagaggcacacttgtcggcaacgtgaccggtgcagttgatgcggacgagggaccaaacgccatcgtgtattacttcattgctgctggcaacgaagagaagaatttccacttgcaacccgacgggtgcctgctggtattgcgggatctggaccgcgaaagagaagcgatattctccttcatcgtgaaggcatcgtccaatcggagttggacacctcctcgcggaccaagtcctaccctggaccttgtggctgaccttacactgcaagaagtcagagttgtcctggaggacattaatgatcagccgccaagatttacaaaggccgaatatactgccggagtcgccaccgatgcaaaagttggctcagagttaattcaggtgctggctctggatgccgacatagggaacaattcgctagtattttattcaatcttagccatacactacttccgggctctagcaaacgatagcgaggatgtgggacaggtattcacgatgggttccatggacggcatcctacgaaccttcgatctcttcatggcttatagccctggctattttgttgttgatattgtggctcgcgacttggccggacacaatgacacagcaattattgggatttatatcctgcgtgatgaccagcgggttaaaatagtcatcaatgagatcccagatcgagtccgtggattcgaggaggagtttatccacctcttgtccaacattactggcgcaatcgtgaatactgataacgttcagtttcatgtggacaaaaagggtcgtgttaactttgctcagaccgagcttctcatccatgtggtgaatagagatacaaataggattctggacgtcgatagagttatccagatgattgacgagaacaaagaacaattaaggaacttgtttaggaactacaacgtgctcgatgtacaacccgcaatttctgtgaggttgccggatgatatgtccgccttgcagatggctattattgtcctcgccatcctcctctttctagctgccatgctattcgttctgatgaactggtattaccggaccgtccacaagagaaaattgaaggcaattgtagccggatccgctggtaaccggggtttcatcgacatcatggacatgccaaacaccaacaagtatagctttgatggagcaaaccctgtatggctcgacccgttctgtcgcaaccttgagttggcggctcaagccgagcatgaagatgacctccccgaaaacctttctgagatcgccgacctgtggaattccccaaccaggacccacggcacattcggtagggaacccgctgccgtaaagcccgacgatgaccgctaccttcgagcagccatccaggagtatgacaatatagccaaactgggccagattataagagaaggccctatcaagggtagtcttctgaaggtggtcctggaagactatcttcgcctgaagaaactgtttgcgcagcggatggttcagaaagcatcgtcatgtcattcctcgattagtgaattaattcagaccgagctcgacgaggaaccgggagaccatagtccaggacaggggagcctcaggtttcggcacaagcctcctgtggagttaaagggcccagatgggatacatgtggtccatgggtctactggtacactcctggccacagacctcaatagtttgcctgaagaggatcagaaggggctggggagaagccttgagaccttgactgcagcagaggccacagcgtttgagaggaatgcccgaaccgagagcgccaagagtacccccctgcataaactgcgcgatgtcattatggagacccccctggagataaccgagcttta

SEQ ID NO: 216488 - DNA, 1338 bp, synthetic construct
  misc_feature 1..1338: note = Description of Artificial Sequence: Synthetic coding sequence
  source 1..1338: mol_type = other DNA
atggacaacgaccctctggttttcggtgtcagcggtgaagaagcaagtagattttttgcagtggaaccagacaccggggtcgtctggttgaggcagccactagatagagagacaaaatccgaattcacggtggagttcagcgtctcagaccaccagggggtgatcaccagaaaggtgaacatccaggtcggggacgtcaacgacaatgcgcctacatttcacaatcagccctatagtgtgcgcatccctgagaacacgcccgtgggaactcccatctttattgtgaatgcaaccgaccccgacctcggcgcagggggttcagtactgtactcatttcaaccacccagtcagttcttcgctatagatagcgccaggggaatagtgaccgttatcagggagcttgactatgaaacaacacaagcttaccagctgaccgtgaatgccctggccattatcatcaccaatctgccgtattcaacaaatatttatgagcacagccctccaggtaccactgtaaggatcattactgcaatagatcaagacaaaggccgaccaaggggcatcggatatactatcgtctcgggtaacactaactccatctttgctctcgactatatctcaggggtgctcaccttgaacgggctactcgaccgcgagaatcccctgtatagtcacggctttatcttgaccgttaaaggtacagagctcaacgacgaccgaactccgtctgatgctaccgttacaaccacatttaacatcctcgttattgacatcaatgacaacgctccagagttcaatagtagtgagtactctgttgctattaccgaactcgctcaagttgggtttgctctccccctgttcattcaggtcgtggacaaggatgaaggtctgaattccatgtttgaggtctatttggtgggcaataactcgcaccacttcattatctctcccaccagtgtgcagggaaaagcagatatccgtattagagtcgcaattccgttagattatgagacagtcgatagatatgacttcgatctttttgccaacgagtctgtgcccgatcatgtggggtatgccaaagtgaagataactctgatcaacgagaacgacaaccgccctatctttagccagcccctgtacaacatctcgctctacgaaaatgtcacagtgggtacaagcgtccttactgtgttggtttccccacgattcaccgcaggacctctgtcgtccccaggcccaactgtcgtgcgccatccagagggattttgtcctagggacttgagcaatcagggtaggcgccatccccagataccagaattgtgcctcctcgtgtattag

SEQ ID NO: 216489 - DNA, 2187 bp, synthetic construct
  misc_feature 1..2187: note = Description of Artificial Sequence: Synthetic coding sequence
  source 1..2187: mol_type = other DNA
gcaaccgataacgacgcaggaacgtttggcgaagtttcatacttcttcagtgatgacccagatcggttttcactagacaaagataccggcctgatcatgctgatcgcacgcttagactatgagctgatacagcgtttcaccctgactattattgctcgtgacggcggtggggaggaaacaactggacgggtacggatcaatgttctggatgtgaatgacaatgtcccaacttttcagaaggacgcatatgttggcgcattgagagagaatgaacccagtgttacgcaactggttaggttacgcgctactgatgaagattccccaccaaataaccagatcacatactctattgtctcagcctctgcttttggcagttatttcgatatatccctctatgaaggatacggtgttatttccgtctcccgacctctcgactacgagcagattagcaacgggctaatctacttgacagttatggccatggatgcgggaaacccacccctaaattccacagtgcctgtcacgatcgaggtcttcgatgagaatgacaatccaccaaccttcagcaagccagcctatttcgtaagcgtggtagagaatatcatggccggagccactgtcttgttcttgaatgcgaccgatcttgataggagccgagagtacgggcaggagtccattatttacagcctggaaggttcgactcagtttcggatcaacgccaggagcggcgagattactaccaccagcctgctggatagagagactaaatcagagtacattttgatcgttagggcagtggatggaggggtgggacataatcagaagacgggaatcgcaaccgtgaatatcaccttgctggacatcaacgataaccaccccacgtggaaggacgcgccttactacatcaacctggttgaaatgactccccctgactctgacgttactacagttgtcgcggtggatcctgacctaggagagaatggaacactagtttattctatccagccgcctaacaaattctatagcctgaacagcaccaccgggaagattagaacaacacatgcgatgctggatagagaaaacccggacccccatgaagcagaactgatgcgcaaaatcgttgtgagcgtcacggattgtggcagaccgcctctgaaggccacctcaagtgcgactgttttcgtgaatcttctcgaccttaatgacaacgatccaacctttcaaaatcttccatttgtagccgaggtattagaaggcattcctgccggagtgtccatataccaggtcgtcgcaattgatctggatgaaggcctcaatgggctggtgagctacagaatgcccgtggggatgcccagaatggattttcttattaattcttcttccggtgttgtcgttacaacaacggagttagatagagagcgcatcgccgaatatcagcttagagtcgtcgcaagtgacgcaggtactcctactaagtcctccacatcaacattgacaatccacgtgcttgacgtaaatgacgagaccccaacctttttccctgccgtctataacgtgagcgtgtcagaggatgtaccacgcgagtttcgtgttgtgtggctcaactgcacagacaacgatgtcgggctgaacgccgaactgtcttacttcataaccggtggcaacgttgacggtaagtttagcgtcggctacagagacgccgttgtcagaacagtggtcgggctggatcgcgagacaacagccgcttacatgctgatacttgaggctatcgacaacgggccagttgggaagagacacacaggcactgccactgtgttcgtgacagtgctggacgttaacgataatagacctatttttctacagtctagttacgaagccagtgtgcctgaagacatccccgaggggcactcaatcctgcaagaggatctcgcgtctccgtgtatcagccctgcccctccaaggcgggcattccagtcctcaggagaaaaagagacatcacagtttccagggaaggagttacgcagggaaccgggtccctcgaaggctcagaacagggccgcatttacagaacccctggccgaggcgcctctcttaggcagcaagcaagcccaggaagaaagggctcctctgcccagagagcaagcccaacagctgcaaggtagcgagggggaaaaaggcggaccctag

SEQ ID NO: 216490 - DNA, 2238 bp, synthetic construct
  misc_feature 1..2238: note = Description of Artificial Sequence: Synthetic coding sequence
  source 1..2238: mol_type = other DNA
atgcgtaggtgtagatgggccgcattggcactcggtctgttacgcctatgccttgcccaggctaattttgctcctcatttttttgacaacggagttggctctactaacggcaatatggctttattttccctgcctgaggacaccccagtgggttcacacgtctacactctgaatgggacagatccagaaggcgatcccatctcctaccacattagcttcgacccctcaacacggagcgttttctctgtcgatccgacatttggaaacatcacactggtcgaagagttggatcgagaacgggaggatgaaattgaggctatcatcagcatatccgatggcttgaacctcgttgcagagaaagttgtgattcttgtgacagatgcgaatgacgaggcaccccgtttcattcaggaaccctatgtcgctctggtgcccgaagatatacccgcaggctctatcatttttaaggtccatgccgtggaccgcgataccggatctgggggaagcgtgacttactttctacagaatctgcactccccgtttgccgtggacaggcactcgggagtcctgcggttgcaggccggagccacactcgactatgaaagatcgaggactcattacattaccgtggtggcaaaggacgggggaggcagattgcacggggctgatgtcgtgttttcggccaccaccaccgtgacggtgaatgtggaggacgtgcaggatatggcccctgtcttcgtgggcactccatactacggctatgtgtacgaagacacactgcccggaagcgaagtgttgaaggttgtagctatggatggcgatagaggaaaacccaaccggatcctatattctttagtgaatgggaatgatggcgcattcgaaattaatgagactagtggcgctatttccattactcagtcaccggctcaactgcaacgggaagtttatgagctgcatgtgcaagtaaccgaaatgtcccccgctggaagccctgcggctcaggcaacagtgcctgtcaccataagaatcgtggacctgaataaccacccgcctactttttatggcgagagtggtcctcagaataggtttgaacttagtatgaacgaacatccccctcagggggagatcctcaggggcctgaaaatcactgttaatgatagcgaccaaggggcaaacgcaaaatttaacctgcagctggtcggccctcgtggaatcttccgggtcgtgcctcaaaccgtgctgaatgaggcgcaagtcacgatcatcgtagagaattcagccgctatagactttgagaaaagcaaagtactgacttttaaactgctggctgtggaggtcaacacacctgagaagttctcatcgaccgctgatgtcgtcattcagttattggataccaacgacaacgtgccaaagtttgactctctgtactacgtggctaggattccagagaacgctccgggagggtcctcggtagtggccgtcaccgctgtggatcctgacaccggcccttggggagaggttaagtattctacctacggcactggggcagatttgttcctaattcaccctagcaccggtctgatctacacgcagccttgggctagtctagacgcagaggccacagccagatataatttttatgtgaaagcagaggacatggaaggcaagtattccgtggcggaggtgtttatcacactgctggacgtcaacgaccaccctccccagtttggcaaatcagtgcaaaaaaagactatggtcctcggtacgccagtcaagatcgaggcaatcgacgaggacgctgaggagcctaacaacctggtggattattctatcactcatgccgagcccgctaacgtgttcgatatcaatagtcataccggagaaatatggcttaagaactctatcaggtcccttgacgctctgcataatatcacaccgggaagagattgtctgtggagcttagaggtgcaggcaaaggatcggggtagtccatctttcagcacgacagccttactgaaaattgatattaccgacgcagaggtcaggcgcctccggtacatgaagaacagcaacttccccggaaccaccaaaagtgtgcggaaacctaagttcaaacccaaaaagccgcactctagccaagggctgttcctccatccacactgcgagatcgccttgttcaacctgtcaaacgtgaacctgtactccagagtcttccagggcgcagctcaggctagctag

SEQ ID NO: 216491 - DNA, 2580 bp, synthetic construct
  misc_feature 1..2580: note = Description of Artificial Sequence: Synthetic coding sequence
  source 1..2580: mol_type = other DNA
atgagaagatgtcgatgggcggcattggcccttggcctgctcagactgtgcttggcacaagccaacttcgcgccacattttttcgacaacggtgtagggagtaccaatggtaacatggcgttattctctcttccagaggatacaccagttggttcccatgtgtatacactgaatgggactgatcccgagggagatccaatttcatatcacattagcttcgatccctctacacgctccgttttcagcgttgaccccacatttggcaatatcactctggtagaagagctcgatagggagcgggaagacgagattgaagccattataagtatatcagatggcctcaacttggttgcagaaaaagtagtaattctggttaccgatgccaatgatgaagcacccaggttcattcaagagccatacgtggcgctggttcccgaagatatcccagccggttcgatcatcttcaaagtgcatgcagtcgatcgcgataccgggtcagggggtagcgtcacctacttcctgcagaatctgcactcaccttttgcagtcgaccgccacagcggagtgctgcgcctgcaggccggtgctacgctggattacgagcggtctagaacgcactacatcacagtggtcgccaaagacggtgggggacgtctacacggagcagatgtagttttttctgctacaaccaccgtgactgtcaacgtggaggacgtgcaggatatggcgcctgtctttgtgggtaccccatattatggctatgtatacgaagataccctccctggctccgaagtactgaaagtcgtggcgatggacggtgatcgaggcaagccaaatcgaatcctctattcgttggtgaatggcaatgacggcgcttttgagattaacgaaacatcaggagctatctccataacacagtcgcctgcccagttacagcgcgaggtctatgagcttcacgtacaggtaacagaaatgtccccggctggaagcccagctgctcaagctacggtccccgttacgatacgaatcgtggacctaaacaaccacccaccgactttttatggtgagtccggtcctcagaataggttcgagctgagtatgaatgagcatcctccccagggggagatcttgcgtggattgaagatcaccgtcaatgatagcgatcagggggcaaacgcgaagtttaatctgcagctggttggccctaggggtatttttagggttgtgcctcagaccgtgctcaacgaagcccaggtcaccattatagtcgagaattcagcagcaattgacttcgagaaatctaaggtgttgacatttaaacttctcgctgtggaggttaacacgccagaaaaattttcatcaaccgctgatgtagtcatccagcttctcgatacaaatgataacgtccctaagtttgactcgctgtactacgtcgcacgcattccggagaatgctccgggtgggagcagcgtggtagcagttactgccgttgaccctgacacaggaccctggggcgaggtaaagtactcaacctacgggaccggcgctgacttgttcctgattcatcccagtactggtctcatctacacccagccgtgggcttcactggacgcagaggccacagccaggtataacttttacgtgaaggcagaggacatggaagggaagtactctgtcgccgaggtgttcatcactcttctggacgttaacgatcacccaccccagtttgggaaaagcgtccagaagaaaactatggtgctcgggaccccagttaaaattgaggcgatcgatgaggacgccgaggaacccaataacctggtggactactccataacgcatgctgagcccgcaaatgtgtttgatatcaatagccataccggcgaaatatggcttaagaattccatcagaagcctggatgcccttcataatattactcccggtagggactgtctatggagtctcgaagttcaggccaaggataggggctctcctagcttcagtaccacagcacttctgaaaatagacattaccgacgccgaaactctaagtagatccccaatggcggcatttctgatccagaccaaagacaatcccatgaaagccgtcggtgttctggcaggcactatggccactgttgtagctattactgttctgatctcgactgctaccttctggagaaacaaaaaatccaataaggttctgccaatgcgacgggtcctaagaaagcgcccttcccctgccccacgcactatccggattgaatggctcaaatccaagtccactaaggcagccaccaagttcatgctaaaggaaaagcctcccaacgagaattgcaataacaactctcctgagtctagcctcctaccccgagccccagctctgcctcctcccccttccgtcgccccttcgaccggggctgcccagtggaccgttcctacagtgagcggatcattgaccccgcaacctacacagccccctcccaaacctaagactatgggctctccggtgcaatccactttgatctccgaactcaagcagaaatttgaaaagaagtctgtgcataacaaagcctacttttag

SEQ ID NO: 216492 - DNA, 1692 bp, synthetic construct
  misc_feature 1..1692: note = Description of Artificial Sequence: Synthetic coding sequence
  source 1..1692: mol_type = other DNA
atggcccctgtcttcgtgggcaccccttactatggatacgtgtacgaggacaccctgcctggctccgaggtgctgaaggtggtagcaatggatggtgaccggggtaaaccaaaccgcattttgtatagtctagttaatggaaacgacggggcttttgagattaatgaaacctctggagcaatctccattacccagagcccagcacagctgcagagggaagtttatgagctgcacgttcaagtcacagaaatgtccccggcagggagtccagctgcacaggcaaccgtgccagtgaccatcaggattgtcgatttgaataaccacccacccaccttttacggagaatccggccctcaaaatcggtttgagttgtcaatgaacgaacatcctccccaaggcgagattctcagaggacttaagattacggtcaacgattctgaccagggggctaacgccaaattcaatttgcaattggtcgggcctcgcggtatctttagagttgttcctcagactgtgctcaacgaagcccaggtgacaattatcgttgagaactccgcagcgattgatttcgagaagtcaaaggtgcttacctttaaagctgttgatcccgataccggcccttggggcgaggtgaaatactctacctatggtaccggtgccgatctttttctgatccacccgtccaccggccttatttacacccagccctgggccagcttggatgcggaagcaacggcaaggtataatttttacgtcaaggccgaggatatggaaggaaagtacagtgtggctgaagtgttcattaccctcctggacgtgaacgaccacccaccccagtttggaaaatctgtgcagaagaaaacaatggtgctgggaacgcccgtgaaaattgaagctatcgacgaggatgcggaagagccaaacaatttggtcgattacagcattacacacgcagagcctgctaacgtgttcgatatcaatagtcacaccggagagatctggctgaagaactcaataaggtcgctggacgccctccataatattacacccggacgagactgcctctggagcctggaggtccaggcgaaggaccgcggatcgcctagtttcagcactactgcgctgttaaaaattgatatcactgacgccgaaacactttcccgttccccaatggcagctttcctgatccaaacgaaagacaaccccatgaaagcagtcggggtgctggcaggaaccatggctaccgtcgtggcgattactgtccttatttctacagccaccttctggcggaataagaagagcaataaagtgctaccaatgcggagggtgctacgtaaacgaccctcccctgcccctcggactattcgcatagagtggttgaagagtaagtcaacaaaagcagctactaagttcatgttgaaagagaagcccccaaatgaaaattgcaacaataattctcctgagtcatcccttctacctcgagcccctgccctgcctccccctccctcagttgcaccaagcactggtgctgcacaatggactgtcccgacagtctccggaagtcttaccccacaaccaactcagcctcccccaaagcctaaaactatggggtctccagtccagtctactctgattagtgagctgaaacagaagtttgagaagaagagcgttcataataaggcctatttctag

SEQ ID NO: 216493 - DNA, 1464 bp, synthetic construct
  misc_feature 1..1464: note = Description of Artificial Sequence: Synthetic coding sequence
  source 1..1464: mol_type = other DNA
atgggatcttgggcactcctctggcctccgctcctctttactggcctgcttgtgagaccaccaggaacaatggcccaagcacagtattgctccgtcaataaggacatcttcgaggtagaggaaaacactaacgttactgagccactggtcgacatccatgttcccgaaggccaggaggtgaccctgggcgctttgagtactccctttgccttccgtattcagggtaaccagttgttcctgaatgtcacgccagactacgaggaaaaaagccttctagaagctcagctgctatgccagagcggcggaacgttggtaacccagctacgcgttttcgtgagtgttctagatgtgaatgataatgcccctgaatttccatttaagaccaaggagattagagtggaggaagatactaaggtgaactctacagttattcccgaaactcagctgcaggccgaggatcgcgacaaagatgatatactgttctacacgttgcaggaaatgactgccggagcctcagattatttctcactggtctcggtcaatagacctgcactgcgcctggatcgacccctcgatttttacgagcgaccaaatatgactttctggctcctcgtgagagataccccgggtgagaacgtcgagccatctcacaccgcaaccgccaccctcgtactgaatgtcgtcccagcagacttgaggcctccttggttcctcccatgcaccttttccgatggctatgtgtgtatccaggctcagtatcacggcgcagtgcccacaggtcacattttgccatcaccattggtcctgcgacccggacccatctacgcagaggacggagatagaggcatcaaccagccaatcatttattccattttccggggtaacgttaatggcacatttattattcatcctgatagcggaaaccttacagtcgctagaagtgtcccaagccctatgacctttctgctgctggtgaaaggccaacaagcggatctcgccaggtatagcgtgacgcaagtcacagttgaagctgtggcagccgcaggctcacctccaagattccctcagcgactttacagaggtaccgttgccaggggtgcgggagctggagttgtggtcaaggatgctgcggcaccatcacaaccccttaggattcaagcccaggatcccgaattttcagatctgaactctgctatcacgtatcgcatcacaaatcattcccattttcgcatggagggcgaggttgtgctcaccactactactctggcgcaggccggtgcattctacgccgaaccccctacttgtaccggagacctgcgtcatcccgctcacctgagaccccctgcaccggatcctactcaaaggcttcccggagaggcagaagaacctatgcagaccccaaaggcaactcacctgggagccggtggtttaaagcatttgcccggagtattagtccccttctag

SEQ ID NO: 216494 - DNA, 1956 bp, synthetic construct
  misc_feature 1..1956: note = Description of Artificial Sequence: Synthetic coding sequence
  source 1..1956: mol_type = other DNA
atgggatcttgggctctcctgtggccacccctgttgttcacaggcctccttgtccgaccaccaggcactatggctcaggcccaatactgtagcgtgaacaaggacatcttcgaggtggaagaaaacacgaatgttaccgaaccactcgtcgatattcacgtgcctgaggggcaagaagtgacactgggcgcattgtcgaccccttttgccttcagaatccagggtaaccagctcttcttgaacgtaacccctgactacgaggagaagtcattactggaggcacaactgctctgtcagagcggagggactctggtgactcagctgagggtcttcgtgagcgtgctcgatgtaaacgacaacgctcccgagtttccgtttaagacaaaggagattagggttgaggaggacaccaaggtgaattccaccgtcatccccgaaacgcagctccaagctgaagaccgcgataaagatgatattttgttctatactttgcaggaaatgaccgctggagcctccgattacttttcgctcgtgtcagtcaatagacctgctcttcgcctcgatcgcccactggatttctatgagaggcccaacatgacattttggctgctcgtgagagacacccccggtgagaatgtagagccaagccacactgccaccgcaacactggtgcttaatgtcgtgcccgctgacttgcgtccaccctggtttctgccttgcacattcagcgatggctacgtgtgcatccaggcacagtatcatggcgctgtccctaccggtcacatcttgccatccccactggtcctccgacctgggccaatatacgcagaagatggggatcgtgggatcaaccagccgattatctacagtatctttcgcggaaacgtaaatggcacgttcattatacatccggacagtgggaaccttaccgtcgctaggtctgtgccaagtcccatgacttttctgcttcttgtgaagggacagcaggccgacctcgcccgatacagcgtgacccaggtaacagtggaagccgtggcagctgccggatcccctccacgcttcccccagaggctttaccgaggcacagttgcgcgtggcgctggggcaggggttgtcgtgaaagacgcagccgctccatctcaaccactgaggatacaagcccaggaccctgaattcagcgacttgaattctgccattacctatcggataactaatcactctcacttcagaatggaaggagaagtcgtcctgaccactacaaccctggcccaggccggagctttttacgctgaggtggaagcacacaatacagtcacctccggcacggccactacagttatcgagattcaggtgtctgagcaggaacccccttcgaccggcggaggccctagtgaggacaagcgatttagcgtcgtggacatggcagcactgggcggtgtgctgggagccctgctccttctggcactgctgggactggccgtactggttcataaacactacggccctcgcttaaagtgctgctgcggcaaggccccagagcctcagcctcaaggattcgataatcaggcatttctgccagatcataaggccaactgggcccctgtgcccagccctacccacgatcctaaaccagccgaggcacccatgcccgcagagccggctccccctggaccagcttcaccgggtggagctcccgagcctcccgcagcagccagagcaggtggatcccccactgcggtgcgatcgatccttacgaaagaaagacgacctgagggcggttataaggcggtctggttcggggaggacataggaacggaagccgacgtggttgtgttgaacgccccaacacttgatgtcgacggtgcaagtgattcaggctctggcgacgagggcgagggggcaggccgaggaggcggtccgtacgatgctccaggcggtgacgattcatatatatag

SEQ ID NO: 216495 - DNA, 2538 bp, synthetic construct
  misc_feature 1..2538: note = Description of Artificial Sequence: Synthetic coding sequence
  source 1..2538: mol_type = other DNA
atggggagttgggctctcctctggccacccctgctctttaccgggctcctggtgcgtccgccagggaccatggcccaggcccagtattgcagcgtaaacaaggacatttttgaggtcgaggagaacactaatgtaactgaacctctggtagatatccatgtgcccgaaggccaggaagtgacattgggtgccctgtcaaccccattcgcctttcgtatccaaggaaatcagctgttcctgaacgtcacccccgattatgaggaaaagagcctccttgaagcccaattgctctgtcagtctggtgggacgctcgttacacagctgagagtgtttgtctccgtactcgatgtgaatgataacgctccggaattcccatttaaaaccaaggagatcagggtcgaggaggatacaaaagtcaatagtacagtgattcctgaaactcaactccaggccgaggacagggataaggatgacattctgttctacaccttgcaggagatgacagctggcgcaagcgattacttctctctggtatccgtgaatcggcctgcactgaggcttgatcgtccactggacttctacgaaaggcctaacatgactttctggctgctagtgcgggacacgccaggcgagaacgtggaaccatctcataccgctactgcaaccctagtgcttaacgtcgtccccgcagacctacgcccaccatggttcctgccctgtacatttagcgatggctacgtttgtatccaggcgcagtatcacggcgctgtccctactggccatattctcccttccccattggtcctgcgaccgggacccatctatgctgaagacggagatcgcggaattaaccagccgatcatctactcaatctttcgtgggaacgtaaacggtacgttcatcattcatcccgacagcgggaatctcacagtggcgaggtccgtgccgtcaccaatgacatttctgcttctcgtgaagggacaacaagctgatttagcaaggtacagcgtcacacaggtgactgttgaagccgttgcagccgctggatctccccctcgttttccccagcgtctctaccggggtacggtagccaggggtgctggagcgggtgtcgtagttaaagacgccgctgctccctcccaaccacttagaatccaagcccaggaccctgagttctccgacctgaactcagcaattacgtatagaatcacaaaccactctcatttcaggatggagggcgaagtggtcctgacaacaacaactctggcccaggcgggagcattttacgcagaggttgaggcccataacaccgttacttcagggacggccacaacagtcattgagatccaagtgtccgagcaggagcctccttctaccgatgttcctccttcacctgaagccggaggtaccacgggtccatggacaagcaccaccagtgaagtccccaggcccccagaaccctcccaggggcctagcaccacctcctccggcggaggcaccggccctcatccccctagcggcaccacactgcgacctccaacatcctccacgccgggaggcccacccggagccgagaacagcacctctcaccaacccgctaccccaggtggggataccgcccagacaccaaagcccggaacgagccaacccatgccccctggcgtcgggacaagcacaagccaccagccagcaactcccagtggaggcactgcgcagacacctgagcctggaacatctcagccgatgcccccatctatgggcacctcaacttctcaccaaccagcaacccccggtgggggaacagctcaaacccccgaggctgggacgtcgcagcctatgccccctggaatgggcactagcacatctcaccaaccaactacacctggcggaggaaccgctcagacacctgagccgggaacatcccagcctatgccactgagcaagtcaactccatcgtcaggcggtggcccttctgaagataagagattctccgtggtggacatggccgctcttggtggagtgctcggagctctgttgctgctggctctgctaggtctggccgtcttggtgcacaaacattacggacctcgactaaaatgttgctgcggtaaggcgccagagccgcagccacagggcttcgacaatcaggcctttctgcccgaccacaaggcaaattgggctccagtgccatccccgactcacgatcctaaaccagcggaggcgcctatgcccgctgaaccagcccctccaggaccagccagtccagggggagcgccagagccacccgcagcagctcgcgctggaggttcccctacggccgtgagaagtattctgacaaaggaacgcaggcccgagggtgggtacaaggccgtgtggttcggcgaggatatcggcacagaggcggacgtggtggtgttgaatgctcccaccctggacgttgatggcgcttcagattccggtagcggtgacgaaggagaaggcgcaggcaggggcggtggaccctatgacgcaccgggaggggacgacagctatatttag

SEQ ID NO: 216496 - DNA, 2538 bp, synthetic construct
  misc_feature 1..2538: note = Description of Artificial Sequence: Synthetic coding sequence
  source 1..2538: mol_type = other DNA
atggggtcctgggctttgttgtggccacccctgctgttcaccggcctgctggtgcgccctccagggaccatggcgcaggctcagtactgctctgttaataaagacatttttgaagtcgaggagaacaccaatgtgactgaaccattggtggacatacacgtgcccgagggccaggaagttaccctgggagcattatctaccccgttcgcattcagaattcagggcaaccagctgtttctgaacgtcactccggattacgaggagaaaagccttctcgaagcccagcttctgtgtcagtccgggggaactctcgtgacccaactaagggtgtttgtctccgtcctggacgtgaacgataacgcccctgagtttccattcaagacaaaggaaatcagagtcgaggaagacacaaaggtcaacagcactgtgataccagaaacccagttgcaagctgaggatcgcgacaaagatgacatcctcttctacacacttcaggaaatgaccgctggcgcttcggattacttctcattagttagtgttaacagacccgcattgcgcctggacagaccgctggacttttacgaacggccaaacatgactttttggctcctagttagggacaccccaggtgagaacgtggagccttcacacacggcgacagctacactggtattgaacgtggtaccagccgatctcaggcctccttggttcctgccctgtacattcagcgacggctatgtctgtatccaagcgcagtaccatggggctgtccctacggggcatatactcccctcgccactggtcctccggccaggcccaatttacgcagaggacggggatagaggcataaatcaacccataatttattcaattttcaggggaaatgtcaacggcacattcattatacatcccgactcgggtaacttaaccgttgccaggtcagtcccctcccccatgacttttttgttattggtcaagggacaacaggccgacctcgcacgatactccgtgactcaggtgacggtcgaggctgtggccgctgccggttctcctccgagatttcctcagcggctataccggggtactgtggcgcgaggcgctggggcaggcgtcgtagtaaaagacgcggcagcacctagccagccactcaggatacaagcccaggatccagaattcagcgatctgaatagtgccattacatatcgcatcaccaaccactctcattttaggatggagggcgaggttgtgcttacgacaacaaccttggcacaggccggagcattttatgccgaggttgaggctcacaataccgtgacaagcgggacggccacaaccgtcattgagattcaagtgagtgagcaggagccgcctagcaccgatgtccctccttccccggaggccggaggaacaaccggtccctggactagtaccacatctgaagtgccaagaccccctgaaccgtcccagggtccaagcacaaccagcagcggcggagggacaggacctcatcctcccagtggcacaaccctgagacccccaacttcctccactccagggggacctccaggggctgagaactcgacatcacatcagcccgcaacccccggtggggataccgctcagacccctaagcctggcactagtcagcccatgccaccaggggtgggaacatcaacatcccaccagcccgctacgccaagcgggggaaccgcccaaaccccagagcccggaacctctcaaccaatgcctccctctatgggaacatcaacctctcatcagcctgcgacacccggaggaggcactgcccagacccccgaggcaggaacaagccagcctatgccacccggaatgggaacaagcaccagccaccaaccaacgactcccggaggcggaaccgctcagacccctgagccaggtacatcacagcccatgcccctctcaaaaagcacccctagctctggcggtggaccctccgaagacaagcggtttagcgttgtcgatatggcagccctcggcggagtgctcggcgctctcctgctactggccctgctcggactggccgtcttggtacacaagcattatgggccacgcctgaaatgttgttgtggcaaggcccctgagccacaacctcagggcttcgataatcaggcctttctgcctgaccacaaggccaattgggccccagtccccagtcccactcacgaccctaagccagctgaagctcccatgccagcagaacctgctccacctgggccagcctctcctgggggtgcccctgagccacctgccgcagctcgagcgggagggagccccaccgctgtgcgcagtatcctgactaaggagcggagacccgaaggtgggtataaggctgtatggtttggagaggacatcgggaccgaagccgacgttgtcgtactgaacgctccaacacttgacgtggatggagcctcggattccggaagtggcgatgaaggcgagggggctgggcgtggaggcggaccatatgatgcccctgggggtgatgacagctatatctag

SEQ ID NO: 216497 - DNA, 786 bp, synthetic construct
  misc_feature 1..786: note = Description of Artificial Sequence: Synthetic coding sequence
  source 1..786: mol_type = other DNA
atggcagaatcccatttgcaatcctctctcattaccgccagccaattctttgaaatctggctgcactttgatgctgacggctcgggatatctcgagggtaaagagctgcagaatcttatccaggagctgcagcaggctaggaagaaggctgggttggaattgagcccagaaatgaagacattcgtcgatcagtacggacagcgggacgacggcaagattggcatcgttgagcttgcgcatgtgctgcccacagaggagaacttcttgcttttgttccggtgccagcagcttaaatcatgcgaggagttcatgaagacttggcggaagtatgatacagaccactcaggctttatagaaacggaggaactgaagaacttcttaaaggacctccttgagaaggccaacaaaactgttgatgatacaaagcttgcagaatataccgatctcatgctaaaattattcgattcaaacaatgatggcaagctggaattgacagagatggctcgcctcttgccagtgcaggaaaatttcctcttgaaatttcaggggatcaaaatgtgtggcaaggagtttaacaaggcatttgaactgtatgatcaggacggtaatggctatattgacgagaatgagttagatgcgttactgaaagacctgtgcgagaaaaacaagcaggacctggatattaacaacattactacatacaaaaagaacatcatggcactctcagacggaggaaagttgtacagaaccgatctcgccctgatcttatgtgccggtgacaactag

SEQ ID NO: 216498 - DNA, 615 bp, synthetic construct
  misc_feature 1..615: note = Description of Artificial Sequence: Synthetic coding sequence
  source 1..615: mol_type = other DNA
atgaagacgttcgtggatcaatatgggcagcgtgacgatggcaagatcggcatcgtcgaactggctcatgtcctcccaaccgaggaaaattttctcctgctgtttcggtgtcaacagttaaagtcatgtgaagagtttatgaagacctggaggaagtacgacaccgaccactcaggattcatcgaaacggaagagctaaagaacttcctcaaagacctgctggagaaggctaacaaaaccgtggatgacaccaagcttgccgagtacactgatctcatgctaaagctgttcgattcgaataatgatgggaagctggagctcacagaaatggcacgactgctgccagtgcaagaaaactttctgctgaaatttcaggggatcaaaatgtgcggaaaagagttcaacaaggcctttgagctgtatgaccaggatggaaacgggtatatcgacgagaatgagttagacgctttactaaaagacctatgcgagaaaaataagcaggacttagatatcaataacattactacttataaaaagaatattatggcactgagcgacggtggcaaactgtatcgtacggatttagcccttattctgtgcgccggtgacaactag

SEQ ID NO: 216499 - DNA, 816 bp, synthetic construct
  misc_feature 1..816: note = Description of Artificial Sequence: Synthetic coding sequence
  source 1..816: mol_type = other DNA
atggcgggaccccagcagcagcctccatatctgcacctggccgagctgacagcatcgcagttcctagagatctggaagcacttcgacgccgatgggaatggctacatcgagggcaaggagctcgagaactttttccaggagctggagaaagccagaaagggttccggcatgatgtccaagagcgataattttggggaaaagatgaaagaatttatgcaaaagtatgacaagaacagtgacggcaaaattgagatggcagagttagcccaaattctgccaaccgaggagaatttccttttgtgctttcggcagcacgtgggctcttctgcagaatttatggaggcctggcgaaaatatgacaccgatcgatccggttatatcgaagcgaatgagctcaagggctttttgagtgacttgctcaagaaggctaaccgaccgtacgatgagcccaagttgcaggagtatacccagaccattttgcgcatgtttgacctcaatggagatggcaagctgggcctctccgaaatgagtaggctgctccccgtacaggaaaatttccttctgaagttccaggggatgaagctaacgtctgaggagttcaacgcaatctttaccttctacgataaagatcgaagcggctatattgacgaacatgagctcgacgcactgttaaaagatctatacgagaagaataaaaaagaaatgaacatccaacagcttactaactacaggaaaagcgtgatgtcgctcgcagaagctggtaagctttacagaaaagacttagagattgtgctgtgcagcgagccccctatgtag

SEQ ID NO: 216500 - DNA, 579 bp, synthetic construct
  misc_feature 1..579: note = Description of Artificial Sequence: Synthetic coding sequence
  source 1..579: mol_type = other DNA
atggccggaccccaacagcaaccaccctatctacacctagccgaactgaccgcatcacagtttctcgaaatttggaaacactttgatgcagatggaaacggatatatcgagggtaaagagctggagaattttttccaggaactagaaaaggcgcgaaaagggagcggcatgatgtccaagagcgacaatttcggggagaagatgaaggaatttatgcagaaatacgataaaaactccgatgggaaaatagaaatggcggaactggcccagattttgcctactgaggagaattttctgctgtgtttcaggcagcatgttggctccagcgccgagttcatggaagcatggaggaagtatgacactgaccgcagtggatacattgaagccaatgagctcaagggttttctgtccgatctcctcaaaaaagccaaccgcccttatgacgagccgaagctacaggaatacacccaaacgatcctgagaatgttcgatctgaatggtgacggcaagctgggtttgtctgaaatgagccggatcgaagctgcaactcttacctctatgtcatggatgccattttag

SEQ ID NO: 216501 - DNA, 6663 bp, synthetic construct
  misc_feature 1..6663: note = Description of Artificial Sequence: Synthetic coding sequence
  source 1..6663: mol_type = other DNA
atgattcggattgctgccctgaatgcaagtagcaccatcgaagacgatcatgagggtagctttaaatcccacaaaacccagacaaaggaggcccaagaagccgaggcattcgccctgtaccacaaagcccttgatcttcagaaacatgatcgattcgaggaaagcgcaaaggcttatcatgaattactggaggcctctttgttgcgggaggcagtcagttccggcgacgagaaggaaggcctgaagcacccgggactgatccttaaatatagcacgtataaaaatctcgctcagctggcagctcagagggaggacttagagacagcgatggaattctacctagaggccgtgatgctggatagtaccgatgtgaatctgtggtataagattggacacgttgcactcaggttgatcagaattcccttggctaggcacgccttcgaggaaggtctccggtgcaaccccgaccactggccctgtttggacaatctgatcaccgtgctgtacacactttctgattatacaacatgcctctatttcatttgcaaagccctggagaaggattgtcggtattccaagggactggtcttgaaagagaagatcttcgaagaacagccatgtctccggaaggattctcttcggatgtttctcaaatgtgacatgtcaattcatgacgtgagtgtcagcgccgctgagacgcaggcaatagtagacgaagcattagggctgagaaagaagaggcaagctctgatcgtaagagagaaggaacctgaccttaaacttgtccagcccattccgttttttacgtggaaatgtctcggcgagtccttgttggctatgtataatcatctaacgacatgcgagccccctaggccctctctcggtaagcgtatagacctgtctgattaccaggacccatcgcagcccttggagtctagtatggtggtaacccctgtgaatgtcatccagccctctactgtgagcacaaaccctgcggtagcggtcgctgagcccgtggtgtcatacacgtccgtggccacgacgtcattcccactgcattctcctggcctcttagagaccggcgctcctgtgggagacatcagcggcggagataaatccaaaaagggtgttaaacggaagaaaatctcagaggagagtggtgagactgcaaaacgaaggtcagccagggtccgcaacacaaagtgcaaaaaagaagaaaaggtggactttcaggagttgctcatgaagtttctaccgtcccgactcaggaagttagacccagaggaagaggatgatagcttcaacaattacgaagtacagtctgaggcaaaactcgagtccttcccatccatagggcctcagcggttatctttcgactctgcgacattcatggagtccgaaaagcaggatgtgcacgaatttctgctggaaaacctgaccaacgggggtatcctagagctgatgatgcggtacctgaaggctatgggtcacaagtttctggtccgatggccgccaggtctggccgaagtcgtcctctccgtgtatcattcttggcggcgacactccacctcactgccgaatcctcttttgcgggactgtagcaacaagcatatcaaggatatgatgctgatgagcttgtcctgtatggagttgcaactggatcagtggttactgaccaaaggacgtagttccgcagtctcgccccgaaattgtccggcaggaatggtgaatggcaggttcggtcctgattttcctggtacgcactgcctcggggacctcctgcagctgtctttcgcctcatctcagcgggacctgttcgaagacgggtggctagaattcgttgttcgggtttattggttaaaagccagatttctggcgctgcagggcgatatggaacaagccctagagaattacgatatctgcacagaaatgctgcaatcgtcaacagcgatacaagttgaggccggagccgaaaggagagacatcgttattcggttgcctaacctgcacaacgatagcgtggtttcccttgaggaaatcgataagaatcttaagtccctcgaacggtgtcagtccctcgaggagattcaacgcctgtatgaggcgggtgattacaaggcggtcgtacacctgctgcggcctactctgtgtactagcggcttcgaccgggctaagcacctcgagttcatgacaagcataccagagagaccggctcaactcctactgctgcaggattctctcctcagattaaaggattatcgccaatgtttcgagtgctccgacgtggctctaaatgaagcggtccaacaaatggtgaacagcggtgaagctgcagctaaagaagagtgggttgccacggtaactcagctgttgatgggcatcgagcaggctttgagtgccgactcaagcggatctattcttaaggtgtcctcatctactacagggctagtgcggttgaccaacaacctcattcaggtgatcgactgtagcatggccgttcaagaggaagcaaaggaacctcacgtttcctcagtactcccttggattatcctgcatcgcatcatatggcaagaggaagacaccttccacagtctgtgccaccaacaacagctgcagaatcctgccgaagaaggcatgagcgagacccctatgctgccttcctctctgatgctgttgaacacagcacatgagtacctaggtcggcgaagctggtgttgcaacagcgacggtgccctgctcagattttacgttcgagtgttgcaaaaggaacttgcggctagcaccagcgaggacacacacccctacaaagaggagctggagacagctctggagcagtgcttctactgcctgtattcctttccaagcaagaaaagcaaagcacggtacttggaggagcactcagctcaacaggtggatctgatttgggaagacgcgctgttcatgttcgaatatttcaaacccaaaaccctgcccgaattcgacagctacaaaaccagcacagtcagcgccgatctggccaacctgctgaaacgaatagccaccatcgtgccgaggaccgagcgacctgctttgagcttggataaggtttctgcatatattgaagggacatcgaccgaggtcccctgccttccagagggcgcagacccctcgccccctgttgtcaatgagctgtattatctactcgcagactatcacttcaagaacaaagaacagagtaaagccatcaaattctatatgcacgatatttgcatatgccccaacaggttcgacagttgggcaggtatggctcttgcgagggctagcaggattcaggacaagctgaattccaatgagctgaaaagtgacggtccaatatggaaacacgcaacgcccgtgctgaactgcttcaggagggccctggagatagattcgagcaatttgtccctctggattgaatacggtaccatgagctatgccttacactcctttgccagccggcaactgaaacagtggaggggcgaactcccacctgagctggtgcagcaaatggagggtagacgcgattccatgctcgaaaccgcgaaacattgcttcacttctgccgcaagatgcgagggcgatggcgacgaggaagagtggctgattcattacatgctgggaaaggttgccgagaagcaacagcaaccccctaccgtgtacctgctccattaccggcaagccggacactatttgcacgaagaagcagcgagatatccaaagaagatccattaccataacccaccagaattagcaatggaggccctggaagtgtacttcaggttgcatgcctcgatcttaaaattactgggcaagcctgactcgggggtgggagcggaagtgctcgtgaactttatgaaggaagctgccgagggccctttcgctcggggtgaagagaaaaataccccaaaagccagcgagaaggaaaaggcgtgcctggtggatgaagactcacattcttccgccggaactctgcccggacccggagcctctctccccagctctagcgggcctggattgacttcacccccttacacagccacccccattgaccacgattacgtgaagtgcaaaaaacctcatcagcaggccacacccgatgacaggtcccaggattctacagccgtggcactaagtgactcttcaagcacacaggacttcttcaacgaaccaacatctctgctggaaggatctcggaagagctacaccgagaagaggctgcccatcctgagttctcaggccggagccactggtaaggatctccagggagccacagaggaaagaggcaaaaacgaggagtcactggaatcgaccgaaggttttcgcgctgctgaacagggcgtgcagaaaccggctgcagagactcccgcttccgcgtgcatcccgggaaagccgtcggcatcaaccccaactctgtgggacggaaagaaaagaggagatctgccaggggaaccggttgcctttccccagggcctccctgccggagcggaagagcagaggcagttccttaccgaacagtgcatagcctcttttaggttgtgccttagccggttccctcagcattataagtcactctatcgccttgccttcctttacacatactcaaaaactcataggaatctccagtgggccagagatgtactccttgggagttctattccctggcagcagttacagcatatgcctgcccagggcttattttgcgagaggaacaaaaccaactttttcaacggtatttggcggatcccagtcgatgagatcgacaggcccggtagcttcgcttggcacatgaacagaagcattgtgttgctcttaaaggtcctcgcacagctgagagatcatagtactcttttaaaggtgtcgtctatgctgcaacgtacccctgaccagggaaagaagtacttgcgggacgccgaccggcaggttctggctcaacgcgctttcattctaactgtgaaggtgctcgaggatacactctccgagcttgcagaaggatcggaacgaccaggccctaaagtgtgtggactcccaggagcccgtatgaccacagatgtgagtcataaagcatccccggaggacgggcaggaaggactcccacagcccaaaaaaccacccctggccgacgggagcggcccaggtcccgagccaggaggtaaagtcggccttctgaatcaccgacccgtcgcgatggatgccggtgatagtgccgaccagtcaggtgaaagaaaagataaagaaagccctagggcaggccctaccgagcccatggacaccagtgaagcaactgtttgtcacagcgacttggagcggacccccccactcctgcctggtcgccctgcacgcgaccggggacctgagagccggcctaccgagttgtctctggaggagcttagtattagtgccaggcagcaaccgacgccgctcacacccgctcaaccagctccagcccctgctcctgctaccaccaccggaacgagggcagggggacacccggaggagcccctgtctcgactgtcacgtaaacgaaaactactggaggataccgaaagtgggaagactctccttctggacgcatacagggtgtggcagcagggacagaagggagttgcgtatgacctgggtagggtcgagagaatcatgagcgaaacctatatgctgattaaacaggtggacgaggaggctgccctggagcaggccgtcaagttttgccaggtgcacttaggtgctgcagcccagcgacaggcgtcaggcgatactccaacgacacctaagcaccctaaagactccagggagaacttttttcctgttaccgtcgttcctaccgcaccagatccagtgcccgcagatagcgtgcagcgcccaagcgatgcccacacaaaaccccgaccagcactagctgctgctaccaccataatcacttgcccaccatcagcctccgcaagtacccttgatcaaagcaaggaccctggcccacctcgcccacataggccggaggccaccccttcaatggcgtctttgggccctgagggggaggagctggcaagggtggccgaggggacctcttttccaccacaggagccacgccattccccccaggtgaagatggctccaactagcagcccagctgaaccccactgctggcccgctgaagccgctctggggaccggtgcggagcctacatgcagccaagagggcaagctccgccctgaaccacgacgagacggagaggcccaggaggccgcttcagagacgcaaccgctctcgagtccacctacggctgcctcatcaaaggctccctcgtcaggaagcgctcagccccctgagggtcacccaggtaaacctgaaccatcgcgagcaaaaagtcgtcctctccctaatatgcccaaactcgtcattccgtcggcggcaactaagtttcctccagagattacggtgacacccccaactcccacacttctttcaccgaaggggtcaattagcgaggaaacaaagcaaaaactgaagagtgcaatcctgagcgcacagagtgcggcaaacgtgcgcaaggaaagcttatgtcaacctgccctcgaggtcctagagacatcttcgcaggagagctccctcgagtccgagaccgatgaggatgacgactatatggacatctag

SEQ ID NO: 216502 - DNA, 6662 bp, synthetic construct
  misc_feature 1..6662: note = Description of Artificial Sequence: Synthetic coding sequence
  source 1..6662: mol_type = other DNA
atgattcgcattgcagctttgaatgcctcctccactatcgaggacgaccacgagggtagtttcaagagccataaaactcagaccaaagaggctcaggaagccgaggctttcgccctttaccataaggcattggatcttcagaagcatgataggtttgaagagtctgcgaaagcttaccacgaactgttagaggcttcactgcttcgcgaggctgtgagttcaggagacgaaaaggaaggactgaagcatcctggccttatcctgaaatattcaacttataaaaatctagcccagttagccgcacagagagaggatctcgaaactgccatggagttttacttagaggctgtaatgttggatagcactgacgtgaacctgtggtacaagataggccacgttgcccttcgtttgattcgaataccacttgcacggcacgcttttgaagaggggctcaggtgtaaccccgaccactggccatgtcttgacaatttaatcacagtactatacacattatctgactacacgacatgcttgtatttcatctgcaaggctctcgaaaaggattgtagatactccaaagggcttgtgctgaaagaaaaaatcttcgaagagcagccttgcctgagaaaggacagcctgcggatgttcctgaagtgcgatatgagcattcacgacgttagcgtatccgccgctgagacccaggccattgtcgacgaggccttgggattgagaaagaaaagacaggctctgatcgtacgtgagaaggagcctgaccttaaactggtccaacctatcccctttttcacctggaaatgcctaggggaaagtttgctcgccatgtacaatcatttaacaacatgcgaaccccctaggccgtccctgggaaagaggatcgatctcagcgactaccaagacccatcccagccccttgagtcttctatggtggtgaccccggtgaacgtcatccagcctagcacagtatccaccaaccccgcagttgccgtggccgagcctgttgtctcatacaccagtgtcgcaacaaccagcttccctttgcactcccctggcctgctcgagactggtgctccagttggagatatctctggtggcgataaatccaagaagggcgttaaacggaagaagatttccgaggaatccggggagacagcaaagcgccgatctgccagagtgcgcaatacaaagtgtaaaaaggaggaaaaggttgacttccaggaactgttgatgaaattcctgccctcaagactgagaaaactggaccccgaggaagaggacgactctttcaataactatgaagtgcagtctgaagcaaaactggagagttttccatccatcggccctcagcgcttgtcatttgattcagctacgtttatggagtccgaaaagcaggacgtccacgaattcctcctggagaacctgacgaatggtgggattcttgaactcatgatgaggtacctgaaggccatgggtcataagttccttgtgagatggcccccagggctcgcggaagtagtgctgtccgtgtatcacagctggcgcaggcatagtacaagccttcctaatccattgttaagagattgctccaacaaacacatcaaggacatgatgttaatgagtctctcctgcatggagctgcagcttgaccagtggcttctcactaagggcagaagttcggcagtttcaccacgtaactgccctgctgggatggttaacggcagatttggcccagacttcccaggaactcactgcttaggggatctgctacagctgagtttcgcaagctcgcagagagatctcttcgaggacggctggctggagtttgttgtcagagtgtattggttaaaagccaggttcctggcactgcagggagacatggaacaggctctggagaattacgacatttgcacagagatgctccaatcatccacagctatccaggtggaggccggagctgagcgcagagatattgtcattcgtctccccaacctgcacaacgattccgtcgtctccctagaggaaattgacaaaaacctgaaatctttagaaaggtgccagtccctggaagaaatccagcgcctgtacgaggcaggtgattacaaagctgtggtgcacctgctaagaccaacattgtgtacctccggctttgaccgagcgaagcacctggagttcatgactagtatcccagagcggcctgcccaactgctgctgctccaggacagcctacttaggctcaaggattataggcagtgtttcgagtgtagcgatgtcgctctgaatgaagctgtgcagcagatggtgaactccggggaggcggcagcaaaggaggagtgggttgcgacggtcacccagctgcttatgggaatcgaacaggcattatcagcggattcttccgggtctattctgaaggtatcgagctctacgactggcctagtgcgcttaaccaataacctaatccaggttatagactgttccatggccgtgcaggaagaggcaaaggagccccacgtcagcagtgtgcttccatggatcatactgcaccggatcatctggcaggaagaagatacattccattcactgtgtcaccaacagcaactgcagaatcccgcagaggaaggaatgtctgaaaccccgatgctgccttctagcctgatgctgctgaacactgcccacgaatatttgggcagaaggagttggtgttgcaatagcgatggcgcacttttgagattctacgtgagagtgctccagaaggaactagccgcatccacaagtgaggacacacatccctacaaggaggagctggagaccgctttggagcaatgtttttactgtctgtacagtttcccgtccaaaaagtctaaggcaaggtatctcgaggagcacagtgcacagcaggtcgacctgatttgggaagacgcactgtttatgttcgagtattttaaaccgaagacattgcctgagtttgacagctataagactagtacagtgagtgccgacttggccaatctgctgaaacggatcgctaccattgtacccaggacggagcgcccagcattgtctctagataaggtatctgcctacattgaaggcacaagcaccgaagttccttgtctcccagaaggggctgatccttccccgcctgtggttaatgaattatattatctgctggccgattaccactttaaaaacaaagaacaatctaaggctataaagttctacatgcacgatatttgtatatgtccaaacaggttcgacagctgggctggaatggcattagcacgcgcttctcgaatccaggataaactgaactcaaatgaactgaagtccgatggacctatctggaaacacgccaccccagtgctcaattgttttcgacgggcattagagattgacagcagcaacctttctctgtggatcgagtatgggacgatgagctatgccctgcactcattcgcctctagacagctaaagcagtggcgaggggagttaccacccgaattagtgcaacagatggaagggagacgggactccatgctggaaacagccaaacattgctttacctccgcagcccgttgtgagggagacggggacgaggaggagtggctaattcactatatgctcggcaaggtggccgaaaaacagcagcagccccctacggtgtacctcttgcactataggcaggctggacactaccttcacgaagaagccgctaggtatcctaaaaagattcattatcataacccacccgagctggccatggaagccttggaagtgtacttccggctccacgcaagcatcctcaagctgttgggaaaacctgacagcggggttggggctgaggtactggtgaacttcatgaaagaggctgctgaggggcctttcgccagaggtgaggagaaaaataccccaaaggctagcgagaaagaaaaggcttgtctcgtggacgaggatagccacagcagcgccggaactctcccgggacccggtgcaagtctgcccagctccagtggaccaggactcacctccccaccctataccgctaccccaatcgatcacgactatgtgaaatgcaaaaaaccacaccagcaggccacacccgacgacaggagtcaggacagcactgccgtggcgctgtcagactcttcttccacccaggacttcttcaacgaacctacaagcctcttggaaggatctcggaaatcctatacagagaagagactgccaattctctcctcccaagctggagccacagggaaagatctgcagggggctacagaggagcgcggtaagaacgaagaatcactggaatcgaccgaggggttcagagctgcggaacagggggtgcaaaagccagcagctgagactcctgccagcgcttgtatccccggaaagccgtctgcaagcactccaaccttgtgggacgggaaaaaacgcggagatctcccaggtgagcccgtcgccttcccccagggtctccctgccggagcagaggagcagcggcagttcctcaccgaacaatgcatcgcaagctttagactctgcctgtcaagattcccccaacactacaaatctttgtacagactggcatttttgtatacatactctaagacccatcgcaatttacagtgggcacgggacgtacttttagggtcatctatcccatggcagcagctccagcatatgccagctcagggactgttctgcgagcggaacaagaccaacttcttcaacgggatctggaggatccccgtggacgagatcgacaggcccggaagttttgcttggcatatgaaccggtcaattgttcttctgttaaaggttctggcccaactccgtgaccactcgactctgcttaaggtaagctccatgttgcagcgcactcccgatcaaggtaaaaagtatctcagagacgctgatagacaggtgctggctcagcgcgcattcattctgacagtgaaggtcctggaggacaccctctctgagttagcggaagggagcgagagacctggccctaaggtgtgtgggctgcctggggctaggatgaccaccgatgttagccacaaagcctcgcccgaggacgggcaagaggggctgcctcagcctaaaaaacctcccctggcagacgggtctggtcccggacccgaacctgggggaaaggtggggttactgaatcatcgtcccgtagccatggatgcaggtgactctgccgaccaatcgggggaacgcaaggacaaggaatcacctagagccggacccaccgaacctatggacactagtgaagcaacggtctgccatagcgacttagaacgcaccccccctctcttgcccggacggccagcccgagatagagggccagaatctcgaccaactgaattgtccctggaagagctgtcgattagcgccaggcaacagcccactccactaactcctgcccagccggcacccgctccagcccctgcaactactacaggcacaagggctgggggtcacccagaagagccactctcccggctgagtcgcaagaggaagttgttagaggatactgaatccggtaagacactcctgctcgatgcctacagagtatggcagcaaggccagaaaggggtcgcatatgacctaggaagagtcgaacggattatgtcggaaacctatatgctgatcaaacaagtggacgaggaagccgcactggagcaggcagtaaaattttgccaagtccatctcggggctgctgcacaacgacaggcttctggtgacacccctaccactccaaaacaccccaaagattctcgggaaaatttcttccctgtgaccgtggtacccaccgctccagacccagtgccggctgatagtgtccagagaccttcagatgctcacaccaaacctcgacctgccctggctgccgctaccaccatcataacgtgccccccttcggctagtgccagcaccttggaccagagcaaggatcccggtccgcctcgacctcacagaccagaagccaccccttctatggcttctttgggaccagaaggcgaggagttggccagagtcgcagaagggactagtttcccgcctcaggagcccagacacagcccacaagtcaagatggcccctacctcttcgcctgcagagccccattgctggcccgcagaggcagccctcggaactggagccgaaccaacatgcagccaggagggaaaactgcgccctgaaccccgtagggatggcgaggcgcaagaagcagcatcggagacacaacccttaagttccccacctactgccgcatcttccaaagccccatcttcaggatctgcccagccgcctgaaggccacccgggaaaaccagaaccgtcaagggccaaatctaggccacttcctaacatgccgaaactagtgatcccatctgctgcaaccaagttcccacccgaaatcactgtcactcctccaacaccaaccctcctatcgccaaaaggaagcatctcagaagagacgaagcagaaactgaagtctgctatactaagtgcacagtccgcggcaaacgttcgcaaggagtccctatgccagcccgctctggaagtgctggagacatcttctcaagaaagcagtctggaaagcgaaacagatgaggacgatgattatatggacatata

SEQ ID NO: 216503 - DNA, 1770 bp, synthetic construct
  misc_feature 1..1770: note = Description of Artificial Sequence: Synthetic coding sequence
  source 1..1770: mol_type = other DNA
atgccgagacgttccaggcgcggaatatggcgcatcccagtagacgagattgatcgacctggctcatttgcatggcacatgaatcgctctatcgtgctgttgctgaaagtcctcgcgcagttgagagatcattcaactctcctaaaagtctcctcaatgttacagcggacacctgaccagggtaaaaaatacctccgagacgcagacaggcaggtgctggcccaaagagcgttcatactgacggtgaaagtgctggaggataccctatcagagctcgcagagggcagcgagcgacccggtccaaaggtgtgtgggcttccgggagccagaatgactactgacgtttctcataaagctagtcccgaggacggtcaggaaggcttgcctcagcctaaaaagcctcctttggcagacggatccgggccaggccctgagcccggtggcaaagtcggcctccttaaccacaggcctgtggccatggatgccggtgactcagcagaccagagcggtgagagaaaagacaaagagtccccgcgagccggtccaacagaacctatggatacctctgaagccactgtgtgccactcggatctagagcggactccccctctactccccggaagaccggctagggatagagggccagagtctcgtcctacagagctatccctcgaagagctgtctattagcgcgaggcagcaaccaactcctctcactccggcacagccggctcctgctcccgcacctgcaacaacaaccggaaccagggcaggtggccaccctgaggagccactgtctaggctatcaagaaaacgcaaactgctggaggacactgaaagcgggaagacgttactcttggacgcttatagagtctggcagcagggccaaaagggagtggcatacgacctgggcagggtggaacgtatcatgtccgaaacatacatgcttattaaacaggtcgacgaagaagctgctctggagcaggccgtgaagttctgccaggtccacttaggactccccccacgcgacagacctagggataccccaaccacccctaaacaccccaaagatagtagagaaaatttttttcccgtgacagtcgtccccacagctcccgacccggtgccagcggactctgtacagcgaccctccgatgctcataccaaacccaggcccgctttagcagcagccaccacaatcatcacgtgccccccttctgcttccgcctctaccttggatcaatctaaggaccctgggccacctaggccacacaggcccgaggccaccccatctatggcctcattgggccctgagggcaaactccggccagagccaaggcgggacggcgaagcccaggaggccgcttcagaaacccagccccttagttcccctcctaccgctgcctcttctaaggccccaagttccggcagcgcacagcccccagagggacaccccggtaagcccgaaccctcgcgcgctaagtcaagacccctgcctaacatgcctaaactcgtgatcccttcagctgcaaccaagtttcctcccgagattacggtgactccccctactcctactttgttatctccaaagggtagcatttctgaggaaactaaacagaaactgaagtctgcaatcctctcagctcagtctgctgcgaacgtgcgcaaagagtccctctgccagcccgctctcgaagtgttggagacttccagccaggaaagcagtctggagtccgagacagatgaggacgacgattacatggatatttag

SEQ ID NO: 216504 - DNA, 1224 bp, synthetic construct
  misc_feature 1..1224: note = Description of Artificial Sequence: Synthetic coding sequence
  source 1..1224: mol_type = other DNA
atgatacggatcgccgctcttaatgcttcctcgacaattgaggacgatcatgaaggatctttcaagtcccataaaacacagaccaaggaggctcaggaggctgaggcatttgcgctgtatcataaggctctcgacttgcaaaaacacgacaggttcgaagagagcgcaaaagcataccacgagctgctagaggcctcgttgctgagagaggctgtttcctccggagatgagaaggaggggctaaaacatcccggtttgatccttaaatactcaacatataagaacctcgcccaactggcggctcaaagagaggacttggagaccgccatggagttctaccttgaggcagtgatgttggatagtacggacgtgaatctttggtacaagataggacacgtggctctgagattgattagaattccactcgctagacatgcatttgaggagggcttgcgatgcaatcctgatcactggccatgtctggacaatcttatcactgtactgtacactctctctgattataccacttgtctctacttcatctgtaaagccctggaaaaagactgtagatattccaaaggccttgtgttgaaggaaaagatatttgaggagcagccttgtcttcgcaaagattcactcagaatgttcttgaaatgtgatatgtccatacatgacgtcagtgtcagtgcagcagaaacccaggccattgttgacgaggctctgggactgcggaagaaacgccaggcacttatcgtgagagagaaggagcctgatctcaaactggttcagccgataccattttttacttggaagtgtctgggagagtcactcctcgctatgtataatcacctcacaacttgcgagccaccgaggccatccctgggcaagcgcattgatctgagcgattaccaggacccaagtcagcccctcgagagctccatggtcgtgacacctgtaaatgttattcagccaagtacagttagtaccaaccctgcagtggccgtggccgaaccagtggtgagttacacctccgtcgccaccacatcctttcccctccacagccccggactgctagagaccggtgcccctgtgggcgatattagcggcggtgacaagagcaagaagggagtgaagagaaaaaagatttcggaggagtcgggtgagacggctaaaagacgatcagctagggtgcggaataccaaatgtaaaaaagaggaaaaatag

SEQ ID NO: 216505 - DNA, 1527 bp, synthetic construct
  misc_feature 1..1527: note = Description of Artificial Sequence: Synthetic coding sequence
  source 1..1527: mol_type = other DNA
atgcaattctcaggcgaaaagattagcggccagcgcgacctccagaagagtaagatgcgatttacatttacttctaggtgtttggctctgtttctgttattgaaccaccctacccctatactgccggcattctccaaccaaacctaccctactattgaacctaagccattcctgtatgttgtggggcgtaaaaagatgatggatgcgcagtacaaatgctacgaccggatgcagcagcttcctgcctatcagggcgagggcccttattgtaacagaacctgggacggatggttgtgttgggatgatacaccagctggagtcctgagttaccagttttgtccggactactttcccgattttgacccttctgagaaagtcaccaaatactgcgatgagaagggcgtatggttcaaacatccagagaacaatcgaacgtggagcaattataccatgtgcaatgctttcacccctgagaagctgaagaatgcgtacgttctgtactacctggcaattgtcgggcactctctgtctattttcaccctggtgataagccttggaatcttcgtctttttccgcaagctcaccacaatcttcccgctgaactggaagtatcggaaggcacttagccttgggtgccagagagttactctacataagaatatgttcctgacctatattctgaactctatgatcattataatccacttggtggaggtcgtgccgaatggtgaactcgttcgcagagatccagtgtcctgcaaaatcctccattttttccatcagtatatgatggcttgtaattacttttggatgttgtgcgagggcatttacttacacacattaattgtggtggccgtgttcacggaaaaacagcggctgcgatggtactaccttctcggttggggcttcccgctggttcccactacgattcatgctatcacgcgggctgtatatttcaacgataactgctggctctctgtggagactcatctgctctatatcattcatggaccagtcatggctgcactggtcgttaacttcttttttctgctgaatatagtacgcgtgttagtaaccaaaatgcgagaaacacacgaggcggagtcgcacatgtacttgaaggctgtcaaggccactatgatcctcgtccccctgctgggcattcaatttgtcgtgttcccttggcgcccttctaataagatgttgggtaaaatctatgattacgtgatgcactccctgattcattttcagggcttttttgtggcgaccatttattgtttctgcaataatgaagtgcagactacggtgaagagacagtgggcacagttcaaaatacagtggaatcagcgttgggggaggaggccaagtaataggagtgcacgagctgctgccgcagctgctgaggccggagatattcccatctacatctgccatcaggagctcaggaacgagccagccaacaaccagggagaggagtccgcagagatcattcctctgaacataattgaacaggagtccagcgcatag

SEQ ID NO: 216506 - DNA, 1473 bp, synthetic construct
  misc_feature 1..1473: note = Description of Artificial Sequence: Synthetic coding sequence
  source 1..1473: mol_type = other DNA
atgaggttcacattcacctcccgctgcttagctctcttcctcttgcttaaccacccaacccctatactcccagctttctctaatcagacatatcctacgatcgagcctaagccgtttctttacgtcgtggggaggaagaaaatgatggacgcccaatataagtgctacgaccgaatgcagcagcttcccgcttaccagggagaaggcccttactgtaatcgaacttgggacgggtggctgtgctgggatgatactccagccggtgttctatcttaccaattttgccctgattatttccccgattttgatccatccgagaaagtaaccaaatattgcgatgaaaaaggagtgtggttcaagcacccggaaaataacaggacctggtctaattacaccatgtgcaacgccttcacgccagagaaacttaaaaatgcatacgtattgtactacctggccatcgtggggcattccctgtcaatctttaccctcgtcattagcctaggaatctttgtgttcttccgcaagctaaccaccattttccctttgaattggaaataccgcaaagctttaagcttggggtgccaacgcgtaaccttacacaagaatatgttcctcacttacatcctcaacagcatgattatcattatccacctggtggaggtggtgcccaatggggagctggtgcggagggatcctgtttcttgcaaaatactccacttcttccatcagtatatgatggcatgcaattacttctggatgctgtgcgagggtatttacctacacacactcatagtggttgccgtcttcacggagaagcagcgattgcgatggtactacctgctgggctggggctttcccttggtccctaccaccatccacgccatcactcgggctgtctactttaatgacaactgttggctgtccgtggaaacgcacttattgtacataatccatgggccagtaatggcagctttagtggtgaattttttttttctcctgaatatagtcagggtgttggtcactaaaatgagggaaacccatgaggcagaaagccacatgtacctcaaagccgtgaaggcgactatgatcttggtgcccctgctgggaatacaatttgtcgtcttcccctggcggccttccaataagatgctcggtaagatctacgactacgtcatgcacagtcttattcacttccaaggcttttttgttgcaactatatactgcttttgcaacaacgaagtgcagacgaccgtgaagcggcagtgggcacagttcaagatccagtggaatcagaggtggggcaggcggccatcgaaccgatcagctagagctgcagcggctgcagcagaggcaggcgatattcctatttatatctgtcatcaggagctgagaaatgaacctgccaataaccaaggcgaagagagcgccgagatcataccgctcaacataattgagcaggaaagttccgcctag

SEQ ID NO: 216507 - DNA, 1425 bp, synthetic construct
  misc_feature 1..1425: note = Description of Artificial Sequence: Synthetic coding sequence
  source 1..1425: mol_type = other DNA
atgcgcttcaccttcactagccgttgcctcgccctgttcctccttctgaatcacccaacccctatactgccagccttcagcaatcagacataccctactatagagcctaagccattcctgtacgtcgtgggcagaaaaaagatgatggatgcgcagtataagtgttatgaccgtatgcagcagctgcctgcctatcagggcgagggcccttactgcaaccggacttgggatggttggttgtgttgggacgacacaccagccggtgtcctcagttaccagttctgcccagattacttcccggactttgatcccagtgagaaagtcacaaagtattgtgacgagaaaggtgtttggttcaagcatcccgaaaataataggacgtggtctaactataccatgtgcaacgcctttacccccgaaaaactcaagaatgcgtacgttctgtattatttagccattgtcggccactccctgagtatatttaccctggtcatttccctcgggatttttgtcttcttcaggtcacttggctgccagcgtgttacgctgcataaaaacatgtttctgacgtacatcctcaactctatgattatcataattcatctggttgaggttgtgcctaacggcgagctggtgagacgtgatccagtgtcatgtaagattctgcattttttccaccagtacatgatggcgtgtaactacttttggatgctctgcgagggcatctacctacacactctgatcgtcgttgccgtgttcaccgagaaacagaggctgcgttggtattatttacttggatggggtttcccattagtacccaccacaatccatgcaatcactcgcgcagtttattttaatgataattgttggctgtcagtagagactcatctgctctacatcatccacggacccgtgatggctgccctcgttgtgaacttcttcttccttttaaacatcgtgcgagtccttgtgacgaagatgcgcgagacacatgaagccgaatcacatatgtatctcaaggccgttaaagccacaatgatcctggtgccacttttgggcattcagtttgtagtatttccctggaggccgagcaataaaatgcttggaaaaatatacgactacgtgatgcattctctgattcatttccagggattttttgttgccacgatttactgtttctgtaataacgaagtacagacgacggtcaaaaggcagtgggctcagtttaaaatccaatggaatcaacgttggggacgccgaccctccaatagatccgcacgcgcagccgctgccgctgcagaggccggagatattcccatatacatctgtcatcaggagctcagaaatgaacccgctaataaccagggcgaagaaagcgccgagattatcccactgaatattatcgagcaagaatcttctgcatag

SEQ ID NO: 216508 - DNA, 825 bp, synthetic construct
  misc_feature 1..825: note = Description of Artificial Sequence: Synthetic coding sequence
  source 1..825: mol_type = other DNA
atgcggttcacgtttacttcccggtgtctagcccttttcctccttttaaaccaccctaccccaatattgcccgcattttctaaccagacttacccgacgattgagccaaaacccttcctctacgtagtgggcagaaagaagatgatggacgcccaatacaaatgctacgatagaatgcaacagctgcccgcatatcagggcgaaggaccctactgtaacaggacctgggatggctggttatgttgggatgatacccccgcaggcgttctgtcctaccagttctgtcccgattacttccccgatttcgacccgagcgagaaagttacaaaatactgcgatgaaaagggggtgtggttcaagcacccagagaataaccgaacttggtcgaattatactatgtgcaacgctttcacaccagagaaactgaagaatgcttacgtgctgtactaccttgcaatcgttggtcattctctgagtatttttactctggtgatttcactgggcattttcgtgttctttaggtcactagggtgtcaacgcgtgacgctgcacaagaacatgttcctgacatacatccttaacagcatgatcattattatccatttagtagaagtggttccaaatggagagctcgttagacgtgaccctgtttcatgcaaaattctccatttttttcaccagtacatgatggcatgtaattacttctggatgctgtgcgaggggatctatttgcatacactgatcgttgtggcagtcttcaccgaaaagcaacgtcttcgatggtactatttgctgggctgggctcctgccttccacagggattag

SEQ ID NO: 216509 - DNA, 1473 bp, synthetic construct
  misc_feature 1..1473: note = Description of Artificial Sequence: Synthetic coding sequence
  source 1..1473: mol_type = other DNA
atgaggtttacgtttactagcaggtgcctcgcccttttcttgctgctcaaccacccaactcctattctccctgccttcagcaatcaaacctatccaaccattgagcccaagccctttttgtacgttgtgggcaggaagaaaatgatggacgcccagtataaatgctacgaccgaatgcagcagctgcccgcatatcaaggggagggtccatactgtaacaggacttgggacgggtggttgtgctgggacgacacccctgcaggagtgctctcctaccagttctgtcctgactactttcctgactttgaccctagcgaaaaagtgaccaagtactgtgatgagaagggtgtgtggttcaagcaccccgagaacaacaggacttggtcaaattacactatgtgcaacgcctttacccccgagaagctgaagaatgcctatgtgctctactacttagcaatagttggtcattctctgtcaatcttcacactggtgatttccctggggatttttgtattttttcggaagctgacgaccatctttccgttgaactggaaatatcggaaagcgttaagcctggggtgccagcgcgtaacactgcataaaaatatgttcctcacctatattctgaatagtatgattattatcattcatctggtagaggtcgtgcccaatggggaattagtccggagagatcccgtgtcttgcaagatcttgcacttttttcatcagtacatgatggcttgcaattatttttggatgctgtgcgaagggatctatctgcataccctcatagtcgtggcagtgtttactgaaaaacagaggctgcggtggtactatctgttgggatggggcttccctctggtccccaccactattcacgctataacccgagcggtgtatttcaatgacaattgttggctgtctgtggaaacccatttactatacattattcacgggcctgttatggctgcactcgtcgtgaatttcttcttcctgcttaatatagtgcgggtgctcgtgacaaagatgcgggagactcacgaggcagaaagccacatgtacctgaaagcagtgaaagctactatgatcctggtgcctcttttggggatacaattcgtcgtctttccttggcggccatcaaacaagatgcttggcaaaatctacgactatgttatgcactccctgatccattttcagggtttctttgtcgcgaccatatactgtttctgtaacaacgaggtgcaaaccaccgtcaagaggcagtgggctcagttcaaaattcaatggaatcagaggtgggggcgacgcccttctaatagatcagctagagcggctgctgccgcagcggaggctggggacataccaatctacatttgccatcaagagcttcgcaacgagccagcgaataaccagggagaggagtctgcagaaatcattcccctgaatataattgagcaagagagcagcgcatag

SEQ ID NO: 216510 - DNA, 873 bp, synthetic construct
  misc_feature 1..873: note = Description of Artificial Sequence: Synthetic coding sequence
  source 1..873: mol_type = other DNA
atgcgctttacctttacctcacggtgtctggctttatttctactgctaaaccaccctaccccaatcttgcctgcattcagtaatcaaacgtacccaactattgagcctaagcctttcctctatgtcgtcggtagaaaaaaaatgatggacgcccagtacaaatgttatgatcgaatgcagcagctgcccgcataccagggggaaggcccttactgtaaccgcacgtgggacggatggctgtgttgggacgataccccggcaggggtactgagctaccagttctgccctgattacttccccgacttcgatccaagtgagaaggtcacgaaatactgtgatgaaaagggggtatggttcaaacaccctgagaacaatagaacttggtccaattacactatgtgtaatgcgttcacgcccgaaaagttgaagaatgcgtatgtgctgtactatctcgcaatcgtgggacatagcctgtcaattttcacattggtgatttcactgggcatattcgtgtttttccgaaagttgacaaccattttccctttgaactggaagtacaggaaagccctgtcactgggctgccagcgggtgacactccacaagaacatgtttctgacctatatactcaattctatgatcatcattattcatctggtcgaggtggtgccaaacggcgagctggtgaggcgagatccagtctcctgcaagatcctgcattttttccatcaatacatgatggcttgcaactacttctggatgctctgcgaaggtatctatctgcatactttaattgttgtcgctgtgttcacagagaagcaaagactccgatggtattatctcctcggatgggctccggctttccatagggattag

SEQ ID NO: 216511 - DNA, 1425 bp, synthetic construct
  misc_feature 1..1425: note = Description of Artificial Sequence: Synthetic coding sequence
  source 1..1425: mol_type = other DNA
atgagatttactttcacatcacggtgcctcgccctgtttctgctacttaaccatccgacaccaattctgccagcgtttagtaaccagacctaccccactattgagcccaagccttttttgtacgtggtggggcgaaaaaagatgatggatgcccagtacaagtgttatgacaggatgcagcagctgcccgcatatcaaggagagggcccatactgcaatagaacctgggacggctggctctgctgggacgatacaccagcaggcgtgttgtcctaccaattttgccctgattactttcccgatttcgacccttcagagaaggttactaaatactgtgacgagaagggggtttggtttaagcatcctgaaaacaacagaacttggtcgaattacacaatgtgtaacgcatttaccccggaaaaactgaaaaatgcgtacgtgctctattatcttgctattgtcggccactccctgagtattttcaccctggtcatctcactaggcatcttcgtcttcttcaggagtctaggctgccagagggtgaccctgcacaaaaatatgtttttgacgtacatcttgaattccatgattataatcatacacctggttgaggtcgtccccaatggcgagctcgtcagacgggatcctgtgtcatgtaaaattctgcatttctttcaccagtatatgatggcatgtaattacttctggatgctgtgtgaaggcatttacttacataccctaattgtggtggccgtttttactgaaaaacagcgcttgagatggtactacttgctagggtggggcttcccactggtaccaacaaccattcatgccattactcgtgccgtttactttaacgacaactgctggctgagcgtcgagacccacctcctttacatcatccacggacccgtgatggccgcactggtcgttaacttctttttcctgctgaacatcgtgagagtcctcgtaacaaagatgagagagacgcatgaagctgagtcccacatgtacctgaaggccgtgaaagctaccatgatcctggtccccttgctcggcattcagttcgtcgtgtttccctggcgtcctagcaataagatgctcgggaagatttatgactacgttatgcactcacttatccatttccagggattcttcgtggctaccatttattgcttctgcaacaatgaggtccaaaccaccgtcaaacgtcaatgggcccaatttaagattcaatggaaccagcggtggggccgaagaccgtcaaaccgctcagcacgggctgccgcagccgcagcggaagctggcgacatccctatttatatctgtcatcaggagctgcgaaatgagccagccaacaatcagggggaagaatctgctgaaattatccccctgaatattatagagcaggaaagcagcgcttag

SEQ ID NO: 216512 - DNA, 489 bp, synthetic construct
  misc_feature 1..489: note = Description of Artificial Sequence: Synthetic coding sequence
  source 1..489: mol_type = other DNA
atgagatttacctttacttctcgctgccttgccctcttcctactgcttaaccaccccacacctattcttccagcgttctcaaatcagacatatccgaccattgagcccaaaccctttctgtatgtggtaggacgcaagaaaatgatggacgcacagtacaagtgctatgataggatgcagcagctgcctgcctatcagggggaggggccttactgcaatcgcacttgggacggatggctgtgttgggatgacacccctgcgggagttctgtcttatcagttctgtcccgattattttccagactttgatccgtccgagaaagtcacaaagtattgtgacgaaaagggcgtgtggttcaaacaccctgagaacaataggacctggtctaattacacaatgtgcaatgcttttactcccgagaagctcaaaaatgcctacgtgctgtattatcttgccatcgtcggccactcttgtcaattttcaccatag

SEQ ID NO: 216513 - DNA, 1386 bp, synthetic construct
  misc_feature 1..1386: note = Description of Artificial Sequence: Synthetic coding sequence
  source 1..1386: mol_type = other DNA
atggagaaaaaatgcaccttgaactttctggtgcttctgccgttctttatgattctagtcactgccgagcttgaggaaagccccgaagatagcattcagcttggcgtaaccagaaacaagattatgaccgcccaatatgagtgctaccagaagattatgcaggatcccattcagcaggcagagggggtgtactgcaacagaacatgggatggttggctgtgctggaacgatgtcgcagcaggcacagaatctatgcaactgtgcccagactattttcaggactttgacccctcagagaaggtgacaaagatctgcgatcaggatggcaactggtttcgtcaccctgccagtaatagaacctggacaaattacacccagtgcaacgtgaacacacatgagaaagtcaagacagctcttaatctgttctatctcactattatcggtcacgggctatcgatcgctagcctactgataagtttggggattttcttctacttcaagtccttatcctgccagagaatcaccctgcacaagaatctgttcttctcattcgtctgcaactctgtggtgacaataattcacctcacggcggtggctaacaaccaagcactggtggcaaccaacccagtgtcatgtaaggtctcccagttcatacacctatacctgatgggatgcaattacttttggatgctttgcgaaggaatctacttgcacaccctgatcgtggtcgctgtgtttgcagaaaagcagcacctgatgtggtattacttcttaggttgggggttccctctgattcccgcttgcatccacgccattgccagatctctctattataatgacaactgttggatatcatcagacacacatcttttgtacatcatccacggccctatttgcgccgcattactcgttaacttatttttcctcttgaatatcgtccgggtcttgataaccaaattaaaggtgacccaccaggcggaatccaacctttacatgaaggccgtgagggccactctcatcctcgtgcccctcctcgggatcgaattcgtgctcatcccctggcgaccagagggtaaaatcgcagaagaggtctatgactatattatgcatattcttatgcatttccagggcttattggttagcacgatattctgtttttttaacggggaggtgcaagcaatcttgcggagaaattggaatcaatacaagatccagttcggcaattcctttagtaactcagaggccctgcggagcgcctcttacacagtgtccacaattagcgacggcccaggttactctcacgactgccctagcgaacacctgaacggcaagtctattcacgacattgagaacgttcttctcaagccagaaaacctgtacaattag

SEQ ID NO: 216514 - DNA, 1386 bp, synthetic construct
  misc_feature 1..1386: note = Description of Artificial Sequence: Synthetic coding sequence
  source 1..1386: mol_type = other DNA
atggaaaagaaatgtacactgaattttttggtcttgctacctttctttatgatactggtaacggctgagcttgaggaaagccctgaagactctatccagctgggagtgactagaaacaaaatcatgaccgcccaatacgagtgctatcagaagattatgcaggatcccattcagcaagccgagggggtatattgcaatcgcacctgggatggctggctctgctggaatgatgttgcagctggtactgagagcatgcagctctgcccagactactttcaggactttgaccccagcgagaaggtcacaaagatatgcgaccaggacggaaattggtttcgccatcctgcgagcaatcggacatggactaattacactcagtgcaatgtgaacacacatgaaaaagtgaaaacagcgctgaatctgttttacctaacaattattgggcacggtctgagtatagccagtctccttatttccctgggcatatttttttacttcaaaagcctcagctgtcagcggatcaccttgcataaaaatttatttttttccttcgtttgcaattcagtcgtcaccattatacacctcactgcagtggctaacaaccaagcactggtcgcgacaaatccagtttcttgcaaagttagccagttcattcacttatacctgatgggctgtaattacttctggatgctgtgcgaaggcatatatctgcataccttaatcgtggtggcagtgttcgccgagaagcagcacctgatgtggtactattttctcggctggggattccccctgattccagcttgtattcatgcgatcgcgagatcactttattataatgataactgctggatatcctccgacacccatctcctgtacatcatacatgggcctatttgcgctgcgctcctcgtgaacttgttcttcctgctgaacatcgtcagggttttgattactaaacttaaggttacacatcaggccgagtcgaacctctatatgaaggctgtcagggccacactaatcctcgtgcctctgttgggaattgagtttgtcctcattccttggagacccgaaggaaaaatagccgaggaggtatatgattatattatgcacatcctaatgcacttccagggcctgctagtgtctaccatcttctgtttttttaatggcgaagtccaggcaatcttacgaaggaattggaaccagtacaagattcagttcggcaatagtttcagtaattcagaagcccttagatccgctagctatactgtgtcaaccatttctgatggacctgggtactcccacgactgcccaagcgagcacctcaatgggaagtccattcacgacatcgaaaacgtgctgctgaagcctgaaaatctctacaactag

SEQ ID NO: 216515 - DNA, 1386 bp, synthetic construct
  misc_feature 1..1386: note = Description of Artificial Sequence: Synthetic coding sequence
  source 1..1386: mol_type = other DNA
atggaaaaaaagtgtaccctcaattttctagttctgctacccttcttcatgattcttgtgacagccgagcttgaggaatcccccgaggactctatacagctgggcgtgaccaggaataagattatgacagcccagtacgagtgttaccagaagatcatgcaggaccctatccagcaagccgaaggcgtgtactgcaaccgcacttgggacggatggctgtgttggaacgatgtagccgctggaaccgagtctatgcagctgtgtccagactattttcaggatttcgaccctagcgagaaagttaccaagatctgtgaccaagatgggaactggtttaggcacccagcaagtaaccgtacttggacaaactacacccagtgcaacgtaaacacgcacgagaaagtgaagacggccttgaacctattctacctcaccatcattggtcatggattgtcaattgcctctctgctgatttccttaggaatcttcttttattttaaatccctttcttgtcaaagaatcacgcttcacaaaaatctgttcttcagcttcgtgtgtaactccgtcgtgaccattatccacctgaccgccgtagcgaataaccaggcgctcgtggcgaccaatcccgtgtcctgcaaggtatctcagtttattcacctgtatctcatgggatgcaactatttctggatgctgtgcgagggcatctatctacatactttgatcgtggtcgccgtgttcgctgagaaacagcatctaatgtggtattactttctgggctggggcttccccttgattcccgcatgcatccatgccatagctcgcagcctgtattataacgacaattgctggatctcctccgatacacacctgctgtatatcatccacgggccaatatgtgcagccctcctggtgaacctcttctttctgcttaatatcgtgcgtgtgctgattacgaagctgaaagttactcaccaggcagagtccaatctttacatgaaggccgtgcgggctaccctcattctcgtgcccttactaggcatcgagtttgtgcttatcccctggcgccctgagggaaagatcgctgaagaagtctatgactacattatgcatattctcatgcactttcaagggctgctcgtctctacaatcttctgcttctttaatggagaggttcaagctattctacgcaggaactggaaccagtataaaattcagttcggcaattccttttctaactcagaggctctccgatcagcttcctacaccgtgagcaccattagcgatggcccaggatactcccacgattgccccagtgagcatctcaatggtaagagcatccacgatatcgagaacgtgttgttgaaacccgaaaatctctataactag

SEQ ID NO: 216516 - DNA, 114 bp, synthetic construct
  misc_feature 1..114: note = Description of Artificial Sequence: Synthetic coding sequence
  source 1..114: mol_type = other DNA
atggaaaaaaagtgcacccttaacttccttgtgctgctacctttttttatgattttggtgacagctgagctggaggagtcacccgaagactccatccagttgggggtcacctag

SEQ ID NO: 216517 - DNA, 237 bp, synthetic construct
  misc_feature 1..237: note = Description of Artificial Sequence: Synthetic coding sequence
  source 1..237: mol_type = other DNA
atggagaagaaatgcactctgaattttctcgtcttactgccttttttcatgattctggtgactgccgagttagaggaaagccctgaggacagcatacaattgggcgtgacacgcaataagatcatgactgcacagtatgaatgttatcagaaaatcatgcaggatcctatccagcaggcagaaggtgtgtactgcaatcggacctgggacgggtggctctgctggaacgatgtatag

SEQ ID NO: 216518 - DNA, 426 bp, synthetic construct
  misc_feature 1..426: note = Description of Artificial Sequence: Synthetic coding sequence
  source 1..426: mol_type = other DNA
atgggctttcagaagttttcccccttcctggccctgtcaatcctggtcctcttgcaagccggaagcctgcacgccgctccctttcggtccgcacttgagagctctccggctgaccctgctaccctcagcgaagatgaagctcgcctcctgcttgctgccctggtacagaactacgtccagatgaaggcctccgaattggagcaggaacaggaaagggagggctcttcactggacagccccagatcaaaaaggtgcgggaatttatccacctgcatgttgggaacttatactcaggatttcaacaaatttcacacattcccccagaccgccataggggttggtgcaccaggcaaaaagagagatatgtcaagtgatctggagagggatcaccgtccacatgtgtccatgcctcaaaatgccaattag

SEQ ID NO: 216519 - DNA, 426 bp, synthetic construct
  misc_feature 1..426: note = Description of Artificial Sequence: Synthetic coding sequence
  source 1..426: mol_type = other DNA
atgggtttccaaaaattttctccatttctggccctcagcattctggtcctgttgcaagcaggtagccttcacgctgccccattcagatcggcacttgaatctagccccgcagaccccgctacactaagtgaagatgaagctcggctgcttctagctgccctggtgcagaattacgtgcagatgaaggcaagtgaactggagcaggagcaagaacgcgagggttcctccctagacagtcctaggtccaagcgatgtggcaacctgtctacctgcatgttaggaacctatactcaagactttaataaattccatacttttcctcagaccgccatcggcgttggggcaccgggaaagaagagggacatgtcatcagacctggaacgggatcataggccgcacaaccactgcccggaagagagcctgtag

SEQ ID NO: 216520 - DNA, 387 bp, synthetic construct
  misc_feature 1..387: note = Description of Artificial Sequence: Synthetic coding sequence
  source 1..387: mol_type = other DNA
atgggcttccagaagttctccccatttctggccctatcaatcctggtcctgcttcaggctggctccctgcacgccgcaccctttcgaagcgccttggagagtagccccgcagaccccgctactttatcagaggacgaggctcgcctactattagccgcattggtccagaattacgtgcagatgaaagcatctgaattagagcaggagcaagagagagagggcagccgcattatcgcgcaaaagcgagcctgtgataccgccacctgtgtgacccatcgcctggcaggactcctgtctcgctcaggcggtgtggtcaaaaacaattttgtgcccacaaacgtgggcagtaaagcttttggcaggagacggcgagacttgcaggcatag

SEQ ID NO: 216521 - DNA, 426 bp, synthetic construct
  misc_feature 1..426: note = Description of Artificial Sequence: Synthetic coding sequence
  source 1..426: mol_type = other DNA
atgggctttcagaaattctcacctttcctcgccctctccatcctggttctactgcaagctgggagtctgcacgccgctcctttcagaagtgccctggagagtagcccagccgaccctgctactctcagcgaggacgaggctagattgctcctggcagcattagtacagaattacgttcagatgaaagcttcagagcttgagcaggagcaggagcgggaaggaagctcacttgattctccacggtccaagcggtgcggcaacctgtccacgtgtatgctgggcacctatactcaggattttaacaagttccacaccttcccgcagacagcaatcggtgtgggtgctcccggtaagaaacgggacatgtcatctgacctcgaaagggatcacaggccccacgtgtccatgccacaaaatgctaattag

SEQ ID NO: 216522 - DNA, 387 bp, synthetic construct
  misc_feature 1..387: note = Description of Artificial Sequence: Synthetic coding sequence
  source 1..387: mol_type = other DNA
atgggcttccaaaaattctccccatttcttgccttgagcatcctggtcttgttgcaggcaggatcactgcacgctgcaccttttcgaagcgctttggagtcctctcctgctgatcccgctacgctaagtgaagacgaagctcggctgctattggccgcactcgtacagaactacgtgcaaatgaaggcaagcgagctcgagcaggaacaagagcgtgaaggctccagaatcatcgctcagaaacgcgcatgtgacacagcgacgtgtgttacgcaccgccttgccggactcctcagtcgatcgggaggagtggtcaagaacaattttgtccctactaatgtgggttcgaaggcattcggcagacgcaggagggacctgcaggcatag

SEQ ID NO: 216523 - DNA, 384 bp, synthetic construct
  misc_feature 1..384: note = Description of Artificial Sequence: Synthetic coding sequence
  source 1..384: mol_type = other DNA
atgggatttcgcaaattctcgcctttcctggccctcagtatcctagtgctctatcaggcgggttccctgcaggccgcaccatttcgctctgcgctggagagcagcccagatcctgctacactctcaaaagaggatgccagacttttattggctgcattagtgcaagattacgtgcagatgaaggcttctgaactgaagcaggagcaggaaacccagggaagttcaagcgccgctcagaagagggcatgtaacacagcaacgtgcgttacccatcggctggccggactgctctcacggagcggcggaatggtcaaaagtaattttgtgcctacaaatgtcggctctaaagcattcggccgacgccgtcgcgatctccaagcatag

SEQ ID NO: 216524 - DNA, 417 bp, synthetic construct
  misc_feature 1..417: note = Description of Artificial Sequence: Synthetic coding sequence
  source 1..417: mol_type = other DNA
atgaaaaaagaagccaatcttcagaggggtggcatgggatttcggaagttttcccctttcttagctttaagcatcttagtcttgtaccaggccggaagcctccaggccgcaccattccggagcgctcttgaatcttcacctgaccctgccacactttcaaaggaggacgccagacttctgctggccgctctggtccaggactacgtccagatgaaggcctctgagctcaaacaagaacaggagacccagggatcaagtagtgcggcacaaaaacgagcatgcaatacagcgacatgcgtcacacatagactggctggtcttcttagtaggagtgggggtatggtcaagtctaattttgtgcctactaacgttggttcgaaggcctttggcagaaggcggagggatctgcaagcttag

SEQ ID NO: 216525 - DNA, 384 bp, synthetic construct
  misc_feature 1..384: note = Description of Artificial Sequence: Synthetic coding sequence
  source 1..384: mol_type = other DNA
atgggattcagaaagttttctcccttcctcgcactctctattcttgtcctttaccaggccggatccctgcaggctgctcccttccggtctgccctcgagtctagtccagatccagcgaccttgagcaaagaagacgctagactgctcttggcggcattggtgcaggattatgttcagatgaaggctagcgaattgaagcaagagcaggagacgcagggatcgtcaagcgctgcccagaagcgcgcttgcaatacggcaacctgcgtgacacaccgattggcaggtctgctcagccgtagcggagggatggtcaaatcgaatttcgtacctaccaatgtggggtctaaagcgtttggcagaagaaggagggacctgcaggcgtag

SEQ ID NO: 216526 - DNA, 1206 bp, synthetic construct
  misc_feature 1..1206: note = Description of Artificial Sequence: Synthetic coding sequence
  source 1..1206: mol_type = other DNA
atgccagttcaactgtctgagcatcctgaatggaacgagtcaatgcactcattacgtatttctgtaggtggactaccagtcttagcctctatgacgaaggctgctgatcccaggttccgtccaaggtggaaggtgattctaacgttctttgtaggagctgccatcctgtggctcctttgtagtcaccggccagctcccggacggccacccacccacaatgctcacaattggagattaggccaggcacctgccaattggtacaacgatacatatccactgtcaccacctcaacgcacccccgcagggattcgctacaggatagccgtaatcgccgacttggacactgagtctagagcccaggaggaaaatacttggttctcctacctgaagaagggatacctgacactttcagattccggcgacaaggtagcggtggagtgggacaaagaccacggagttctcgaatctcacctggccgagaaagggcgaggcatggagctaagtgacctgattgtatttaatggcaagctatatagcgtggatgacagaaccggggtcgtctatcaaatagagggttctaaagcggtcccgtgggtgatcctgagtgatggggatggcacagtggagaagggttttaaggcggagtggctggctgtgaaagacgagcgcctgtatgtcggcggattaggtaaggagtggaccacgacgacaggggacgtggtgaacgaaaacccagagtgggtgaaagtcgtgggatacaaaggatcagtggatcatgagaactgggtgtctaactataacgccctgagggcagcagccggtatccagccacctggatacctcatccatgaaagcgcatgttggagcgacaccctgcagagatggttttttcttcctaggagagcgtctcaggagagatactccgaaaaagacgatgagagaaagggcgcaaacctgttgctcagcgcgagccctgacttcggggatatcgcagtgagccacgtgggagccgtggttcctacccatgggttcagttccttcaagttcatccctaacaccgacgatcaaattattgttgcattgaagagcgaggaagattccgggagggtagccagctatatcatggccttcactctagatgggcgttttctgctgcctgaaactaaaatcgggtcagttaaatatgagggcatcgaatttatatag

SEQ ID NO: 216527 - DNA, 1053 bp, synthetic construct
  misc_feature 1..1053: note = Description of Artificial Sequence: Synthetic coding sequence
  source 1..1053: mol_type = other DNA
atgcccgttcagttgtcagagcacccagaatggaacgagtcaatgcactcactccgaatatcagtgggaggattgcctgtactggcaagtatgacaaaagccgcagacccacggttccggccaaggtccccccctcagcgcacacccgctggaatccggtatagaattgctgtcattgccgacttagacactgagtcaagggcacaggaagaaaacacatggttttcctacctcaagaagggctatctcactctttcagacagtggcgacaaggtggccgtggagtgggataaggaccacggagtactcgagtctcatctggctgagaagggtcgcggtatggaactcagcgacttgatcgtgttcaacgggaaactatattccgtggacgaccgaacaggagtggtttatcagatcgaaggaagcaaggcggttccctgggtgatccttagcgacggcgatggcacagttgagaagggtttcaaggctgagtggctagctgttaaagacgagcgactttacgtcggagggctaggaaaggaatggactacgaccacgggcgatgtcgtgaacgaaaaccccgagtgggtgaaagtcgtaggatataaaggcagcgttgaccatgagaactgggtcagtaactataatgccctgagggcagctgcgggaattcagccacctggttacttaatccatgagtcagcctgctggtccgacacactgcaacgctggttttttctgcctaggcgcgcttcacaggagcgctactccgagaaagatgatgagcgcaagggtgctaatttgctgctgagcgcctcacccgattttggagacatagctgtcagtcacgttggagccgtggtgccaacacatggattttcgtcgttcaagtttattcccaataccgatgatcagattattgtggccttgaagtcagaggaggactccggcagagtggccagctacataatggctttcaccctggatgggagatttctgctgcccgagacaaagatcggctcggtcaaatatgaaggtattgagttcatttag

SEQ ID NO: 216528 - DNA, 1206 bp, synthetic construct
  misc_feature 1..1206: note = Description of Artificial Sequence: Synthetic coding sequence
  source 1..1206: mol_type = other DNA
atgccggtgcaactgtcagagcaccctgagtggaatgagagtatgcactccctcaggatatctgtcggaggtttgcctgtcctggcttcgatgacaaaagccgctgatcctcggttccgacctcggtggaaagtgatactgacattcttcgtgggcgctgccatcctgtggttattgtgttcccaccgaccggctcctggccgaccccctactcataacgcacacaactggcggctgggacaggctcccgctaactggtataatgatacttaccctctgagcccaccacagaggacccccgcaggaatcaggtaccggatcgccgtgatcgctgatctcgacacagagtcacgggcacaagaggaaaatacctggttcagttacttaaagaaaggctatttaaccctctcagactctggtgacaaggtggccgtcgaatgggacaaagaccacggtgttctcgagtctcacctggccgaaaaaggaaggggaatggagctttcagacttgatagtgtttaatggaaaactgtactccgttgacgaccggacgggcgtagtttatcaaatagaaggcagcaaagccgtgccatgggtgatcctgtctgatggtgacggaacagtggagaaaggctttaaggcagagtggctcgcagtcaaagacgaaagactgtatgtgggtggactgggtaaagaatggacaacgacaacaggtgacgtggttaacgaaaaccctgagtgggtaaaagtcgtgggatacaaagggagtgtggaccacgaaaactgggtctcaaactataacgccctgcgcgcagcagctggaattcaacccccaggctacctcatccacgagtcggcatgttggtcggacacactgcaacgatggtttttccttcctcggcgtgcatcgcaggagcggtacagcgagaaggatgacgagcggaagggcgcaaacctattgttgagcgcatctcccgattttggcgacattgccgtaagtcatgtgggtgctgtggtgcctacccacggcttttcttcatttaaatttatcccaaacacagacgaccagatcattgtcgccctcaagagtgaggaagatagcgggagagtggctagctatataatggccttcacccttgacgggcgatttcttttgccagagaccaagataggctccgtcaagtacgaaggaatcgagtttatatag

SEQ ID NO: 216529 - DNA, 738 bp, synthetic construct
  misc_feature 1..738: note = Description of Artificial Sequence: Synthetic coding sequence
  source 1..738: mol_type = other DNA
atgcctgtgcagttgagcgagcacccagagtggaatgagtctatgcattccttaagaatcagcgtcgggggactccctgtgctcgcctccatgaccaaagccgcagacccacggttccgccctcgttggaaagtgattttgacattttttgtcggcgcagccatactgtggttactctgctctcacagacctgctcccggaaggcccccaactcacaatgcacacaactggaggttgggccaggcgccagctaactggtataacgatacctaccctctgagcccacctcaacgcactccggctggcatccgttatcgcatcgctgtgatcgcggatctcgacacagagtcccgcgcacaggaggagaacacatggttctcatacctgaaaaaagggtacttaacactgtccgactctggcgacaaggtggccgtggagtgggacaaagatcatggcgtattagagtcccatttagctgagaaaggcagggggatggagttgtctgatctgattgtgttcaacggtaagctgtattctgtggatgacaggacaggagtagtttaccaaatcgagggttccaaagcagttccttgggtgatcttatccgatggggatggaacagtcgaaaagggcgtcggcggagaatgggaagccgtgagagaaatagtccggaaacgctggcggctggtcaagcaggtctcccacgttggggtgctgggtcagtggatccagaggtag

SEQ ID NO: 216530 - DNA, 663 bp, synthetic construct
  misc_feature 1..663: note = Description of Artificial Sequence: Synthetic coding sequence
  source 1..663: mol_type = other DNA
atgggcaattgcgcgaaaaggccatggcgccgtggacctaaggacccactccagtggctgggttcacccccacggggatcctgtccatctcccagttcatccccaaaggagcagggtgaccctgccccaggggtccaggggtattcggtgctgaacagcctggttgggccagcttgcatcttccttcgaccttctattgctgctacccaactggatagggagcttcgacccgaagagatcgaagaacttcaggtcgctttccaggagtttgatagggatcgagatggctacatcgggtgccgagagctcggcgcttgcatgagaaccctgggctacatgcccactgaaatggagctgattgagatctctcagcaaatctccgggggaaaagtggactttgaggatttcgtcgagctgatggggccaaagctgctggctgagacggccgacatgatcggagtccgggaactgcgcgacgcgtttcgggagtttgacaccaatggggacgggaggatcagcgtgggagagctgagagcggcactgaaagccctgctgggggagagactctctcaacgtgaagtagacgaaattttgcaggacgtcgatcttaatggagatgggctggtggactttgaagaattcgtgagaatgatgtcccggtag

SEQ ID NO: 216531 - DNA, 1026 bp, synthetic construct
  misc_feature 1..1026: note = Description of Artificial Sequence: Synthetic coding sequence
  source 1..1026: mol_type = other DNA
atgcctttcccattcggtaaaagccacaagtcgcccgcagacatcgtgaaaaacctgaaggaaagtatggccgttcttgaaaagcaggacatctccgacaaaaaagctgagaaggccacagaggaagtatccaaaaatctagttgcaatgaaagagatcctgtacggaacaaacgagaaggaaccccagaccgaagccgtggctcagctcgcccaggaactttataatagcggcctgctcagcaccttggtcgccgacttgcagctaattgattttgaaggtaaaaaagacgtggcccagatcttcaacaacatcctgcggagacagattggcacacgaaccccgacagtggaatatatctgcactcagcagaacattttgtttatgttgctgaaaggctacgaatccccagagatagccttgaattgtggcatcatgcttcgggaatgtatccggcacgaaccactggctaagattatcctgtggtcagagcagttttatgactttttcaggtacgtcgagatgtcaacttttgatatcgcctccgacgcatttgcaacctttaaggacctgctgacccgacacaagttactgtcagccgagttcttggaacagcactatgaccgattcttctcagaatatgagaaacttctacacagtgagaattacgtgaccaagaggcagagtctcaagctgctgggcgaacttttgctagatcgccacaacttcaccatcatgaccaagtatatatccaagccagaaaacctgaagctcatgatgaacctgttgcgtgataagtctagaaacatccagttcgaagctttccacgtgttcaaggtcttcgtggccaacccaaataaaacccaaccaatcctggacatattactgaagaaccaagccaaactaatcgaattcctgtccaaattccaaaacgacaggactgaagacgaacagttcaatgacgagaagacctacctcgtgaagcagattagggacttaaagcgccctgcacagcaggaagcctag

SEQ ID NO: 216532 - DNA, 1026 bp, synthetic construct
  misc_feature 1..1026: note = Description of Artificial Sequence: Synthetic coding sequence
  source 1..1026: mol_type = other DNA
atgcctttcccatttgggaaatctcacaaatcccctgccgacattgtcaaaaacctaaaagaaagcatggccgtgctagagaaacaggatatctcggacaaaaaggcagaaaaagccacagaagaggtgagtaagaacctggttgctatgaaggagatcctgtacgggactaatgagaaagaaccacagaccgaagcggtggcccagctagcccaggaattatataattcgggattactctcaactcttgtggctgatctccagttgattgattttgaaggcaagaaggatgtagcgcagatcttcaataacatcttgaggagacaaatcggtacaaggacgcccacggtggaatacatctgtactcagcagaacattctctttatgttgttaaaaggttacgagtcccctgagattgccttgaactgtgggattatgctgagggaatgcatccgccacgaacctctcgccaaaataattttgtggtctgaacagttttacgacttctttaggtatgtggaaatgtcaacttttgatatagcctctgatgctttcgcaactttcaaagacctgctgactcgccacaagctgttgagtgcggaattcctggagcagcactacgacaggttttttagtgagtatgaaaagctactccacagtgaaaactacgttacaaagcgacagagcctcaagctcttgggggagctcctgttagacagacacaattttacaatcatgaccaagtacatctcgaagccagagaatctgaagttgatgatgaatctgctgcgagataaatcgcggaacatccaatttgaagctttccatgtttttaaggtttttgtcgctaacccaaacaagactcaacctatcctcgacatacttctgaagaatcaggctaagcttatcgagtttctgtccaaattccagaatgataggacagaggatgagcagttcaatgacgaaaagacctaccttgtgaaacagattagggacctgaagaggcccgcacagcaggaggcttag

SEQ ID NO: 216533 - DNA, 1026 bp, synthetic construct
  misc_feature 1..1026: note = Description of Artificial Sequence: Synthetic coding sequence
  source 1..1026: mol_type = other DNA
atgcccttcccttttggaaaatcccacaaatcccccgctgacatcgtaaaaaaccttaaagaatccatggcggttctggaaaagcaggatatttccgataaaaaagcagaaaaggctacggaagaggtgagcaagaatcttgtggccatgaaggagatcctgtacgggaccaatgaaaaagaaccccagaccgaggctgtcgctcagctcgcccaagaactgtacaatagcggccttctgtccacattggtggcagatttacaactgatcgactttgaaggcaagaaggatgtggctcaaattttcaacaatattcttaggcgtcaaattgggacccgcacgcccaccgtagagtacatctgcactcagcagaacattttgtttatgctccttaaggggtacgagtcaccagaaatcgcgctcaactgtggcattatgctgcgagaatgtataaggcacgagccactggcaaaaattatcctctggtcggagcagttttatgacttctttcgctatgtggagatgagtacttttgacattgcgtccgacgccttcgctacattcaaggatctgttaacaaggcacaaacttttgtcagccgagttcttggaacagcactacgataggttctttagtgagtatgagaagctgctgcattcagagaattacgttaccaagagacagtccctgaaactgttgggtgaactgttgttggaccgccataattttactatcatgactaaatacatcagcaaacctgagaatctcaagctgatgatgaacctcttgagggataagagcaggaacattcagttcgaggcgttccacgtattcaaggtattcgtggccaacccaaacaaaacgcagcctatcctagatatccttttgaaaaaccaggccaagctgattgaatttctaagcaaatttcagaacgaccggacagaggacgaacagtttaacgatgagaaaacataccttgtcaaacaaatccgcgaccttaagagacctgctcaacaggaggcctag

SEQ ID NO: 216534 - DNA, 1014 bp, synthetic construct
  misc_feature 1..1014: note = Description of Artificial Sequence: Synthetic coding sequence
  source 1..1014: mol_type = other DNA
atgaaaaagatgcccctgttttcgaagagtcacaagaaccccgcagagatcgttaaaatcctgaaagacaacctcgcaatactggagaagcaggacaagaagacagacaaggcatccgaagaggtgtccaagagtctgcaggcaatgaaggaaatcctgtgcggcacaaacgagaaagaaccgcctacagaagccgtggcccaactcgctcaggaactatactcttcaggcctgttggtgacacttatagctgaccttcagttgatcgactttgaaggaaagaaagatgttacgcagatctttaataacatcctgcgccgtcagatcggtacgcggtctcctaccgtggagtacataagcgcacatccccacatcttgttcatgttgttgaaaggttatgaagcccctcagattgccctgagatgcggcattatgctgcgcgagtgtatccggcacgagcctttggcaaagatcatcctctttagcaatcagtttcgggatttttttaagtatgtggaactttccacgtttgatatcgcaagtgacgcatttgctacattcaaggatctgctcacacgccataaagttttggtcgctgattttctggagcagaattacgataccatatttgaggattacgaaaaacttctacagtccgagaattacgtaacaaagagacaaagccttaagctactgggcgagttaatccttgataggcacaactttgcaatcatgactaagtacatctcaaaacctgagaaccttaaactcatgatgaatcttctaagggataaatcccctaacatacagtttgaagcgttccacgtcttcaaggtctttgttgcttctccccacaagactcaacctatagtggagatccttctgaagaaccagcccaaactgatcgagttcctgtcatcatttcagaaagagcggactgacgatgagcagtttgctgacgaaaagaactacctcattaaacaaatcagggacctcaagaaaactgcgccttag

SEQ ID NO: 216535 - DNA, 1014 bp, synthetic construct
  misc_feature 1..1014: note = Description of Artificial Sequence: Synthetic coding sequence
  source 1..1014: mol_type = other DNA
atgaagaagatgcctctatttagcaaaagccacaagaacccagcggagattgtcaagattctgaaagacaatctggcaatactggagaagcaggacaaaaagactgataaggccagcgaggaggtgagtaagtcccttcaagccatgaaggagattctgtgcggtacgaacgagaaagagcctcccaccgaggccgtggcccagctagcacaagaactctatagtagtgggctcctcgtgacactgattgccgatcttcagctgattgatttcgaggggaaaaaggacgtcacacaaatttttaacaacattctaaggcgacaaattggtacaagatcgcccactgtggagtacatttctgctcaccctcacatactgttcatgctcctgaaaggctacgaagctcctcagatcgcactgagatgtgggattatgctccgggaatgtataagacacgagcctcttgctaaaattattttgttttccaatcaattccgggacttcttcaaatacgtagaactctctacatttgacatcgccagtgatgcctttgctacatttaaagatctgctaacaagacataaagttctggtcgcagacttcctggagcagaactacgacaccatcttcgaagattacgagaaactcctgcagtccgaaaactatgtcactaaaagacaaagtctgaagctcctgggcgagctgattcttgacagacacaatttcgccatcatgactaagtacatcagcaaaccggagaacctaaagctgatgatgaacttattgagggataagagccccaacatccagttcgaagctttccacgtatttaaagtgttcgtggccagcccgcataagacacagcctatcgttgaaatcctgctcaaaaaccagcccaagctgattgagtttcttagcagtttccaaaaagagaggaccgatgacgaacagttcgcggacgaaaagaactatctgataaaacagatccgggaccttaagaaaactgctccttag

SEQ ID NO: 216536 - DNA, 945 bp, synthetic construct
  misc_feature 1..945: note = Description of Artificial Sequence: Synthetic coding sequence
  source 1..945: mol_type = other DNA
atgcctctttttagcaagagccataaaaatcctgccgaaatagttaagatcttaaaggacaaccttgcgattcttgagaagcaagacaaaaagaccgacaaggcatcagaagaagttagtaaaagcctgcaagcgatgaaggagatactgtgtggtaccaacgagaaggagcctccaactgaggctgtagctcagttagcccaagaactgtatagctccggcctgcttgtcacactgatcgctgaccttcagcttatcgactttgaggggaagaaagatgttacccagatcttcaacaacatcctccggcgtcagattggcactagatctccaaccgtggaatacatcagtgctcatccccacatcctgtttatgctgctgaaaggctacgaggctccacaaatcgcgctccgctgcggcattatgctgcgtgagtgtattcgccatgagccccttgccaagatcatcctgttctccaatcagtttagagacttttttaaatacgtcgagctgagcactttcgacatcgccagcgacgcatttgcaactttcaaaatattcgaggattacgagaagcttttgcagagcgaaaactacgttacaaagcgacagtcactgaagctactgggcgaactgatattggaccgccataatttcgcaatcatgactaaatatatctcgaagcccgagaaccttaaactgatgatgaacctactgagagataaatcccctaatattcagtttgaagccttccacgttttcaaagtgtttgttgcctccccccataagacacagccaattgtggaaattctgctcaaaaaccagcccaaactgatcgagttcttgtcctcatttcagaaggagagaacagacgacgaacagttcgctgatgagaagaactatctgataaagcagatacgcgatttgaagaagaccgccccttag

SEQ ID NO: 216537 - DNA, 282 bp, synthetic construct
  misc_feature 1..282: note = Description of Artificial Sequence: Synthetic coding sequence
  source 1..282: mol_type = other DNA
atgaagaagatgccgctgtttagcaagtctcataagaaccccgcagagatagtgaaaatccttaaggacaacctggccattctcgagaaacaagataagaaaaccgacaaggcctccgaagaggtgtccaagagcttgcaggctatgaaggaaattctctgtggaaccaacgagaaagagccacctacagaagccgttgcacagctggcccaggaactgtatagttcaggtctgctggtgaccctaattgcagatctgcagctcatagacttcgaggtctag

SEQ ID NO: 216538 - DNA, 1014 bp, synthetic construct
  misc_feature 1..1014: note = Description of Artificial Sequence: Synthetic coding sequence
  source 1..1014: mol_type = other DNA
atgaaaaagatgccccttttttctaagtctcacaagaacccagccgagattgtaaagatcctgaaagataacctggcaatcctggagaagcaggataaaaagaccgacaaagcctctgaagaggtgtctaagagtttgcaggcaatgaaagagatcttgtgcgggacaaacgagaaggaaccccctaccgaagcggtggcacaactagcccaagaactgtattcgtctggtctcctcgtgacgcttatcgctgatttgcagctcatcgactttgagggtaagaaagatgtgacacagatcttcaataatatactacggaggcagatcggcactagaagtcccacagttgaatacatttcagctcacccacacattctctttatgttattaaagggctatgaagcccctcagatcgctctacgttgcggcataatgttgcgcgaatgtatacgccacgagccactcgctaaaattatcctcttttcaaatcagttcagggacttcttcaagtatgtggagttatccactttcgacattgcatccgatgcctttgctacctttaaggaccttctgacacgccataaggtgctcgttgcagatttcttggagcagaactacgacaccatatttgaagactatgaaaagttattgcagagcgaaaattacgtgactaaaagacagagtctgaaactgctgggagagctgatcctggacaggcacaacttcgctattatgaccaagtacatttcgaagcccgagaaccttaaactcatgatgaacttactcagggataaatctcccaacattcagttcgaagctttccatgtgttcaaagtcttcgtggcttctccacataaaacgcagccaatcgtcgaaatacttctcaagaatcagcctaagctgattgagtttctgagtagttttcagaaagaaagaaccgatgatgaacagttcgctgacgagaagaactatctcatcaaacagatcagggatcttaaaaagacagccccttag

SEQ ID NO: 216539 - DNA, 1014 bp, synthetic construct
  misc_feature 1..1014: note = Description of Artificial Sequence: Synthetic coding sequence
  source 1..1014: mol_type = other DNA
atgaagaagatgcctctgttttccaaatcacataaaaatcctgctgagatagtgaagatcctgaaagataacctggctatcctcgagaagcaggataagaaaacagataaggccagcgaggaagtatccaaatctctccaggctatgaaagaaattctctgcggtactaatgagaaagaacctcccactgaagccgttgctcagctcgcacaagaactgtacagtagcggactcctggtgacactgatagcagatctacagctgatcgatttcgagggaaagaaggatgttactcagatcttcaataacattttacgaaggcagattggtacacgcagccctaccgtcgaatacatcagcgcccacccacatatactattcatgttgctcaaaggttacgaggccccacagatagctctgcgttgtggaatcatgctcagagagtgtatccggcatgaacctttagccaagataattctattctctaaccagtttcgggacttctttaagtatgttgagctgtcaacctttgacatcgcctctgatgctttcgcaacattcaaagatctactgaccaggcacaaagttctggtcgcagactttcttgaacagaattacgacacaatcttcgaagactatgagaaactgctccagagcgaaaactacgttaccaagcgccagtccctgaagctcctcggcgagcttatactggatcgacacaacttcgccattatgaccaagtatatctctaaaccagaaaatctgaagctaatgatgaaccttttgcgcgacaagtcaccaaatattcaattcgaggctttccacgtttttaaagtctttgtggcatcaccccacaagacacagcctatcgtggagatcctcctgaagaaccagcccaagctcatagagtttttatcctcctttcagaaagaacggacagatgacgagcagtttgcggatgaaaagaattacctcatcaaacagatcagagatctcaagaaaaccgctccctag

SEQ ID NO: 216540 - DNA, 387 bp, synthetic construct
  misc_feature 1..387: note = Description of Artificial Sequence: Synthetic coding sequence
  source 1..387: mol_type = other DNA
atgaagaaaatgccactcttcagtaagtcccataagaatcccgcagaaatagtcaagatcctgaaagacaacctggcaattctggagaaacaggataagaaaacagacaaggcaagcgaggaggtgtccaagagcctgcaggcaatgaaggaaattctgtgtggtaccaacgaaaaagagccccctacagaggccgtcgcacagttggcacaggagctgtattcttcagggctcctcgtcacccttatcgctgatctgcagcttatcgattttgaaggcaagaaagatgtcacccagatcttcaacaatattcttaggcggcagattggtacgcgttccccaaccgtagaatatatctccgcccacccacacatactctttatgtag

SEQ ID NO: 216541 - DNA, 567 bp, synthetic construct
  misc_feature 1..567: note = Description of Artificial Sequence: Synthetic coding sequence
  source 1..567: mol_type = other DNA
atgaagaaaatgcctctttttagcaaatctcacaaaaacccagctgaaatagtaaagatcttaaaagacaatttggccatccttgaaaagcaggataaaaagaccgacaaagcttctgaggaggtgtctaagagcctccaggccatgaaagagatcctgtgtggtaccaacgagaaggagccgcctaccgaagccgtggctcagttggctcaggaattatactcaagcggcctgctcgtcacattaattgctgacctgcagttaatcgactttgagggtaaaaaagatgttactcagattttcaataacattttgcggaggcagatcggaacccggtcgccaactgttgagtacatatcagcacacccacacatcctgttcatgctgctaaaaggctacgaagcacctcagattgctttgcgttgcggcattatgctcagggagtgtatcaggcatgagcccctcgcaaagataattttgttttccaatcagttcagagatttctttaaatatgtagaactgtcaacctttgacattgcctcagatgcttttgccacgtttaagtag

SEQ ID NO: 216542 - DNA, 828 bp, synthetic construct
  misc_feature 1..828: note = Description of Artificial Sequence: Synthetic coding sequence
  source 1..828: mol_type = other DNA
atgacgactgagcaggcacgcggtcagcagggcccaaatctcgccattggacgacagaaaccacctgcaggcgtggtgaccccgaagtcagacgctgaggaaccaccattgacccgcaaacggagcaagaaggagcggggattacgaggctctagaaaacgaacaggttcatccggcgagcaaactggacctgaagcccctgggagttctaataaccccccatctacaggcgagggccctgctggcgctccacccgcatccccgggacctgcatctagcagacagagccatagacatagaccagactcacttcacgacgccgctcaacgaacttacgggcctttgctcaaccgcgtgttcggaaaggatcgcgaacttggacccgaggaactcgatgagctgcaggcggcattcgaggagttcgacaccgaccgggacgggtacatatctcaccgagagctgggggattgtatgagaacgctgggatatatgcctacagaaatggaactcctcgaggtcagccagcacataaagatgcgaatggggggtcgcgttgacttcgaggagtttgttgaactgattggccctaaactcagggaagagacagcccacatgctcggcgttagggagttgaggattgcctttagagaatttgatcgggacagagacgggaggattacagtggccgagttacgagaggcagtccccgctcttcttggggaaccacttgcaggacccgagttagatgaaatgcttagggaggtggacctgaatggtgatgggacagtggatttcgatgaattcgtcatgatgctctcgcgccactag

SEQ ID NO: 216543 - DNA, 513 bp, synthetic construct
  misc_feature 1..513: note = Description of Artificial Sequence: Synthetic coding sequence
  source 1..513: mol_type = other DNA
atgacggaaccatggctggcgctcggcacctcctggacgctacccctgcaagaccgggagttaggccctgaggagctcgatgagctgcaggcagccttcgaagagtttgatacagaccgagacggatatataagccacagggagctaggggattgtatgcgcactctcggctacatgcccaccgaaatggaattgctggaggtgagccaacacatcaagatgcgcatgggtggacgggtagacttcgaggagtttgttgaactgatcggaccaaaactgcgggaagagacagctcatatgcttggagtgagggagctgcgtatcgccttcagggaatttgaccgtgatcgtgacgggagaatcaccgtggccgagctacgtgaggcggtccccgcactgctgggagagccattagctgggccagaactagacgagatgttgcgagaagtggacctgaatggcgacggcacagttgactttgatgagttcgtcatgatgctctcccgccattag

SEQ ID NO: 216544 - DNA, 522 bp, synthetic construct
  misc_feature 1..522: note = Description of Artificial Sequence: Synthetic coding sequence
  source 1..522: mol_type = other DNA
atgcagttccccatggggcctgcctgcatttttctcagaaagggtatagcggaaaagcagcgcgaacgcccacttggccaagacgagatcgaagagttgcgagaggcattcctcgaatttgataaggacagggatggcttcatctcctgtaaggacttgggtaatctcatgaggaccatgggctacatgcccactgagatggagctcatagaactgggtcagcagatcagaatgaacctgggcggaagggtcgactttgatgactttgtcgaacttatgacaccaaagctcctcgcggaaacagctgggatgatcggagtccaggaaatgcgcgacgccttcaaagaatttgatacgaatggcgatggcgagatcaccctggtcgagttgcaacaagcgatgcagagactgctcggtgagagactgacccctcgggaaatatctgaggtggtccgagaggctgatgttaatggcgacgggactgtagatttcgaggagtttgtgaaaatgatgagtaggtag

SEQ ID NO: 216545 - DNA, 846 bp, synthetic construct
  misc_feature 1..846: note = Description of Artificial Sequence: Synthetic coding sequence
  source 1..846: mol_type = other DNA
atggaaaagagcaccgacactgacgaagataacgtgactcggacggaatacagtgacaagacaacacagtttccctctgtgtacgcagtccctgggacagagcagacggaggctgtgggcggattgagttcaaaaccggcaacccccaagactacaactcccccttcatcccctcctcccacagctgtgagtccagagtttgcatatgtgccagcagaccctgcacaactggcagcgcagatgctggccatggcgacatccgagcggggtcagcctccaccatgttcaaacatgtggaccctgtactgtctgactgacaagaaccagcagggacatccgtcacctccccctgcccctggtccatttccacaagcaacattatatttgcccaaccccaaggatcctcaatttcagcagcatcccccaaaagtgacatttccgacctacgttatgggtgacacgaaaaagacttcagcccctccatttattctggtcggttcaaatgtccaggaagctcagggctggaagccgctgcctggacacgcggtcgttagccagagtgacgtgctgcgatacgtggcaatgcaggtccctatcgccgttcctgcggatgagaaataccagaagcacacattatcccctcaaaacgctaaccctccaagtggtcaggacgtgcccagacccaaaagcccagtcttcctttctgtggccttcccagtggaggatgtcgcaaaaaagagtagcgggtccggtgacaagtgtgcaccgttcggatcatacgggatcgcgggagaagtcacagttaccactgctcacaagagaaggaaggccgagaccgagaactag

SEQ ID NO: 216546 - DNA, 1188 bp, synthetic construct
  misc_feature 1..1188: note = Description of Artificial Sequence: Synthetic coding sequence
  source 1..1188: mol_type = other DNA
atggagaaatccacagataccgatgaggacaatgtaacccgcactgaatactcggataaaaccacccagtttccctcagtgtacgccgtgcccggaaccgagcagacggaagcagtgggcggactgagtagtaaaccagcgacacctaaaactaccacacctccttcttcacccccacctaccgccgtttctccggagtttgcctacgttccagccgaccccgcacagcttgcggcacaaatgttgggtaaggtaagcagtatccatagcgatcagtctgatgtgttaatggtagacgtggcaacctctatgccggtcgtgattaaggaggtgccaagcagtgaggcggcagaggacgtgatggtcgctgccccacttgtgtgtagcggcaaagtgcttgaagttcaggttgtcaatcaaacatcagttcacgttgatctgggatctcagcccaaagagaatgaggccgaaccatcaaccgcttcgagcgtgccactgcaggacgagcaggagccaccggcttacgatcaggctcccgaggtgactctacaagctgatatcgaggttatgtctaccgtccatatttccagcgtgtacaacgatgtaccagttaccgaaggtgtggtttatatcgagcagctcccggaacaaattgtaatcccttttaccgatcaagttgcctgtctgaaggagaacgagcagagtaaggaaaatgagcaaagtcctcgcgtgtcccccaagtccgtggtcgagaaaacaactagcggtatgagcaagaaaagcgtcgagtcagtcaagttagcgcagttggaagagaatgcgaagtattccagcgtttatatggaggctgaggctacagctctgctgtccgacaccagtctgaagggccaacccgaagtgcctgcgcagctgttggatgctgagggtgcgattaagattggctccgaaaaatctctccatcttgaagtagaaattacaagcatcgtcagcgacaatacgggccaggaggagagcggggagaactctgttcctcaggagatggaggggaagcctgttctatctggcgaggctgctgaggccgttcatagcggcacttctgtgaagtccagtagcggaccattccctcctgcgccagaggggttgaccgcacctgaaatcgaaccagagggagaatctaccgctgagtag

SEQ ID NO: 216547 - DNA, 1140 bp, synthetic construct
  misc_feature 1..1140: note = Description of Artificial Sequence: Synthetic coding sequence
  source 1..1140: mol_type = other DNA
atgatcagcagcaagccgagactggtagtcccctacgggctgaaaacccttctggaagggatctctcgggcagtactgaaaacaaatccaagcaacatcaatcagttcgccgctgcctatttccaggagctcacaatgtatcgcggaaataccaccatggacatcaaggacttagtgaaacagtttcaccagataaaagtcgagaagtggagtgaggggacgaccccacagaagaagctggagtgcttaaaagaacctggcaaaacaagcgtggagagcaaggtgcccacccaaatggaaaaaagcacggatacggatgaggacaacgtcactagaactgagtatagtgataagacgacccagttcccgtccgtctacgccgttcctgggactgagcagaccgaagcggtgggcggtctctcaagcaagccggctacccctaaaactacaacccctcctagcagcccaccccctacagcggtgtcccccgaattcgcatatgtgcccgcagatcctgcccaactcgctgcccagatgctcgctatggccacatctgagagagggcagcctcccccatgcagcaacatgtggaccctgtactgtttgacggataagaatcaacagggtcacccatccccgcctccggcacccggtccattcccccaggcaacactttacctgccaaacccaaaagatccgcaatttcaacaacaccctccaaaggtgacctttccgacctatgtgatgggtgacaccaaaaaaacttccgcgccacctttcatattagttggcagtaatgtgcaggaggctcagggttggaagcccttaccgggtcacgcggtggttagtcaatccgacgtgctcagatatgtggccatgcaggtgccaatcgctgtacccgctgacgagaaatatcagaagcacaccctgagcccccaaaacgccaatccaccaagcggtcaggacgtgccacgcccaaagtcacccgttttcttaagtgttgcttttccggtcgaagacgtggccaaaaaatccagcggatctggggataagtgcgctccatttggcagctacggaatagccggagaagtcacagtgaccacagcccacaagagacgaaaagctgaaacagagaattag

SEQ ID NO: 216548 - DNA, 1140 bp, synthetic construct
  misc_feature 1..1140: note = Description of Artificial Sequence: Synthetic coding sequence
  source 1..1140: mol_type = other DNA
atgatctccagcaagccacgcttggtggtgccttacggcctgaagacgctcctggaaggcatcagcagagccgttcttaagacaaacccatcgaatataaaccagttcgcagcagcgtatttccaggaacttaccatgtacaggggaaacactaccatggatataaaagatttggtaaagcagttccaccagatcaaggtcgagaagtggtctgagggaaccactcctcagaaaaagctggagtgtttaaaagaaccagggaaaaccagcgtggagagtaaggttcctacccagatggagaagtcaaccgacaccgacgaagataatgtaacccggaccgagtattccgacaaaaccacacagttcccgtcagtgtatgccgtgccgggaacagagcagaccgaagctgtgggaggtctgagctccaaacctgcaactcccaagactactaccccccctagctcgccgccacccaccgccgtctctcctgaattcgcgtacgtgcccgctgatcccgcacagctggctgctcagatgcttgccatggctacctcagaacggggacagcccccaccatgcagtaacatgtggaccttatactgtcttacagacaaaaaccagcaaggacatccctctccaccaccggcacctggacctttcccacaggcaaccctgtatctgcctaacccaaaagacccccaattccaacaacatccccctaaagtaacttttcccacgtacgtcatgggtgacaccaagaaaacatctgctcctccgtttatactggtgggctcgaacgtgcaagaggctcagggatggaagcccctgcccggtcacgcagttgtgtcccagtctgatgttctacggtatgtggccatgcaggtcccgatcgccgtgcctgcagatgagaaatatcaaaaacacactttatctcctcaaaatgctaatccgccatctgggcaggatgtgccgagaccgaagtcaccagtctttctttccgtggctttccctgtggaagatgttgcaaagaagagctccgggagcggagataaatgtgctccatttggctcatatggcattgccggtgaagtgacggtgactactgctcataagagacgcaaggctgaaacagagaattag

SEQ ID NO: 216549 - DNA, 666 bp, synthetic construct
  misc_feature 1..666: note = Description of Artificial Sequence: Synthetic coding sequence
  source 1..666: mol_type = other DNA
atgatctcaagtaagcctcgcctggtggtgccgtacgggctcaagactctgctggaaggtatatcacgcgctgtgcttaaaaccaacccttcgaatatcaaccagtttgccgctgcttactttcaggaactgacgatgtaccgaggcaacaccaccatggatattaaggatctggtgaaacagtttcaccagatcaaggtagagaaatggtctgaaggcaccacaccacaaaaaaagctggagtgcctgaaggagcccggaaagaccagtgtagagtcaaaagtccctacacagatggagaaatctaccgacaccgatgaagataacgtgactcgaaccgagtactctgacaagaccacacaattcccttctgtctatgcagtgccaggcactgaacaaaccgaggccgtcggaggattgagtagcaagccggctacacccaaaactactacgccacctagcagtccaccgccaacagctgttagtccagagtttgcatatgtgccagccgatcctgctcagttagccgctcagatgctggaagacgttgcaaagaagtcctcgggatcaggcgacaaatgcgctcccttcggcagttatggtatagctggggaagtgacggtaactactgctcacaagagaagaaaggctgagacagaaaactag

SEQ ID NO: 216550 - DNA, 1482 bp, synthetic construct
  misc_feature 1..1482: note = Description of Artificial Sequence: Synthetic coding sequence
  source 1..1482: mol_type = other DNA
atgatttcatcaaaacccaggctggtggtgccatatgggctgaaaaccctgcttgaggggataagtagggccgtgctgaagactaacccatccaacataaaccagttcgccgcagcatacttccaggaacttacaatgtaccggggtaacactacaatggacatcaaggaccttgtgaagcagtttcaccagatcaaagtggagaaatggagcgagggaacaacaccccagaaaaagctggagtgtctcaaggagccgggtaaaaccagcgtggaatccaaggtgccgacacaaatggagaagtccaccgatacagacgaggacaacgttactcgcaccgagtatagcgataagactacccagtttccctccgtgtacgccgtcccaggaaccgagcaaacagaggctgtaggagggctgagttcgaaacccgcaacaccaaaaactacaacaccccctagcagtcctcccccaactgcggtctccccggaattcgcatacgtacccgcagatcctgcacaactcgccgctcaaatgctgggtaaagtgtcctcgatccactccgaccaatccgatgtgctgatggtcgatgtggccaccagtatgcccgttgtgattaaagaagtaccatcctccgaagcagcggaagacgtaatggtagctgctcctctcgtgtgttctggcaaggtcctggaagtccaagtagttaatcagaccagcgtgcacgttgatttaggctcacagcccaaagagaacgaagctgaaccatcaactgcatcatccgtgccacttcaggatgagcaggagccgcctgcatacgaccaggccccagaagtgactctgcaggcggacattgaggtaatgtcaactgtccacatttcctctgtctacaacgatgtgcctgtgacagagggcgtcgtatatattgagcagctgcccgaacagattgtaattccctttaccgaccaggtggcctgtctcaaagaaaatgaacaatccaaagagaacgagcagtcacctcgggtctctcctaaatctgtggtagagaagacaacatctggcatgtccaaaaaatctgtggaatcagtgaaactggctcagctcgaagagaacgcaaagtattcctctgtctacatggaggccgaggcgaccgccctgctcagcgatacttctctgaaggggcagcccgaggtgcctgcacaactcctcgacgctgagggcgctatcaaaatcgggagtgagaaaagcctacatcttgaagtggaaatcacaagtatagtttcggacaacacagggcaggaggagagcggagaaaattctgttcctcaggagatggagggaaaaccagtgctgagcggggaagcagctgaagccgtgcattctggcacatccgtgaaatcaagcagcgggccattccctccggcacccgagggacttacggctcccgagattgagccggagggtgagtcaaccgccgagtag

SEQ ID NO: 216551 - DNA, 1428 bp, synthetic construct
  misc_feature 1..1428: note = Description of Artificial Sequence: Synthetic coding sequence
  source 1..1428: mol_type = other DNA
atgataagttccaagcccagactggtcgttccctacgggttgaagacactgctggagggaatttcgagggccgtcctgaaaacaaacccgagcaacatcaaccagtttgctgccgcatattttcaggaacttacgatgtacagagtggagaagtggtcagaggggacgacaccacagaagaaactcgagtgccttaaagagcctggaaagacttctgtggagagcaaggtacccacacagatggaaaagtccactgacacggacgaggacaatgtgacacggacagaatatagcgacaagaccactcagtttcctagtgtgtatgctgtccctggtactgagcaaaccgaggctgtgggcggattgagtagcaagcccgctacacccaagactaccacaccgccatcatccccacctcccacagctgtttcccccgaattcgcatacgtgcctgctgatcccgcacagctggccgctcaaatgctgggcaaggtgagcagcattcacagtgaccagtctgacgtgcttatggtggacgtcgcgacgagcatgccagttgttatcaaagaggtgccttcgtcagaggcggcagaggatgttatggtagctgcaccactggtctgttcaggcaaggtactggaagtccaagtggtgaatcagacttccgttcacgtagatctgggcagccaaccaaaagagaatgaagccgagccttcgaccgcgtctagtgttccccttcaggacgagcaggagccacctgcgtacgaccaggctcccgaggttacactgcaggccgatattgaagtaatgagcactgtacatatctcctccgtgtacaacgatgtgcccgtaactgagggcgttgtttacattgaacagctccctgaacagatagtgatccccttcacggaccaagtggcttgccttaaggaaaacgagcaatcaaaggagaacgagcaatcgccacgagtgtctcctaagagcgtggtggagaagacaacctcaggaatgagcaagaaaagcgtagagtccgttaagctggcccagcttgaagaaaatgctaaatactcttctgtgtatatggaggctgaggcgaccgctctgttgagtgacacctccttgaaggggcagcctgaagtgcctgcccaactgctggatgctgaaggggcaattaagatcgggtccgagaaaagccttcaccttgaggttgagatcacgtcaatagtgagtgataacactggacaggaggagtccggcgagaactctgtgccccaggagatggagggcaagccagtcctgtccggggaagcagcagaagctgtgcacagcggaacttctgtgaaaagctcaagtggcccatttccccctgcccctgagggtctcacggccccagaaatagaaccagaaggcgagtcaaccgcggagtag

SEQ ID NO: 216552 - DNA, 1452 bp, synthetic construct
  misc_feature 1..1452: note = Description of Artificial Sequence: Synthetic coding sequence
  source 1..1452: mol_type = other DNA
atgtcattctccgactcttcagcaactttcctccttaatgagggcagtgcagacagttacaccagcaggccaagtctcgactctgacgtctcccttgaagaagatcgcgagtctgccagacgagaggttgagtcccaggcccagcagcagctcgaacgggcaaagcataagcccgttgccttcgcagttagaacaaatgtgagctactgtggggtgctggatgaagaatgcccagtgcagggctccggcgtgaatttcgaggcgaaggacttcctgcacatcaaggagaaatacagcaacgattggtggatcggtcgcctggtcaaagaaggaggcgacattgcattcatcccgagtccgcagaggctggagtctattcgcctgaaacaagagcagaaggctaggaggtctggaaacccatctagcttgagcgacattggcaaccggagaagccctcctcccagcttggctaaacaaaaacagaagcaggctgagcacgtacctccctatgacgtcgtgccctccatgcgcccagtcgttctggtcggcccatccctgaaaggatacgaggtgacggatatgatgcagaaggccctctttgacttcctgaaacaccgcttcgatgggaggatttctatcacccgggtgacagcggatctctccctggctaagaggtccgtgctgaacaacccaggaaagcgcaccataatcgagagatcaagcgcccgaagcagtatagcagaagtgcagagcgaaattgaacgcatatttgaactggcgaaatccctccagctcgtagtgcttgacgcagacacaatcaaccacccggctcaattggctaagacctccctggctcctatcattgtgttcgtgaaagtaagttcccccaaagtgctgcagcgacttatccgctccagaggtaaatcccagatgaaacatctgaccgtgcagatgatggcctacgataagctcgtgcaatgccccccagagtcctttgacgtcatactggacgagaaccaactggaggacgcgtgcgaacacctggcggagtatttagaagtatattggcgggcaacgcaccatcccgctcccggacccggtttgctcgggcctccaagtgcaatacctgggctgcagaatcaacagcttctgggcgagcgaggggaagagcactctccactcgaaagggactcactgatgcccagcgacgaggctagtgagtcatcaagacaagcttggactgggtcctcacagaggagttccagacatcttgaggaagactatgctgatgcctatcaggacttatatcagccacaccgccagcataccagtgggctgccgtctgctaatggacatgacccacaggataggctgctagcacaggattccgaacataatcatagtgataggaattggcagcgcaataggccttggcctaaagatagctactag

SEQ ID NO: 216553 - DNA, 1416 bp, synthetic construct
  misc_feature 1..1416: note = Description of Artificial Sequence: Synthetic coding sequence
  source 1..1416: mol_type = other DNA
atggagggaagtgctgattcttatacctcgcgcccttccttggactccgatgtttctctggaggaagacagagagagcgctcggcgtgaggttgaaagtcaagcgcagcaacaactagagcgcgcaaagcacaaacctgtcgcttttgcggtgaggaccaacgtgtcttactgcggggtgctggacgaggagtgccccgtgcaggggtccggcgtgaattttgaggccaaggatttcttacacatcaaggaaaagtattccaatgattggtggatcggcaggctggtgaaagagggtggggatattgcctttattccgagtccacaacgactggagagcatccggctcaagcaggagcaaaaggctaggcgcagcggcaacccaagttcattgagtgatatcggaaaccgcagatccccaccaccaagcctggctaagcagaaacagaagcaggccgaacacgtgcccccttatgacgtcgttccatcaatgagaccagtggtgctcgtgggcccttccctgaaaggatacgaagttaccgacatgatgcagaaggctctcttcgattttctcaagcacagattcgatggacggatttctatcacaagggtcaccgccgatctgtctctcgcaaaacggtccgtccttaacaatccgggaaagcgcacgattattgagaggtcatcggccagatcctctatagctgaggtgcagtcagagatagaacggatttttgagctggccaagagcctccagctcgtcgtccttgatgccgataccataaatcaccctgcacagctggccaagacatcactggcccctatcatcgtgttcgtgaaggtgtcctccccaaaagtattgcagcgattaatccggagccgaggcaaatcccagatgaagcacctgaccgtgcaaatgatggcatatgataagctggtccagtgccccccagagagctttgacgtgattttagatgaaaaccagctagaagatgcatgtgagcatctggccgagtaccttgaggtgtattggcgcgctactcatcaccctgctccaggaccagggctcctgggacctccttccgcgattccaggtctccagaaccaacaattgctgggtgaacggggagaggagcattcccctctggagcgggattctctcatgccttccgacgaggcctcagagtcctccaggcaggcttggaccgggtccagccagagatcaagccgacacctcgaagaggactacgccgatgcttatcaggacctgtaccagcctcatcggcaacacacaagtggtttaccgtcagcaaacggtcacgatccacaggacaggctgctggcacaggacagcgagcacaaccactccgatcgcaattggcagagaaataggccatggcccaaggactcgtattag

SEQ ID NO: 216554 - DNA, 1332 bp, synthetic construct
  misc_feature 1..1332: note = Description of Artificial Sequence: Synthetic coding sequence
  source 1..1332: mol_type = other DNA
atgtacgacgacagttacgtaccagggtttgaggactccgaagctgggtccgcagatagctatacgagccgtcctagtctggactccgacgtctctctggaagaagatagagaaagcgccagacgtgaagtggagtcccaggcccagcagcaactggagcgtgctaagaaatactcaaatgattggtggatcggaagactggttaaagaaggcggagacatcgcattcatcccaagtccccaacggttagagtcaatcagactgaaacaggagcagaaagcccgaagatccggaaatccatccagtctgtccgacatcggcaatcgccgaagtcctccaccctctcttgccaagcagaagcagaagcaggccgagcacgtaccaccctacgacgtggtcccctcaatgagaccggtggtactggtgggcccatccttgaaaggttacgaggtgaccgatatgatgcagaaagctctgtttgacttcttgaaacaccggttcgacgggaggatttccatcacaagggtgacagcagatctgtcactggctaagcggtcagtcctgaataaccccggtaagagaaccatcattgaaaggtcttccgcaagaagcagcattgccgaggtgcagtccgaaatcgagaggatttttgaactggcaaagagcctgcaactggtggtgctggacgccgataccataaatcatcccgcacagctcgctaagacatccttagctccaattatcgtgtttgtcaaagtatcatctccaaaagtgctccagcgcctgattagaagtcgcggaaagtcccagatgaagcacttgacagtccaaatgatggcgtacgacaaactggtgcagtgtcccccagaaagctttgacgtcattcttgatgaaaaccaattggaggacgcttgcgagcacctggcagagtatctggaagtgtattggcgagccacacatcatccggcaccgggacccggtctgctcggccctccttccgctatcccaggactgcagaaccagcaactgttaggggagaggggagaagagcactccccactcgagcgcgactctttaatgccaagtgatgaagcgagtgaatcgagtcgccaggcttggacagggagctcacagcgcagctcacgccatctggaagaagactatgcagatgcctaccaggatctgtatcagccacaccggcagcacaccagcggtctacctagcgcgaacgggcatgacccccaggataggctgctggcgcaggatagcgaacataaccacagtgacaggaattggcagcggaacagaccctggcccaaggattcctactag

SEQ ID NO: 216555 - DNA, 1377 bp, synthetic construct
  misc_feature 1..1377: note = Description of Artificial Sequence: Synthetic coding sequence
  source 1..1377: mol_type = other DNA
atgtcctcaagctcatatgcaaaaaatggaacagcagatggtcctcactctccaacctcgcaggtggctaggggcactaccaccaggagaagccggttgaagcggtccgacgggtccaccaccagtacctcatttattctgagacagggcagcgctgatagctatacaagcaggccatctgattccgacgtcagcctggaggaagacagggaggccatacgccaggagcgcgaacagcaggccgctatccagctggagcgcgcaaagtcaaaacctgtggccttcgccgtcaagacgaatgtaagctactgcggggctctcgatgaagatgtgcccgtaccgagtactgcgatctcttttgacgctaaggatttccttcatatcaaggagaaatacaataacgattggtggatcgggcgactggtcaaggagggctgcgagatagggttcattccgtcccccctccgtcttgagaacatcaggatccagcaagagcagaagaggggaaggttccacggaggtaagtccagcggcaattcctctagctctttgggggaaatggtgtcgggcacctttcgggctacaccaaccagtacagccaagcagaagcagaaggttacagagcatattccgccttatgatgtggtgccgtctatgaggccggttgtcctcgtcgggcctagtcttaaagggtacgaggttaccgatatgatgcagaaagcactgttcgatttcttaaagcatcgctttgatggacgaatatcgattacgcgcgtgacggcggacattagcctcgctaagcgctctgtcctgaacaatccttccaaaagggctataatcgaacggagcaatacccggagttccctcgccgaggtccaaagtgaaatcgaacgaattttcgaactcgctcgaagcctgcagctagtggtgctggatgcagacaccatcaaccatccagctcaattaatcaagacctctctggcccctataatcgtccatgtcaaagttagctcccccaaagtccttcagcggctgattaagtctagggggaaatcacaatctaaacatctcaatgtgcagctcgttgctgcagataaacttgcacagtgccctccctctcagcggatgcgccactctaaccattccactgagaacagccctatcgagcgcagatccctaatgacatctgacgagaactatcataacgaacgagccaggaagtcacgaaatcgcctttcgagcagttcacagcattccagagatcattatcccctcgtggaggaagactatccagattcctaccaggacacctacaagccccaccgaaaccgcggttctcccggagggtattcccatgattctcgccaccgtctctag

SEQ ID NO: 216556 - DNA, 1509 bp, synthetic construct
  misc_feature 1..1509: note = Description of Artificial Sequence: Synthetic coding sequence
  source 1..1509: mol_type = other DNA
atggatgtggtagctaggggcaccacaaccagaaggtccagacttaaacggtccgacggctcgactacctcaacttcatttattcttcgacagggcagtgcagatagctacacctctcgcccttccgattctgacgttagtctggaagaggacagggaggcaatccgccaggagcgcgaacagcaggcggctatccaactggagagggcgaaaagcaagcctgtcgctttcgccgtgaaaacaaatgttagctactgcggcgcacttgatgaggacgtccccgttccatctactgctatcagcttcgatgcaaaggattttttgcacattaaggagaaatacaacaatgattggtggatcggaaggctggttaaagagggatgtgagatcggtttcattccctcccctttgcggctggagaatattcggattcagcaagagcagaagcgcggacggttccatggcggtaagagttcagggaacagttcatcatcccttggcgaaatggtgtccggtacatttagagcaacgcccacttccacagcaaaacagaaacaaaaggtgaccgagcacatccccccttacgacgtggtgccaagcatgcgtcccgtggtcctggttggcccaagtcttaagggttacgaggtcactgatatgatgcagaaggcactcttcgactttctgaaacacaggttcgacggacgcatcagcataaccagggtgacggctgatattagccttgccaagcgttctgtattaaataatccctctaagagagcaatcatcgaacggtccaatacaaggtcttctctggcagaggtgcagtctgagattgagagaatcttcgagcttgctagatctctgcagctggtggtgctggacgctgacactatcaaccaccctgcccagttaattaagaccagtctagccccaattatcgtgcacgtcaaggtctctagccctaaggtgctgcagagactcatcaaatctagggggaaatctcagtcaaagcatttgaatgtccagcttgtggccgctgacaagctggcgcagtgccctcccgagatgtttgatgtgattctggacgaaaatcagctcgaagacgcctgcgaacacctgggagagtacctcgaagcatactggcgtgccacccataccacctcttcaactcccatgactcccctgttgggacgcaacttgggttcaactgccctgagcccttaccccaccgccatctcagggcttcagagccagcgcatgcgacactctaatcactcgacagaaaatagcccaattgagcgtagatctctcatgacttctgatgaaaattaccacaatgaaagggctcgcaagagcaggaataggctgtcatcctcttctcagcacagcagggatcactaccccctggttgaagaagattaccctgactcttaccaggatacgtacaagccccatcggaataggggatcgcccggaggttacagccatgactctagacatcgcctctag

SEQ ID NO: 216557 - DNA, 3438 bp, synthetic construct
  misc_feature 1..3438: note = Description of Artificial Sequence: Synthetic coding sequence
  source 1..3438: mol_type = other DNA
atggccgtgccagcccgaacctgcggggcatcaagacctggacctgccagaaccgccagaccatggcctggttgtgggcctcaccctgggccaggcacccgacgcccaacctcagggccacctaggcctctatggctgttgctgccactcttgccgttgctggccgcaccgggtgccagtgcgtattcgttccctcagcagcacactatgcagcactgggccaggcggctggagcaggaagttgacggtgttatgcgcatatttggtggagtgcaacagctaagggagatctacaaggataatagaaatctgtttgaggtgcaggagaacgaaccccaaaagctggtggagaaggtggccggtgatattgagtctctcctagatagaaaggtacaggctctaaagaggctggccgatgccgctgagaatttccagaaagcacaccggtggcaagacaatattaaggaagaggacatagtatactatgatgctaaagctgatgctgagctagatgatcccgagagtgaagacgtggagcggggatccaaggcatcaacccttagactggacttcatcgaggacccgaactttaaaaacaaggtgaattacagttacgcagctgtacagatccccaccgacatctacaagggctcgactgtgattcttaatgagctgaattggacagaggcacttgagaacgttttcatggagaaccgacgccaggatccaactctcctgtggcaggtctttggatctgccaccggtgtgacgcgatattacccggctactccctggagagctccgaaaaaaatcgatctttacgacgtccgccgtaggccatggtacattcagggagcttcaagtccgaaggacatggtgataattgttgacgtctcgggatccgtttcaggtctgaccctgaagctgatgaaaaccagcgtgtgcgaaatgttagataccctatccgatgatgactatgtgaatgtagcaagcttcaacgagaaggcgcaacccgtttcatgttttacccatctggtgcaagccaatgtgaggaacaagaaggtgtttaaggaggctgtgcagggcatggtagctaagggtacaaccgggtacaaagcaggattcgaatacgcctttgaccaacttcagaactcaaatattacccgtgctaactgcaacaaaatgatcatgatgtttaccgatgggggagaggaccgtgtgcaggatgtattcgagaagtacaactggccaaacagaacagtacgtgtttttaccttttcagtggggcaacataactacgacgttactccactgcagtggatggcttgtgctaacaaagggtattatttcgaaataccctcgatcggggctatccgaatcaacacccaggagtacttggacgtgctcgggcgacccatggtgctggccggtaaagaagcaaagcaagttcagtggacaaacgtgtatgaggatgccctcggactgggcctagtggtcactggtaccctgcccgtcttcaatctgacacaggatgggcctggagagaagaagaatcagctcattctgggcgtgatgggaatagatgtggccctgaatgatataaaacgcttgacacctaactacaccctgggtgccaatggctacgtgttcgcaattgacctcaatgggtatgtgctgcttcatcctaatctcaagccacaaacaacaaacttccgtgaaccagtgacattagattttttggatgctgagctggaagacgaaaacaaagaggaaatccgtaggagtatgattgatggcaacaaaggacacaagcagatccgtactctcgtgaagtccctggacgaacggtacatcgatgaagttacgcgcaattatacttgggtcccgattagatccaccaactactcgctcggactcgtactgcccccttactcaacattttacctacaggctaaccttagtgaccagatcctgcaggtaaagtactttgagtttttactgccgtcttccttcgagtcagagggacacgtgttcatcgctcctagggagtattgcaaagatctgaatgcttcggataataacaccgaattccttaaaaattttatcgaattgatggagaaagtaacgccagattccaagcagtgcaacaattttctgttgcacaacctaattctcgacactggcattacccaacagctagtcgaaagggtgtggcgtgaccaggatctgaatacatattctctgctggccgtcttcgctgctaccgatggagggatcactcgcgtcttcccgaacaaggcggctgaagattggactgagaatcctgaacctttcaatgcatctttttacaggcgatctcttgacaatcacggatatgtctttaaacctccacatcaggacgcactgctgcggcctctagaacttgaaaacgatacagttggaatcctggtgtctactgcagtggagctttcactgggaagaaggaccctccgtccggctgttgtgggcgtgaagctggacctagaggcttgggccgagaagttcaaggtgcttgcaagcaacagaacccatcaggaccagccccagaaatgtgggccaaactcccactgcgaaatggattgcgaggttaataacgaggatctgctgtgcgttttgatcgatgatggcggtttcctggtgctgagcaatcaaaaccaccaatgggatcaggttgggaggttctttagcgaggtcgatgctaaccttatgctggcactctacaataactctttttatacaagaaaagagagctatgattatcaggccgcatgcgcgccacagccacccggtaacctgggcgctgcacccagaggagttttcgtccccacggtcgccgatttccttaacctagcgtggtggacctctgctgctgcctggagcctattccagcagttactgtacggcctgatttatcactcgtggttccaggcggatccagccgaggcggaggggagccccgaaacaagagaatcatcttgcgtaatgaaacaaacccaatactactttggaagcgttaacgcctcttacaatgccattatcgactgcggaaattgttctaggttgtttcacgcccaacgtctgaccaatacaaatctgcttttcgtggtggctgaaaagccactgtgcagccagtgcgaggccggaaggctcctccaaaaagagactcattgccctgcagacgggccagagcaatgtgaattggtgcagaggccgcgatatcggaggggaccgcatatatgcttcgactacaacgctactgaggataccagcgactgcggccgtggtgcgtctttccctccaagtctcggcgtcctggtctccttgcaactcctattgttgctcggtctgccacctcggccacagccacaggtactggtccacgcgagcaggagactctag

SEQ ID NO: 216558 - DNA, 3231 bp, synthetic construct
  misc_feature 1..3231: note = Description of Artificial Sequence: Synthetic coding sequence
  source 1..3231: mol_type = other DNA
atgcaacactgggcacggagactcgagcaggaggtcgacggggtgatgcggatttttggcggagttcagcagcttcgcgagatatataaggataatcgaaacttgttcgaagtgcaggaaaacgaacctcaaaagctggtcgagaaagtagctggcgatatcgaatcactcctggacaggaaggtccaggctctcaaacggttggcggacgctgcggaaaattttcagaaggcgcatcgttggcaggacaatatcaaagaggaagatatcgtctactacgatgccaaagccgacgcagagctggacgacccggagtctgaggatgttgaacgaggatcaaaagcctcaacgctgcgactggatttcattgaggaccctaactttaaaaataaagtgaactactcttatgccgctgtccaaattccgactgatatctataaaggaagtaccgtcatactcaatgagctgaattggaccgaggcacttgagaacgtattcatggagaacaggcgacaggatcccacactcttgtggcaggtgtttggaagcgctaccggggtcactcggtactaccccgcaacgccgtggcgggcaccgaaaaaaatcgacctgtacgacgtgaggcgtcgcccttggtacattcaaggagccagtagccccaaagatatggtaattattgtcgatgtgagcgggtcagtcagcggactgacgctgaaactgatgaagacatccgtgtgcgagatgttggacactctctcagatgatgactacgtgaatgtagcctcttttaacgagaaggctcagccggtgtcttgcttcactcacctcgtacaggccaatgtgcgcaacaagaaagtgtttaaagaagcagtgcaggggatggtagccaaagggacaacagggtataaggccggttttgaatatgcctttgaccaacttcaaaacagcaatattacgagagcaaattgtaataaaatgattatgatgttcactgacggtggagaggaccgagtccaggatgttttcgaaaagtacaattggccaaacagaaccgttcgcgtgtttactttcagcgtggggcagcacaactatgatgtaacacctctccagtggatggcgtgcgccaacaagggatactattttgagattccatcaatcggagccatcaggataaacacacaggaatatctggacgtgctgggcaggcccatggtgctggctggaaaggaggccaagcaagtgcaatggacaaatgtctacgaagacgctctggggctgggcctggtcgtgacaggtactctcccagtcttcaatctaacccaagatggcccaggcgaaaagaaaaaccaattgatactgggtgtgatgggaattgacgtggcacttaatgatatcaaaagactgactccaaattatacactgggggcaaatggatacgtcttcgccattgatctgaacggatatgtgttgctgcacccaaacctcaaaccacaaaccacaaactttagggaacccgtgactctcgatttcctggacgcagaactggaagatgaaaataaggaggagatcagacgctctatgatcgatgggaataaaggtcacaaacaaattcggacactagtcaagagcttagacgagcgatatattgatgaggttacacgcaactatacctgggtacctatcaggtcaacaaattactcactgggcctggttcttcctccatacagcaccttctacttgcaagccaaccttagtgatcagattcttcaggtgaaatactttgaatttctcctcccatcctcttttgagtcggagggccacgtgttcatcgcccctagagaatattgcaaagacttgaatgcctccgataataacaccgaatttttaaagaattttatcgagcttatggagaaagttacacctgactcgaaacaatgcaacaactttttgttgcataatctgatcctggatacaggcattacccaacagctcgtggaaagagtctggcgagatcaggacctgaatacctacagcctgctggccgtgttcgccgctacggatgggggaattaccagagttttccccaataaagccgcagaggactggaccgaaaaccccgaaccgttcaatgcttcgttctatagaaggagtttggataaccatggatatgtttttaagccaccccatcaggacgcgctgcttagacctctggagctggagaacgatactgtgggtattctggttagcaccgctgtcgaattaagtctgggcagacgaactctaagacccgctgttgtgggggtgaagttggacctagaggcttgggccgaaaagtttaaggtactggcaagtaaccgtactcatcaggaccagccccagaagtgtgggccaaactctcactgtgagatggactgcgaggtgaacaatgaggacctcctgtgtgtactgatcgatgacggcggtttcctggtgctgagcaatcagaatcatcagtgggatcaagtaggacggtttttttcagaagtggacgccaatctcatgctggccctttacaacaacagtttctacaccaggaaagagtcctatgactaccaagccgcttgtgctccacaaccccctggcaatttgggagccgctccccgtggcgtctttgttcctaccgtggccgacttcttgaatcttgcatggtggaccagtgctgccgcttggtctttattccagcagctgctatacggcctgatctaccacagctggttccaggcggaccctgctgaagccgagggctctccggaaacacgcgagagcagttgtgtcatgaaacagacccagtattacttcggttctgtcaatgcctcttataacgccataattgactgtggcaattgctctagattgtttcatgcacagcgcttgaccaataccaatctcctcttcgtcgtggccgagaagcctttgtgctcgcaatgcgaagccggacgactattgcagaaagagacacattgccctgccgacgggcctgaacaatgcgaacttgtacagcgtccccgttatcgcaggggaccacacatttgtttcgactacaacgccactgaggatacctccgattgtggtagaggtgctagttttcccccttcccttggtgtgttggtaagtcttcagcttcttctgcttctggggctccccccaagacctcagccacaagttctcgtacatgccagccgacgactgtag

SEQ ID NO: 216559 - DNA, 3441 bp, synthetic construct
  misc_feature 1..3441: note = Description of Artificial Sequence: Synthetic coding sequence
  source 1..3441: mol_type = other DNA
atggctgttccagcccgaacgtgtggagctagccgccctggcccagcgagaacagctcggccttggcctggttgcggaccacatcccggaccagggactagacgaccaacctcaggtccgccacgacccctctggctactgttacctctattgccactgttagccgcaccaggtgctagcgcatacagttttccccagcagcacaccatgcagcattgggcgaggcggttagagcaggaagttgatggcgttatgaggattttcggaggcgtgcagcagttgagagaaatctacaaagacaatcgtaaccttttcgaagtgcaggaaaacgagccccagaagcttgtggaaaaagtcgcaggcgacatcgagtctctgctcgatagaaaagtgcaagcgctcaaaaggctggcggacgctgccgagaatttccaaaaggctcacagatggcaggataacatcaaggaagaagatatcgtgtattatgacgccaaggctgatgcagaactggacgacccagaatctgaggacgtggagcgcggaagcaaagcttccacactccgactcgattttatagaggatccgaatttcaaaaacaaggtcaattacagttacgccgctgtacagatcccaacagacatttataaggggagtaccgttatcctcaatgaactcaattggaccgaggcactcgaaaatgtgttcatggagaaccggagacaggatccaaccctcctttggcaggtttttggatccgcgacaggcgtaacccgctattatcctgctacaccatggcgggctccaaagaaaattgatttatatgatgtccggaggagaccatggtacattcagggagcttcttctcctaaagacatggttataatcgtggacgtgagcggctcggtgtcaggcctgacgcttaaacttatgaagacctccgtttgtgagatgctagacaccctttccgacgatgattatgtgaacgtggcctcattcaacgaaaaggcacaaccagtgtcttgttttacccatttggttcaagccaatgtgaggaataaaaaggtgttcaaggaggcagtgcaaggtatggtcgcgaaaggcacaactggttacaaggccggtttcgagtatgccttcgatcagctccagaactccaacatcacgcgcgctaactgtaataaaatgatcatgatgttcactgacggaggcgaggaccgagtccaggacgtattcgagaagtacaattggccaaacagaaccgtccgggtattcaccttctccgtgggacagcacaattatgacgtgacccctttacagtggatggcctgcgccaataaggggtactatttcgagatcccgagcatcggggctattagaataaatacccaggaatatctcgacgtgttgggcaggcctatggtgctggcgggtaaagaggctaagcaggttcagtggacaaatgtgtacgaggacgctttgggtctgggcctggtagttacagggaccctcccagtcttcaacctgacccaggatgggccaggggaaaagaaaaaccagttgatactgggcgtgatgggcattgacgtcgcactcaacgacatcaagaggctcacccctaactacaccttaggcgctaatggatatgtatttgctatcgatctcaatgggtacgtacttttacatccaaacctgaaaccacaaaccacaaatttcagggaaccagtgaccttggacttccttgacgccgagcttgaggatgagaacaaggaagagatcaggcgttcaatgatcgatgggaataaagggcacaagcagatccggactctggtgaaaagcctagacgaaagatacatagatgaagtgactcggaattatacgtgggtccctattaggtctaccaattacagtctggggctggtcctgcccccttattctaccttctaccttcaggccaatctgtctgatcaaattttgcaagtgaagtatttcgaattccttcttccaagtagctttgaatccgaaggtcacgtatttattgccccacgtgagtactgcaaggatctgaacgccagcgataacaataccgagtttctgaaaaattttattgaactgatggagaaggtgactcctgatagcaagcaatgtaataatttcttgctgcataacctgatccttgacacaggtatcactcagcagttagtagagcgggtgtggcgcgatcaggatctgaacacatatagtctgttagccgtttttgcagccaccgacgggggtatcaccagagttttcccaaacaaggccgcagaagactggacagagaaccccgaaccttttaatgcatcattctacagacgcagtctcgataatcatgggtatgtttttaagccgcctcaccaagacgctctgctgcgcccactagaacttgagaacgatacagtgggaatactcgtttctacagcggttgaattaagccttgggcgtagaactctcagacccgcagtggtgggagttaaactggacctcgaggcatgggctgaaaaatttaaagtgctagcttcaaatcgtacccatcaagatcagccacaaaagtgtggcccaaatagtcactgtgaaatggactgtgaggttaataatgaggacttgctgtgcgtgttgatagacgacggcggttttctcgtgttgtctaatcagaaccatcagtgggaccaggtcggcaggttcttctccgaggtggatgccaatctcatgttagctctctataacaacagtttttacacccggaaagaatcctatgattaccaagctgcatgtgcccctcagcctccgggtaatctgggggctgctcctagaggcgtcttcgttccgaccgttgccgacttcttgaatctggcctggtggacttcagccgctgcttggtcactctttcaacagttgctgtatggcctaatttaccattcatggtttcaggccgatcctgctgaggcagaggggtcacctgaaacaagggaaagctcctgtgtcatgaaacagactcagtactactttggaagcgtcaacgcatcctataatgccatcatcgactgcggcaattgtagtcggttgtttcacgctcagcgcctgaccaacaccaacctcctgttcgtagtggctgagaaacctctgtgctctcagtgtgaggcaggccgactcctgcagaaagaaacccactgctgcccagctgatggacccgagcagtgtgagctggtccagcgtccccgttaccggcgtgggccacacatatgttttgactacaacgcgaccgaagacacctcagattgcggtcgcggagcttcctttcccccttccctgggtgtgcttgtgtcattgcagctgttactcctccttggactacctcccagacctcagcctcaggtcctggtccacgcaagtcgacgactctag

SEQ ID NO: 216560 - DNA, 3432 bp, synthetic construct
  misc_feature 1..3432: note = Description of Artificial Sequence: Synthetic coding sequence
  source 1..3432: mol_type = other DNA
atggcagtgcccgctagaacctgcggtgcgagtagacctgggcctgctcgcacagcgagaccatggccaggatgcgggcctcaccctggtccagggaccagaaggccaactagtggcccaccacgcccactgtggttacttctgccattactgccactgctcgcagcaccgggagcctccgcctactcttttccccaacagcacaccatgcagcactgggcacggagactggagcaggaagtggatggggtaatgagaatcttcggtggagtgcagcaactcagagagatctacaaggataatcgaaatctgtttgaagtgcaggaaaacgagccccagaaactggtggaaaaagttgcaggggatattgaatccctgctggacaggaaagtccaagcactcaaaaggttagccgacgctgctgagaatttccagaaggctcatcgctggcaggacaatataaaggaggaagatattgtgtactacgacgcgaaggcagacgccgagctggacgaccctgagagcgaggatgttgagaggggctcaaaagccagcacgcttaggctcgacttcatcgaggatccaaactttaagaacaaagtcaactatagctacgcagcagtgcagattcctactgatatatacaaaggctcaaccgtgatcctgaatgagctgaactggaccgaagcactggagaacgtgtttatggagaaccgtaggcaggacccaaccctgctatggcaggtttttggaagcgctactggcgtgactcgctattaccccgctaccccttggagagcgccaaagaagatagacctttacgacgtacgaaggagaccttggtacatccagggggcatcgagtcccaaagacatggtcattattgtggacgtgagtggctcagttagcggcttgaccctgaagttaatgaaaacctccgtgtgtgaaatgttagacaccctatcagatgatgactatgtgaacgtcgcctctttcaacgagaaggctcagcctgttagctgtttcactcatcttgtgcaggctaatgtgcggaacaaaaaggtattcaaggaggcagtgcagggaatggttgccaagggcactaccggttacaaagcagggttcgagtacgcttttgaccaactccagaattctaacattacaagagcgaactgtaacaagatgattatgatgtttacagatggaggggaggatcgggtccaggacgtttttgagaaatataattggcccaatagaactgtgagagtgtttaccttctcagtggggcaacacaattatgacgtgacacctctccagtggatggcttgcgcaaataagggttactattttgaaatcccttcgatcggggcaattagaatcaacactcaggaatatctggatgtcctcggcaggccaatggtcttggccggaaaggaggctaagcaggtgcagtggaccaacgtgtacgaggatgcgcttgggttaggcctcgtggtcaccggcactctacctgttttcaacctgactcaggatggccctggcgaaaaaaagaaccagcttatcctcggagtgatggggatcgatgttgcactcaacgacatcaagaggttaacgcccaattatacgttgggcgcaaacggctatgtgtttgcaatcgacctaaacggttacgtcctcttgcaccctaaccttaaacctcaaacgacgaattttcgggaacctgtaacactggacttcctcgatgcagaactggaggatgagaacaaggaggagatccgcagatccatgatcgacggaaataaagggcacaagcaaattagaacactcgtgaagtccctggacgagaggtatatagacgaggtgactcgcaactatacttgggttccaatacggtcgacaaattattcattgggcctcgtgctcccaccctactcaactttctatttacaggctaatctctccgatcagattctccaagttaagtacttcgagtttcttctcccttcttcctttgagagcgagggacacgtgtttatcgccccaagggagtactgtaaggacctgaacgcttctgataacaacaccgagtttctaaagaacttcatcgagctaatggaaaaagtcacacccgactctaaacagtgtaacaatttcttactccacaatctgattctagatacgggaatcactcagcagctggtggagcgcgtttggagagaccaggacctgaatacatactctctgctggcagtttttgcggcaaccgatggcggaatcacccgggttttccccaacaaggcggctgaagactggacagagaatcccgaaccattcaacgcatctttctataggaggtcattggacaaccatggttacgtctttaaaccaccacaccaggatgccctgctgcgccctttggagctggagaatgatactgtcggtatccttgtgtctactgcggtggaactgtcgctgggtcgcagaactttacgcccagctgtggtgggcgtgaagttagacctggaggcatgggctgagaagttcaaggtcctggcctctaacagaacacaccaggatcagcctcagaagtgtgggccaaactcccactgcgagatggactgtgaggttaataacgaggatctcttatgcgtgctgatcgacgacggcggattcctcgtgctatcaaaccagaatcatcagtgggaccaggtcggtcgcttcttcagtgaagtggacgcaaatctgatgctcgcgctctacaacaacagcttttatacacgaaaggagagctatgattaccaagctgcttgtgccccacagcctccgggaaatctgggagccgcaccacgaggcgtgtttgtgcctaccgtggccgacttccttaatctggcttggtggacaagcgcagcagcctggtctctgttccaacagctgctgtacggtctaatctaccattcgtggttccaggcggacccagccgaggctgagggtagtccggaaacgcgggagtcaagttgcgtgatgaaacagacccaatattactttggcagcgtaaatgcaagttacaacgcgatcatagattgcggtaattgctcacgcctttttcacgcgcagcggctgacaaatactaacctgctgtttgtcgtcgccgaaaagcctctgtgtagccagtgcgaagccggacggttactacagaaagagactcacagcgacggccctgagcaatgcgagttagtccagcgcccaaggtaccgcagaggcccacatatttgctttgattacaacgcaaccgaggacacttcagactgtggcaggggggcatcattccccccttcactaggcgtgctagtcagcttacagctgctgttgctgctaggactgcccccacggccacagccgcaagtactagtgcatgcctctcgacgattgtag

SEQ ID NO: 216561 - DNA, 3462 bp, synthetic construct
  misc_feature 1..3462: note = Description of Artificial Sequence: Synthetic coding sequence
  source 1..3462: mol_type = other DNA
atggccgtacccgctaggacttgtggagctagccggccagggccagcaaggaccgcgagaccttggcccggatgcggcccacatcctggcccaggaactaggaggcctacatctggtccccctcggccattgtggctgctgctgccactcctgcccctcctcgcggcaccgggagccagcgcctattctttccctcagcagcacacaatgcagcattgggctcgcaggctggaacaggaggtcgacggagtgatgagaatttttgggggagtccagcagctgagagagatctacaaagataacagaaatcttttcgaggtgcaggaaaacgaaccccagaagctggtcgaaaaagtggccggagacatcgagtccttacttgaccgcaaagtacaagccctcaagaggctagcagacgctgcggaaaactttcaaaaagctcacaggtggcaggacaatattaaggaggaggacatcgtatactacgatgctaaggcggacgcggagcttgacgatcctgaatccgaggacgtggagcgcggaagcaaggctagcacgctgagactggattttattgaagatccaaattttaaaaataaggttaactactcctacgccgcagtgcagattcccacagacatctacaaggggagtactgtcatactgaatgagttaaactggaccgaggcactggagaatgtctttatggaaaataggagacaggatcccactttgctttggcaggtgtttggaagcgcaacaggggtaacacggtactacccggctacgccttggagggcgccaaagaaaatcgacctgtacgacgttaggagacgtccttggtacattcagggtgccagctcccccaaggacatggtgattatcgtcgacgtgtcagggagcgtttctggcctgactctgaaactcatgaaaaccagcgtgtgcgaaatgcttgacactctatcggatgacgactacgtcaatgtagctagttttaacgagaaggcacagcccgtttcctgttttacacacctggtacaagccaatgtgagaaacaagaaagtgttcaaagaagccgtccagggaatggttgcaaaggggacaaccggctataaggccggatttgagtacgcttttgaccaactacaaaactcaaacattaccagagctaactgcaacaagatgataatgatgttcacagacggaggcgaagacagagtgcaagatgttttcgaaaaatataattggcctaacagaactgtccgggtatttactttttcagttggacagcataattatgatgtaactcccttgcagtggatggcctgcgctaacaaaggctattattttgaaattccttcgatcggagccatacgaatcaacacacaagaatacctggatgttctggggcgtccgatggtactggcagggaaagaggccaaacaggtgcagtggactaacgtctacgaggacgccctcggactcggcctggtggtgaccggtactctgcctgtgttcaacttgacgcaggacggcccaggcgagaagaagaaccagctcattcttggggtcatgggcatagatgtcgcattgaatgacattaagaggctcacacctaactatacattgggcgcaaatggctacgtgttcgccattgacctgaacggctacgtcctcctgcatcccaatctgaagccccagaccacaaattttcgtgagccagtcacactggatttcctggatgctgagctcgaagacgagaataaggaagagatacgtcgcagtatgattgacgggaacaaaggccacaaacagatccgaacactggttaaatccctggacgaacgctacatcgacgaggtgacccggaattatacttgggtaccaattaggtccacaaactattccctaggtttggtgttgccaccatatagcactttctacctgcaggcaaacctgtccgatcaaattctgcaggtcaaacttcccatcagcaaattgaaggatttcgagttcttactaccctcctcctttgagagtgagggccacgtgttcattgcgcctcgagaatattgcaaggacctgaatgcatctgacaataacacagagttccttaaaaacttcatcgagcttatggagaaggtcactcccgattccaaacaatgcaacaactttctactgcataatcttattctcgacaccggaattacccagcagcttgttgaacgcgtctggagagatcaagatctgaatacatactccctgctagctgtcttcgccgcaacagacggaggcattacacgagtttttcctaataaggctgcggaggactggaccgagaatccagaaccctttaatgctagtttctacaggcgttctctggacaatcatggttacgtcttcaagccaccgcaccaagatgcgctgctgcgacctctcgaactcgagaatgacaccgtgggcatactcgtgtccacggcagttgagctgtctttggggcgtcggactcttagacccgcagtcgtgggagttaagctggacttggaagcatgggccgaaaaattcaaagtgttggcctctaaccggactcaccaggatcagcctcaaaaatgtggacctaattcccattgtgagatggattgtgaggtgaataacgaggatttactttgcgtgctgatcgatgacgggggttttctggtcctgtcaaaccagaatcaccagtgggaccaggtcggacgttttttctccgaagtagacgctaacctgatgctagcactttataacaatagtttttataccaggaaagagagttacgactaccaggcagcctgcgccccacagccaccaggcaacctgggggcagcaccaagaggggtgtttgtccctacagtggctgattttctcaatctggcgtggtggacgtcagcggcagcctggtctctcttccaacagcttctctacgggttgatataccactcatggtttcaagccgatcctgctgaggccgagggcagcccagaaactagggagagcagctgcgtcatgaagcaaacacagtattacttcgggtccgttaatgcttcctacaacgccatcatcgactgtgggaattgcagtagattatttcacgcacagcggctcaccaatactaacctgctctttgtagtagctgaaaaaccactctgttctcagtgcgaagctggcaggctcctgcaaaaggagacacactgctgccccgctgatggacctgaacagtgtgaactggttcagaggccccgttataggagggggcctcatatttgcttcgactacaatgctacggaggacactagcgactgcggaaggggggcatccttccctccttcactgggcgtgttggtgtctctgcagcttctcttactcctggggttaccgccaaggccacagcctcaagtgttggtacacgcatcgaggcgtctgtag

SEQ ID NO: 216562 - DNA, 3453 bp, synthetic construct
  misc_feature 1..3453: note = Description of Artificial Sequence: Synthetic coding sequence
  source 1..3453: mol_type = other DNA
atggccgttcctgcgagaacctgtggtgcctcccgacccggacccgctagaaccgccaggccctggccgggatgtggccctcacccaggaccagggactagacggcctacgagtggtcccccacggccactttggctgcttctgcccctgctacccctgttagcagccccaggcgcatctgcctatagttttcctcaacagcataccatgcagcactgggcacggcgtctggagcaggaggttgacggtgtcatgcgcatcttcggtggagtgcagcagctgcgggaaatctataaggataatcgcaacttgttcgaagtgcaggagaatgaaccacagaagctcgttgagaaagtcgccggtgacatcgaaagccttctcgaccgtaaggtgcaggccttaaaaaggttagctgatgccgctgaaaattttcagaaggcccataggtggcaagacaacattaaagaggaggatatagtgtattatgacgccaaggccgatgctgaattagacgatcccgagagtgaagatgtcgagagaggcagtaaggcttccactctacggttagatttcatcgaagaccccaatttcaagaacaaggtgaattactcttatgctgccgtgcaaatacctactgacatctacaaggggtccaccgtcattctgaacgagctgaattggacagaggccctggagaacgtgtttatggagaacaggcgccaagatcccaccttactttggcaggtgtttggcagcgccactggcgtgactagatattaccctgctacaccatggagggcacccaagaagatcgacctctatgacgtcagacggaggccttggtatatccagggagccagttctcctaaagatatggtgatcattgttgatgttagcggttcagtatcaggcttgaccctcaaactgatgaaaacgtccgtttgtgaaatgctagacactttgtctgatgacgattatgtgaacgttgcgtccttcaatgaaaaggctcaaccagtgtcatgcttcacacacctcgtacaggcgaacgttcgcaacaagaaagttttcaaggaggcagtccaggggatggtggctaagggcactaccggctacaaggccggttttgagtacgcgttcgaccaattgcaaaacagtaatattacaagagccaactgtaacaagatgataatgatgtttacagatggcggtgaagatagagtgcaagatgttttcgaaaagtataactggccgaataggacagttcgagtttttacgttctcagtcggtcagcataattacgatgttacccccctacagtggatggcttgcgcaaacaagggctattatttcgagatcccctcaataggagctatacgcattaatacacaggagtacctggatgtgttgggacggcctatggtgctggctggaaaggaggcgaagcaagtgcagtggacgaacgtgtatgaggacgctctgggattgggcctagttgttaccggaaccctccccgttttcaacctgacacaggatgggcctggtgagaaaaagaatcaactgatcctcggggtgatgggaattgacgtcgctctcaatgacatcaagaggctgacacctaattacaccctcggcgctaatgggtacgtctttgccatagatctgaacggatacgtgttattacatcctaatctgaaaccccagacaacaaatttccgggaacctgtgacactagattttctggatgcggaactagaagacgaaaacaaggaggaaattcgccgttccatgatagacggcaacaagggacataagcaaatcagaactctggtgaaatccctggacgaaaggtacattgatgaggtcacccggaattacacgtgggtcccaatcaggagcaccaactacagtttgggcctggtgcttccgccatactccactttttacctgcaagcaaacctctccgaccagatcctccaagtgaagctccctatcagcaaactcaaggatttcgaattcttgcttcctagtagtttcgagtccgaaggtcacgtcttcatcgccccaagagagtactgtaaggatttgaatgcgtcagacaataacaccgagtttctgaagaacttcatagaattaatggagaaggttactcctgactccaaacagtgcaacaactttctgcttcacaacctcatcctggataccggtatcacccagcaactggttgaacgggtgtggcgcgatcaggacctgaatacatattcactgctggccgtctttgcggctaccgatggtggtatcacacgggtctttccaaacaaagccgctgaagactggaccgaaaacccagaaccatttaacgcgagtttttatcggcgatctctggacaaccatgggtatgttttcaaaccccctcaccaggatgccctattgcgtccgctggaactggaaaacgacactgtgggaattctcgtgagcacagccgtggagctgtccctagggaggcgtacactccgacccgctgtggtcggagtcaaactggacctggaagcctgggccgagaaatttaaggttctagccagcaaccgaacacatcaagatcagccgcagaagtgtggtcccaactctcattgtgaaatggactgcgaggtgaataatgaagatctgctctgtgtgcttatcgacgacgggggttttctcgtcctttctaatcaaaatcatcaatgggatcaggtcggacggttcttttccgaggtggatgccaacttaatgctagcactgtataacaactccttctataccaggaaagagtcttacgactaccaggccgcatgtgcccctcagcctccaggaaacctcggggcagccccacgcggagtctttgttcccactgtcgcagattttctgaatctggcctggtggacgtctgcagccgcttggtctctatttcagcagctcctgtatggtctgatctatcactcctggttccaggcggatcctgcagaagccgaggggtctcctgagacccgagagtcctcatgcgttatgaaacaaacccaatattatttcgggagtgtcaacgcctcatacaacgccataattgactgtggaaactgtagccgcctatttcatgcccagcgccttaccaacacaaatctgctgttcgttgtcgccgaaaaaccgctctgttcccagtgcgaagcaggccgactcctgcagaaggagactcactccgatggaccagagcagtgcgagctggtgcagcggccaaggtacaggcggggtccccacatttgctttgactacaacgctaccgaggacacttcagattgtggacgcggagccagtttccctccaagcctgggcgtgctcgtctcattgcagctgttacttctgttgggcctgcccccaagaccccagccccaggtgttggttcatgcgagccgcaggctgtag

SEQ ID NO: 216563 - DNA, 3276 bp, synthetic construct
  misc_feature 1..3276: note = Description of Artificial Sequence: Synthetic coding sequence
  source 1..3276: mol_type = other DNA
atggcaggcccaggcagcccacggcgagcgagccggggtgcgagcgcactactggcagctgccctactctacgccgcattgggcgacgtcgtccgttccgagcagcagatccccctgtccgtggttaaactttgggcttcggcattcggcggagaaatcaagtccattgccgcaaagtacagcgggagccagctgctgcagaagaagtataaagagtacgaaaaggatgtcgcaattgaagaaatagatggcctccagttagtgaagaaactcgccaaaaatatggaagagatgttccacaagaaatccgaagctgtcagaaggttagtagaagctgctgaagaggctcatctcaagcatgaattcgacgctgacctgcagtacgaatacttcaatgccgtgcttataaatgaaagggacaaggacgggaactttcttgagttaggcaaggaatttatcttggcacctaatgaccactttaacaacttaccagtcaatattagcctgtcagacgtgcaggtcccaacaaacatgtacaacaaggacccagcaatcgtcaacggtgtgtattggagtgaatccttaaataaggtgtttgtggataacttcgaccgagaccccagtctgatctggcagtatttcgggtcagctaaaggtttcttcaggcagtatcccggaattaaatgggagccggacgagaacggtgtaatcgcctttgattgtcgcaaccggaaatggtacatccaggccgctacatctcccaaagatgtggtgattctggtggacgtgtctggctccatgaaaggcttgagattgacaattgctaagcagaccgtttcttctatcctggatacgttaggcgacgatgactttttcaacatcattgcttataatgaggagctccattacgtcgagccttgcttgaatggaaccctggtgcaggcagaccgcacaaacaaggagcactttcgcgaacacctggacaagctcttcgcaaaaggtatcgggatgctggacatcgccctcaatgaagccttcaatattctgagcgattttaaccataccggccaaggaagtatatgcagccaggctatcatgctgataaccgacggggcagtggatacttatgacactatctttgccaagtacaattggcccgaccgcaaagtccgcatatttacatacttgattggacgggaagccgcatttgctgacaacctaaaatggatggcatgcgcgaacaagggcttctttacccagatctctacactagccgacgtacaagaaaacgtgatggagtacctgcacgtgctgtcgcgacctaaagtgattgaccaagagcacgacgtggtctggaccgaggcctatatcgattccactcttccccaggcgcagaaactcacggatgatcaaggacccgtgttgatgaccaccgttgccatgcctgtgtttagcaagcagaacgagactagatctaagggaattctcctgggagttgtggggacagacgtgcccgtgaaagaactgttgaaaactatccctaaatataaactcgggattcatggctacgcttttgctattacaaataatggctatatcctcacccaccctgagctccgtctgctttacgaagagggtaagaagcgcagaaaacccaattatagctccgtggatctaagcgaggtcgagtgggaggaccgcgacgacgttctaaggaacgccatggtaaataggaagaccgggaagttcagtatggaggttaaaaagaccgtggataaaggcaagagagtcctggtcatgacaaatgactactattatactgacatcaaggggactccattcagtttaggcgttgcactgagcagaggccacggtaagtatttctttcgcggaaatgtgactattgaagagggtcttcacgatcttgaacatcccgacgttagcctagccgatgagtggtcttattgcaacaccgatctgcatcctgaacaccgtcatctaagtcaacttgaggccataaaactgtacctcaaaggcaaagagccactgctgcagtgcgacaaggagctcattcaggaggtgctgttcgacgccgtcgtgtccgccccaatcgaagcatattggacaagtctggcgctgaacaaatccgagaacagcgacaaaggagttgaggtggcctttctgggcacacgaactggactgtcccgcatcaatctgttcgtgggcgctgaacaactgacaaatcaggacttccttaaggcaggggacaaagaaaatatcttcaatgctgatcattttccgttgtggtatagacgtgcagccgaacagatccctgggtctttcgtgtactccataccctttagcacaggcccagttaataaaagtaacgtcgtcacagccagcacttctattcaactcctggacgagaggaagagtccagtcgtcgcggctgtggggatacaaatgaagttggaattctttcagaggaaattctggacggcttctagacagtgtgcctccttagatggaaaatgttctatttcctgcgatgacgaaaccgtgaactgttatctgatcgacaataacggctttattctggtttcagaagattatacacagactggggatttctttggagagatcgaaggggcagtgatgaataagctcctgacgatgggaagtttcaaacgtattaccctgtacgattatcaggctatgtgtcgagccaataaagagtctagcgacggtgctcatggtttgcttgacccctacaatgcatttctgtccgccgtgaagtggattatgactgaactggtactcttccttgttgagttcaacttgtgttcctggtggcattcagatatgactgctaaggctcagaagttgaaacaaactcttgaaccatgtgacacagagtatccagcttttgtaagtgaacgcaccattaaggagaccacaggcaacatcgcatgtgaagattgttcaaaatcatttgttattcaacagattccttctagtaatctgttcatggtggtggttgactcatcttgcttatgtgaaagcgttgcacccataacaatggcgccaatcgagatccgatacaacgaatctctgaagtgcgagcgactgaaagcacagaaaattagacggaggcctgagagttgccacggcttccacccggaggagaatgccagggagtgtggaggtgctccttctctgcaggcacagaccgttctattgctgcttccgctcctgctgatgctgttttcacgctag

SEQ ID NO: 216564 - DNA, 2997 bp, synthetic construct
  misc_feature 1..2997: note = Description of Artificial Sequence: Synthetic coding sequence
  source 1..2997: mol_type = other DNA
atgggcgaactacgccaggaacgaagtactgccctccagcggctggtggaggcggcagaggaagctcatctgaagcacgaattcgacgcagacctgcagtatgagtattttaatgctgtgctaattaatgagcgtgataaagacgggaacttcctggagctgggaaaagaattcatcctggcccctaacgaccactttaataatctgcccgtcaacattagcctgtccgatgtccaggtgcccactaacatgtacaataaggatccagccatcgtgaacggggtctactggtctgaaagcctcaacaaagtcttcgttgacaacttcgacagagatcctagcttgatttggcagtacttcggctcggcaaaaggattcttcaggcagtacccaggaataaagtgggagcccgatgaaaatggagtgattgccttcgattgccggaacaggaagtggtacatccaggccgctacctcccctaaggacgtcgtgatcttggtggacgtgtctggctcaatgaaagggcttcggctgactattgccaaacaaacagtgagttctatcttggatacattaggtgatgacgacttttttaatattattgcgtataacgaggagctccactatgtggagccttgtctcaacggtacgctggtccaagctgacaggacgaataaggagcacttccgggaacatctggacaagctcttcgctaaaggcattgggatgctggacatcgcgctgaacgaggccttcaacatcctatccgactttaatcatacaggacaggggagtatatgttcccaggccatcatgttaatcaccgacggcgctgtcgatacttatgacacgatctttgccaaatataactggccggatcgcaaggtgagaatattcacctacctaatcggcagggaagctgcctttgcagataatctgaagtggatggcctgcgccaacaagggctttttcacgcagattagcacacttgccgacgtgcaagagaatgtgatggagtatttacatgtcctgagcaggcccaaggttattgaccaggaacacgacgtggtgtggacggaagcgtacattgactccaccgtgagtcaggccgaacagctgactgatgaccaggggccagtgctgatgacgacagttgccatgcccgtgttctctaaacagaatgaaacgagatctaagggcatcctactgggagtggtcgggacagatgtgcctgtcaaggaacttctgaaaaccatccctaagtacaagttagggattcacgggtatgcgttcgctatcacaaataacggctacattttaacccacccggaactacgcctcttgtacgaagaaggaaaaaagaggcgcaaacccaattatagttcagttgacctgtctgaagtggagtgggaggaccgtgatgatgtcctgagaaatgccatggttaaccgcaaaaccggtaagttcagtatggaagtgaagaaaaccgtcgacaagggtaaaagagtccttgtaatgactaacgactactactataccgacatcaaaggaacacctttcagcttaggtgttgccctgtcaagaggacacggcaaatactttttcagaggaaacgtgactattgaggagggcttacacgaccttgagcatcccgatgtcagtctggcggacgagtggtcctactgtaacacggacctccatcctgagcatagacatctctcccagctggaagccatcaaattgtacctgaaaggaaaggagcctttgctgcagtgcgataaggagctgatacaagaggtgctttttgatgctgtcgtcagtgcccctatcgaggcatactggacatctctagcattgaataagtcagagaattcggataagggtgtggaggtcgcattcctgggcacgcgcaccgggctgtctcgaatcaatttgttcgtcggggctgagcagctaaccaatcaggacttcctgaaagcgggagataaggagaatattttcaatgctgatcatttcccgctctggtacaggagagccgcagaacagattcccggaagttttgtgtatagcattccgttcagcacaggtcctgtaaacaagtctaatgtggtcaccgccagtaccagtattcagctgcttgacgaacgcaagtctcctgtggtggccgctgtgggaatccagatgaagctggaattctttcagagaaagttctggactgcctctaggcaatgcgccagcctagatggtaaatgtagcatctcttgcgacgatgagactgtgaactgctatttgattgataacaacggctttatattggtctcagaagattatacacagacaggcgacttcttcggagagatcgagggcgcagttatgaataaactccttacgatgggttcctttaagcgtatcacgctctacgattaccaggctatgtgccgggcaaacaaagagtcgtccgacggtgctcacggcctgttagacccatacaacgcttttctatcagccgtgaaatggattatgactgaattggtgttgttcctcgtcgagttcaatctttgctcgtggtggcacagtgatatgacagcgaaggcccagaagctcaagcaaaccttggagccgtgcgatacagagtatcctgcgtttgtcagcgaaagaaccattaaggaaacaacaggcaatatagcctgtgaggactgttccaaatcctttgtaatacagcaaatcccatcatcaaacctctttatggtcgtggtcgatagtagctgtttgtgcgaaagcgtcgcgccaatcacaatggcacccattgagatctcacagcacaacgaaagcctgaagtgtgaacgtctcaaggcccaaaagataagaaggcgaccggagagctgccatggattccacccggaagaaaacgcgcgtgaatgcgggggtgcgccatcgctgcaagcccagactgtcctgctactcctgcctctcttgttgatgctgttcagcaggtag

SEQ ID NO: 216565 - DNA, 3276 bp, synthetic construct
  misc_feature 1..3276: note = Description of Artificial Sequence: Synthetic coding sequence
  source 1..3276: mol_type = other DNA
atggccggacccggtagtccaaggcgagcttcacggggtgccagcgcactgctcgcagccgcactgctctatgctgcattaggggatgtcgtgcgctccgagcaacagattcccctttctgtggtgaagctctgggcctctgccttcgggggagagatcaagtccattgccgctaagtactctggctcccagttgctgcaaaagaaatataaagaatacgagaaggacgttgctatcgaagagattgatgggctgcagctggtcaagaagctggccaaaaacatggaagagatgtttcacaaaaagtccgaggcggttaggagactggtggaggctgctgaggaggcccatctcaagcacgagttcgatgcagacctgcagtatgaatattttaatgcagtattaatcaacgagagggataaagacggaaattttctggaacttggcaaggagtttatcctcgctcccaacgaccattttaataacttaccagtcaatatcagcttatctgacgttcaggtgcctactaatatgtataacaaggaccccgctatcgttaatggtgtatactggtccgaatcactgaataaagttttcgtggacaacttcgacagggatccatccttgatttggcagtatttcggaagcgccaaagggttttttaggcaatatcccggtatcaaatgggaaccagacgaaaacggtgtaattgcatttgattgcaggaatagaaagtggtacatccaagctgctacaagccctaaggacgtggtaatcctggtagacgtttctggcagcatgaaggggctcaggctgaccatagctaaacagacagtgtcttcaatcttggataccctgggtgacgacgatttttttaatatcatagcatacaatgaagagttgcattatgtggaaccatgccttaatgggacactggtacaagcagatcgaaccaataaggagcacttcagggagcatttggataagctgtttgccaagggtatcggaatgctggatatcgcactcaacgaggccttcaatatccttagcgacttcaatcacacaggccagggttctatttgttctcaggcaattatgctgataactgatggagcagtcgatacatacgatacaatattcgcgaagtataactggcccgaccggaaggttaggattttcacttatctgatagggagagaggctgcattcgcagacaatctaaaatggatggcttgcgcgaataaaggattcttcacccaaattagtacactagctgatgtgcaggagaatgtaatggagtatcttcacgtcctctcccggccaaaggtcattgaccaggagcatgacgtagtgtggaccgaggcctacatcgactctactcttcctcaggcacagaagctgacagacgatcagggacccgtattgatgaccacagtggcaatgcctgtcttttccaagcagaatgagacaagaagcaaaggcatattactgggagtggtgggcaccgacgtgccagttaaagagctgttaaaaactattccgaaatacaagctgggcatccatggctacgcgtttgcgatcacaaataacggttacattcttactcatccagaactgagactgctctacgaagagggtaagaagagaagaaagcccaactactcttccgtagacctgagcgaggttgaatgggaggatagagacgacgttctccggaacgccatggtaaacaggaagacaggcaagttctcaatggaagtgaagaagaccgtcgacaagggcaagagggtcctcgtaatgacaaatgactactattataccgacattaagggaacaccattttcattaggcgtcgcccttagccgagggcacggaaagtatttttttaggggcaacgtgacaatcgaagagggcctccacgatttggaacatcccgatgtcagcttggctgatgaatggtcgtattgtaatactgatctgcatccagagcatagacacctctcacaactcgaagcaatcaagctctatttgaaaggcaaggagcctttgctgcagtgcgacaaggaacttatacaggaggtcctattcgatgccgtcgtaagcgcacccatcgaagcctattggacatccctggcgctcaacaaatctgagaattcagacaagggtgtggaagtcgcgttccttgggacacgcacaggcctttcccgtataaacctttttgtgggcgctgagcagctcactaatcaggattttctcaaagcaggtgacaaagagaatatttttaacgccgaccacttcccactttggtaccggagagccgcagaacaaattccaggaagcttcgtttactccatcccattttccaccggacctgtgaataagtctaatgtcgtgacagctagtacgagtatacagctcctggatgaaagaaagtcaccagtcgtggcagcagttggaattcagatgaagctggaattctttcagagaaaattctggacagcatctagacagtgcgcaagcctcgacggtaagtgctctatctcttgcgacgatgaaaccgtgaactgttacctcattgataacaatgggttcatactggtgtccgaagactatactcagaccggggatttctttggcgaaatagagggcgcagtcatgaataagttgctaaccatgggctcatttaagaggatcactctgtacgactaccaggctatgtgtcgggcaaacaaagaatcatccgacggtgcccatggcttgctggatccgtataacgcattcctttctgccgtgaaatggatcatgacagagctcgtcctgtttctcgttgagttcaatctgtgctcgtggtggcattctgatatgaccgctaaagctcagaagcttaaacagactctggagccttgcgacacggaatatccagcattcgtgtctgaacggaccatcaaggagaccacgggcaacatcgcatgtgaggactgttccaagtccttcgtgatccaacagatacccagcagcaatctgttcatggtggtggtggattcctcatgtctctgcgagagcgtcgctccaattacaatggcccctatagagatccgctacaacgagtccctgaaatgtgaacggctgaaggcccagaagatcagacgcaggccagagagctgccacggctttcaccccgaagaaaatgcgagagagtgcggaggcgcaccctccctccaggctcagactgtgcttctgctgcttccgctacttctaatgttattctcgcggtag

SEQ ID NO: 216566 - DNA, 1557 bp, synthetic construct
  misc_feature 1..1557: note = Description of Artificial Sequence: Synthetic coding sequence
  source 1..1557: mol_type = other DNA
gagattctgttccaccagatgcagaatcagattaaacggttagtcgaggctgctgaagaagctcacctcaagcatgaatttgacgcagacctgcagtacgagtatttcaacgccgtcctgatcaacgagcgagacaaggacggtaatttcctggagctcggcaaggaatttattttggcacccaacgatcatttcaacaatcttccagtcaatataagtctcagtgatgtgcaagtacctacaaacatgtacaataaggatcctgccattgtgaacggtgtgtactggagcgagagtttaaataaagtcttcgtggacaactttgacagggacccaagcctgatctggcagtattttggctcagcgaagggtttcttcagacaataccctggcataaagtgggaaccggatgagaatggtgtcatagcgttcgactgtagaaaccgtaagtggtatatacaagcagccacctccccgaaagatgttgtcattctagttgatgtctctggaagcatgaaaggcctcagattgaccatcgctaagcagactgtaagtagtatcctcgacaccctaggcgacgatgatttcttcaatatcatcgcatacaatgaggagttgcattatgttgagccatgtctaaacgggactctggttcaagccgacagaacaaacaaggagcatttcagagaacacttggataagctgttcgccaaagggattgggatgcttgacatagcactcaatgaggcattcaatatattgtcggactttaaccacaccgggcagggctcaatttgtagccaagctattatgctgattacggatggcgcagtggacacgtatgatacgatttttgccaagtacaattggccagaccgcaaagtgcgaattttcacatacttgatcggtagagaagcagcttttgccgacaacctcaaatggatggcatgcgctaacaaaggctttttcacccagatctccactctggccgatgttcaggagaacgtgatggagtatctgcatgtgctgtcccgcccaaaggtaatcgatcaggaacatgacgtagtgtggaccgaggcttatatcgattctaccctaaccgatgaccaaggcccagtgctcatgacaactgtagctatgccagttttctcaaagcagaatgagacaaggtcgaaagggattcttctgggcgtggttgggacagatgtgccagtgaaagaactgcttaagactattcctaagtataaattgggaattcacggctacgctttcgcaattacaaataacgggtatattttgacccatccggaactgcgcctcttatacgaagaaggtaagaaacggagaaagccgaactactcttctgtggaccttagtgaagttgagtgggaggaccgggacgacgtgctcagaaatgccatggtgaatcgaaagacaggaaagtttagcatggaagtgaagaagacagttgacaagggcttccgctgcggtgcttttcagaggtcctgggaaatatttttgcctagggagtgcaatcaccgacggagacccgcttag

SEQ ID NO: 216567 - DNA, 3276 bp, synthetic construct
  misc_feature 1..3276: note = Description of Artificial Sequence: Synthetic coding sequence
  source 1..3276: mol_type = other DNA
atggcgggtccagggtccccccgtcgcgctagcaggggcgcatcagcacttctcgctgccgcactcctctacgcggcacttggggacgttgtgcgctctgagcagcagattccccttagtgtagttaagctttgggccagtgcttttggaggggagataaagagcatcgccgctaaatactccgggtctcagctcctgcagaaaaagtataaggaatacgaaaaggatgtggccatcgaggagatcgacggcctacagctagtgaagaagctggctaaaaacatggaggagatgttccacaaaaagagcgaagccgtgcggcgactcgtcgaagcggctgaagaagctcacctgaaacatgagttcgacgccgatctccagtacgagtattttaacgccgtcctgattaacgagcgcgataaagacggaaactttctcgaactcggcaaagaattcattttggctcccaatgatcactttaacaacctgcccgtcaacataagcctaagcgatgtacaagttccaaccaacatgtacaacaaggaccccgctatcgtcaacggtgtatattggtcggaatcgttaaacaaggtgtttgtcgacaattttgaccgtgatccctcactgatctggcaatattttggcagcgcaaagggattcttcaggcagtacccgggaatcaaatgggaacccgatgaaaacggggtcatcgcttttgattgcagaaatcggaagtggtacattcaggctgcaacgtcaccgaaagatgtagtgattttggtcgatgtgtccggcagcatgaaaggcctgcgtctgacaattgccaagcagactgtgagctcaatactggataccctcggagacgatgactttttcaacataattgcatataacgaagagctccactatgttgaaccctgtctgaatggcacactggtacaggctgatcgcacaaataaagagcattttcgggaacatctcgataaactcttcgcgaaaggcattggtatgctggatattgctctcaatgaagcattcaatatcttatctgactttaaccatacagggcagggctccatctgtagccaggctattatgctgatcactgacggcgctgtagatacatacgatactatctttgctaagtacaactggcccgaccgcaaagtcagaatctttacgtatctgattggacgcgaggcagcattcgccgacaatttgaagtggatggcttgcgccaataaagggttcttcacccagatctctaccctcgcagacgtgcaggagaacgtaatggaataccttcacgtcttatctcgccctaaagtaatagatcaagagcacgacgtggtgtggacggaggcctatattgatagcacactaccccaagcccaaaagttgaccgatgaccaagggccagttctcatgacaaccgtcgccatgccagtcttctccaaacagaacgagaccaggagcaaggggatcttgcttggagttgtcggcaccgatgtgccggtgaaggagttgctgaagactattccaaaatataagctaggcatccacggatatgccttcgccatcaccaataacggttatattctcactcatcctgagttacgcttgctttacgaggagggcaagaaaaggagaaagccaaactacagtagcgtcgatctctcagaagtggagtgggaagatcgcgatgacgtcttgaggaacgcaatggtgaatcgcaagacaggcaaattctcaatggaggtaaaaaagaccgtggacaaaggtaaacgagttctggtcatgacaaacgattactattatactgatatcaagggcaccccattctcacttggcgtcgcactaagtcgcggacatggcaaatactttttcagagggaacgtgaccatcgaggagggtttgcacgatctggagcaccccgacgtcagtctagccgacgagtggtcctattgcaacaccgatcttcacccagaacataggcatcttagtcagctggaagcaatcaaattgtacctcaaagggaaggaacctctactacagtgcgacaaggagctcatccaagaagtgctatttgatgccgtggtgtccgcgccaatcgaggcctattggacttctttggccctgaacaagtccgaaaactcagataagggcgtggaggtcgcatttctgggcaccagaactggcctgagtcggatcaatctgttcgttggagccgaacagctgaccaatcaggatttcctcaaggccggtgacaaggaaaatatattcaacgcggatcactttcctctctggtaccgaagagctgccgaacagattcccggatctttcgtgtatagtatccctttttctaccggccctgtgaacaagtccaatgtggtcacagcctcaactagtattcagttgctggatgagagaaaaagtccagtagtcgcggcagttggtatccagatgaagctggagtttttccaacggaagttctggacagcctcccgacaatgtgctagcctggacgggaagtgttctatatcatgcgacgacgagaccgtaaactgctacctcatcgataataatggttttatcctcgtttcggaagactacacacaaacaggggactttttcggcgagattgagggagcggtaatgaacaaactgctgaccatgggcagcttcaagaggattacgctgtacgactaccaggccatgtgtcgtgccaacaaggaatcttccgacggcgcacacggtctgctggacccatacaatgctttccttagcgccgtcaagtggattatgacggaattggttctcttcctggtggagtttaacctgtgttcctggtggcattcagacatgacggccaaggcacagaagttgaaacagactttagagccttgcgacactgagtatccagcattcgtgtctgagcggactattaaagagactactggtaacatcgcatgtgaagattgctctaagtccttcgtgatccagcaaatcccttcctccaacctctttatggtagttgttgactcaagctgtctgtgcgagagtgtggcacctatcaccatggcccctattgaaatccgctacaacgaatcattgaagtgcgagaggcttaaggctcaaaagatcaggcgccgaccagagagttgccacgggttccatccggaagagaacgcccgagaatgtgggggagccccatctctccaggcccagaccgtgctcctgctcctgcctctcctcctgatgctgttctctcgctag

SEQ ID NO: 216568 - DNA, 1578 bp, synthetic construct
  misc_feature 1..1578: note = Description of Artificial Sequence: Synthetic coding sequence
  source 1..1578: mol_type = other DNA
atggaggaaatgttccataagaaatctgaagcagtaagaagactagtggaagccgctgaggaagcccaccttaaacacgaatttgacgccgacttgcaatatgagtactttaacgcagttttaatcaatgaaagggacaaagatggcaacttcctcgaactggggaaagaattcattctggcaccaaacgaccatttcaataatttaccagtgaatatttccttgtccgacgtgcaggtcccaacaaatatgtacaacaaagatccagctatagtgaacggggtgtattggtcggagagcctgaataaggtgtttgtagataactttgaccgtgacccctccctcatatggcaatatttcggcagcgcaaagggatttttccgccagtatcccggaatcaaatgggagcccgacgagaacggcgttatcgctttcgattgtcgaaaccggaagtggtatattcaggccgcaacatcacctaaggatgtggtcatccttgtggatgtgtccgggtccatgaaaggcctccggctgacgatcgcaaaacagactgtttcttccatactggatactcttggcgatgatgacttcttcaacataattgcctacaacgaggagctgcactatgtggaaccttgcctcaatggcaccctggtgcaggccgaccgcacaaacaaggagcattttcgggagcatctcgataagttgtttgcaaagggaatcggcatgctcgacatagctctgaatgaagctttcaacatcctctccgactttaaccatactggccagggctcaatatgcagccaagctataatgctgattactgacggagcagtggatacctacgataccattttcgccaaatacaactggccagatcgcaaggtgagaatctttacgtacctcattgggagggaggccgcttttgctgacaacctgaaatggatggcatgcgctaacaagggcttttttacacagatttccacgctggccgacgtgcaggaaaacgtgatggagtacctacacgtgctatcacggcctaaagtcatcgaccaggaacatgatgtcgtttggaccgaggcttacattgatagcacactgccacaggcccagaaactgacagatgaccaaggacccgtccttatgaccacagtcgctatgccggtgttttccaagcagaacgaaacacggagtaaggggattttgctgggagtcgtcggtactgacgtgccagtgaaggagttattaaagaccatacccaagtataaattgggaattcatggttacgcattcgcaattaccaataatggctacatcttaacacaccccgagctccgacttctgtatgaagaaggcaagaagaggcggaaaccaaactactctagcgtagacctaagtgaagtcgagtgggaagacagagacgatgtactccgcaacgccatggtgaatcgtaagaccggcaagttttctatggaagtgaagaagacggtcgacaagggcttccggtgcggcgcattccaaagatcctgggaaatttttctccctagggagtgtaaccacaggcggcgaccagcttag

SEQ ID NO: 216569 - DNA, 2994 bp, synthetic construct
  misc_feature 1..2994: note = Description of Artificial Sequence: Synthetic coding sequence
  source 1..2994: mol_type = other DNA
atggaggaaatgtttcacaaaaagtctgaagctgtccgcagactggtggaagcagctgaagaagctcacttaaagcatgagtttgacgctgacctgcaatatgaatactttaatgctgtgctcatcaacgagcgcgacaaggatggcaacttcttggaactggggaaagagtttattctggctccaaacgatcattttaataatctaccggtcaacatctccctctccgacgtgcaggtcccaacgaacatgtacaataaggatccagcaattgtgaacggcgtgtactggagtgaatctcttaacaaggtcttcgtcgataatttcgatagggaccccagtctgatatggcagtattttggatccgccaaagggttctttcgacagtaccccggaattaagtgggagcccgacgaaaatggcgttatcgccttcgattgtcgcaaccgtaaatggtacatccaggctgccacctctccaaaagacgtagtgatcctggttgacgtctctgggagcatgaagggactgagactcactatagcaaaacagactgtttcctccattttggacaccttgggagacgatgatttttttaatatcattgcctataatgaagaactgcactacgtcgaaccatgccttaatgggaccttggttcaagcagatcgcaccaacaaggagcactttcgggaacaccttgacaagctcttcgccaagggaattggaatgctggatattgccctgaatgaggccttcaacattctgtcagattttaatcataccgggcagggatcgatttgttcccaggcaatcatgctgattaccgacggcgcagtcgatacttacgacacgattttcgccaagtacaactggccagaccgcaaagtccggatattcacctacctcatcgggagagaagctgcatttgcggataacctgaaatggatggcttgtgccaacaagggttttttcactcagattagtacattggctgacgtccaagagaatgtaatggaataccttcatgtgctcagtaggccaaaggtcatagatcaggaacacgacgttgtttggactgaagcctacattgatagtactctgcctcaggcccagaagttaactgacgaccaagggcctgtattgatgacaactgtagcaatgccggtgtttagcaagcagaacgagaccaggagcaaaggcatccttttaggtgtcgtaggcaccgatgtgccagtgaaggagctgctcaaaacaatcccgaagtataagttgggaatccatgggtacgcttttgccatcacgaacaacgggtatatccttacacacccggagcttagactcctgtacgaggagggcaagaagagaagaaagccgaactatagctcagttgacctttccgaggtcgaatgggaagacagagatgacgtgctcaggaacgcaatggtgaatcggaagacgggcaaattcagtatggaagtgaaaaagactgtcgacaagggaaagcgcgtcttggtgatgaccaatgattattactacactgacatcaagggaaccccctttagcctcggcgtagcgctctcgagaggtcacgggaagtacttctttcggggaaatgttacgatcgaggagggcctgcacgacttggagcatccagacgtttcactagcagacgagtggagttattgtaataccgacctgcatccagaacacaggcatctttcccaattagaagccatcaagttgtatctgaaaggtaaagaaccgctactacaatgcgacaaggaactgattcaagaggtcctcttcgatgcagtggtgtctgcacccattgaggcctactggacctccctcgccctcaataaaagtgagaattctgacaaaggagtggaggtcgcattcctcggaacgcgcaccgggctgtcaagaattaatctgttcgtcggggctgaacagctcaccaaccaggacttcctgaaagcaggggacaaggagaacatattcaatgccgaccattttcctctatggtataggcgcgctgctgaacagatcccaggcagcttcgtctactccattcccttctctacgggcccagtgaataaatccaacgtcgtgactgcttccacctcaatccagctcctcgacgaacgcaaatcaccagttgttgcggctgtgggcatccagatgaagctcgagttcttccagaggaaattttggaccgccagtcggcagtgcgcctctctcgacggcaagtgctctatatcctgcgatgatgaaactgtgaactgctatcttatagataacaatggtttcattctggtctctgaagattatacacagacgggggattttttcggggagattgaaggtgctgtgatgaataagctcctgaccatgggtagcttcaagcgaattaccctatatgactaccaggcgatgtgtcgagctaataaggagtcttccgatggggctcatggactgctggacccgtataatgcatttttgtctgctgttaaatggattatgacggagctggtcttgtttttagtggagttcaatctctgtagctggtggcactctgatatgactgccaaggctcagaaacttaaacagacgttggagccttgcgacaccgagtacccagccttcgtttcagaacgcactattaaagaaaccacaggcaatatcgcttgcgaagattgtagcaagagttttgtgattcagcagattccatcgtcaaatctcttcatggtggtcgtagactcttcttgcttgtgcgagagtgttgccccaatcacgatggctcccatcgaaatcagatacaacgagtctttaaaatgtgaacggctgaaagcacagaaaatccgccgtcgccctgagagttgtcacggattccatcctgaggagaatgccagagaatgtgggggagctccaagcctccaggcccagaccgtgctccttctgctgccactcctgctgatgctctttagccggtag

SEQ ID NO: 216570 - DNA, 381 bp, synthetic construct
  misc_feature 1..381: note = Description of Artificial Sequence: Synthetic coding sequence
  source 1..381: mol_type = other DNA
atggaagaaatgttccacaagaagtccgaggctgttaggcgattagtggaagccgcagaggaagcccaccttaagcacgagttcgacgccgatctgcagtacgagtactttaatgcggtcctcattaatgaaagggataaggacggaaactttcttgagttaggcaaagaatttattctcgcgcctaatgaccactttaataacctgcctgtgaacatttcattgtcagatgttcaggtgcccaccaatatgtacaataaagaccctgcaatcgtgaacggagtatactggtctgagtctctcaataaggtgtttgtggacaacttcgatagggacccatcattgatctggcaatactttggatccgcaaaagggttctag

SEQ ID NO: 216571 - DNA, 2925 bp, synthetic construct
  misc_feature 1..2925: note = Description of Artificial Sequence: Synthetic coding sequence
  source 1..2925: mol_type = other DNA
atggtttgcgggtgctccgccttgttacctcttcccaacccaaggcccaccatgcccgctactcctaattttttggccaatccgtcctcttcttctaggtggattcccctccagccaatgcccgtcgcatgggcattcgtgcagaaaacgagtgctttgctttggttgttgctactcggaaccagcctgagccccgcttggggccaggccaagataccactggagactgtgaagctctgggcggatacctttggcggtgacctgtacaataccgttactaaatacagtggatccctcctgttgcagaaaaagtataaagatgttgagtcttccctaaagatagaggaggtcgacggacttgagttggtcaggaagttcagcgaggacatggagaacatgcttagacgaaaggtggaagcagtacaaaacctggtggaggccgctgaggaggcggaccttaaccatgagttcaatgagagcctcgtttttgattattataatagcgtcctgatcaatgagcgcgacgaaaaaggtaactttgtggagctcggagctgaattcctgttggagagtaatgctcacttctcaaacttgccagtaaataccagtatctcgtccgttcagcttcccacaaacgtgtacaataaggatccagacatcctaaatggagtatatatgagcgaggcgctgaacgctgtgtttgtcgagaatttccagcgggatcccaccttgacatggcagtatttcgggtccgctacaggattctttcgcatttaccccggtataaagtggacacctgacgaaaatggagtgatcacctttgactgtaggaaccggggatggtacatccaggctgccacatcccctaaggatattgtgatccttgtggacgtctcgggctccatgaagggcttaagaatgacaattgctaagcacaccattaccactattttggacactctcggggagaatgattttattaatataattgcttacaatgattacgtacactacattgagccgtgttttaaagggatcctggtgcaggctgacagggataatagagagcacttcaagctcctagtcgaagagctgatggttaagggggttggggtagtggaccaggcattgagggaggcttttcagatacttaaacagttccaggaagctaagcagggctctctgtgtaaccaggctatcatgttgatctcagacggcgctgtggaagattacgagccagtcttcgagaaatacaattggccagactgcaaggtgcgggtgtttacttatctgattggaagggaggtctccttcgcagacagaatgaaatggatagcttgcaacaataagggatattatacccagattagcacgctggccgatactcaggaaaatgtcatggaatacctccatgtgcttagtcggccaatggtgatcaatcacgatcatgacatcatctggaccgaggcctacatggactctaaactgctgagctcccaggctcaaagtctcactctcttaacaacagttgccatgcctgtatttagcaaaaaaaacgaaaccagaagccatgggatcctccttggggtcgtgggatccgatgtggcccttcgtgaactgatgaagctagctcctcggtataaactgggggtgcacggatatgctttcctcaacaccaacaatggctatattctgtctcaccccgatctccgaccattgtacagggaggggaagaaactcaagcccaagccaaactataattccgtggacctcagcgaggtggagtgggaggaccaagctgaatccctccggacggctatgataaatcgtgaaacaggcacattgtccatggatgtgaaggtccccatggacaaggggaaacgggtcctcttcctgacaaacgactacttttttactgatatctccgatacgcctttctcactgggggttgttctgtcacgagggcatggcgagtatattttgctggggaacacttcagtggaggaaggcctccacgatctattacatcccgacttggctttggccggagattggatatattgcattaccgatatcgaccctgaccatcggaaactgtctcagctggaagcgatgatacgattcctgacgcgcaaggatcctgatctggagtgtgatgaggaactggttcgcgaggtgctgttcgatgcagtggtgactgcccctatggaggcatattggaccgcgctggctttgaacatgtcggaggaatctgagcacgtggtcgatatggcatttttgggaacaagggccggtctcctgcggtcctccctcttcgttggatctgagaaggtttcagatagaaaatttttaactcccgaggatgaggcttctgtcttcacgctcgaccgattcccattatggtatagacaggcttcagagcatcctgctggaagcttcgtatttaacctgcggtgggctgaaggccctgagtctgccggtgaaccaatggttgttaccgcaagcacagccgtcgcagtcacagtggacaagcggacagctatcgcagcagctgccggagtacaaatgaagcttgagttcctgcaacggaagttttgggccgctacaaggcagtgtagtacagtggacggaccctgtacacagtcctgtgaagattcagatctggactgtttcgttatagataataacggattcatcctgatcagcaagcgatcccgagagaccggtcgttttttaggggaggttgatggagccgtgctcacccaactcctgtcaatgggcgtgttctctcaagttacaatgtacgattatcaggccatgtgcaagccatcttcccaccatcacagtgcagctcagcctttggtctcgcccatctccgccttcctgactgctacacgatggctgcttcaggaactagtgctgtag

SEQ ID NO: 216572 - DNA, 3414 bp, synthetic construct
  misc_feature 1..3414: note = Description of Artificial Sequence: Synthetic coding sequence
  source 1..3414: mol_type = other DNA
atggtctgtggttgttcagctctgctgcctcttcccaatcctaggcctaccatgcctgcaacgccgaacttccttgcgaatccgagctcttcttctcggtggattcctctgcagccgatgcccgttgcatgggcattcgtccagaaaacttcagcattgctttggttactcttgcttggaacaagtctgagtcctgcttggggccaagcaaaaatccctcttgaaactgttaaactatgggcggacactttcggtggagatctttataacacggtgaccaagtattcgggttctctcctgctgcagaagaaatacaaagatgttgagtcatcactgaagatcgaggaagtggatgggctagagctggtccgaaagttcagcgaggatatggaaaacatgctccgccgaaaggtcgaagccgtccagaacttggtggaggcagccgaggaagcagatctgaaccacgagtttaacgagtctctggtgtttgattactacaacagcgttcttatcaatgagagggatgagaaggggaacttcgtggagcttggcgctgaattcctactcgaatcaaacgcacacttctcgaacctgcctgtaaatacctctatttcgagcgtacaattacccactaatgtttacaataaggaccctgacatcctcaatggggtgtacatgagcgaggccctgaatgcagtatttgtcgagaatttccagagggaccccactctcacttggcagtactttggaagcgcaacaggtttttttagaatctaccccggaatcaagtggaccccagatgagaacggagtgataacgtttgattgtcgtaatcgcggatggtacattcaggccgctacaagtcctaaggatatcgttatactcgtggatgtatccggctccatgaaagggcttcggatgacaattgccaagcacaccatcaccactatcctggataccttgggtgagaacgattttatcaatatcattgcatacaacgattatgtgcattacatcgaaccctgttttaaggggatcctggtgcaggcagacagagacaatcgggaacatttcaagctgctcgtggaggaactgatggtcaaaggggttggagtggtggatcaggcattgcgagaggcatttcagattcttaagcaatttcaagaggccaagcagggcagtctctgcaatcaagctatcatgttgatcagcgacggcgcagttgaggattatgagccggtgttcgaaaaatacaattggccagactgcaaggtcagggtgttcacttatttgataggcagggaggtgtcattcgccgataggatgaagtggatcgcatgcaacaataaagggtactacacacagataagtacccttgccgacacgcaagagaatgtcatggaatacttgcacgtgttgtcaaggcctatggttatcaatcacgatcacgatatcatttggaccgaggcctatatggactctaagctcctgtctagtcaggctcaatctcttaccctccttaccacggtggctatgccagtgttctcaaagaagaatgaaacacggagccacggaatcctgttgggcgtggtggggtccgatgtggcccttagagaactgatgaaactcgctcctagatacaagctcggggtgcacggatacgcgtttctgaacaccaataatggttacattctcagtcacccagacctgcgacccctgtaccgcgaggggaagaagcttaagcctaaacctaattacaattcggtggatctgagcgaggttgagtgggaggaccaggccgagtccctgcgaacggctatgatcaatagggaaactgggaccctgtccatggatgtaaaagtgcctatggacaaaggcaagagagtgttatttcttactaatgactacttctttacagacatctccgacacccccttctccctcggggttgtgctgtcgcgaggccatggagaatacatcctgctggggaacacaagcgtggaagagggtctgcacgacttactccatcctgatttggcactggccggtgattggatatactgcatcactgatatcgatcccgaccatcgcaagttgagccagcttgaagctatgatcaggtttctgacacgaaaagatccagatttagaatgtgacgaggagcttgtaagggaagtgttgtttgacgcagtggtcaccgcacccatggaagcctattggacagccctcgctctcaacatgagcgaggagtccgagcatgtggtcgacatggctttcctggggaccagagccggtctacttcgctccagtctcttcgttggctcagagaaggtgtcagatagaaaatttctgactccagaggatgaagcctccgtcttcactctggatagatttccgctttggtatagacaggcctccgagcatccggctggatctttcgtttttaatctcagatgggcagaggggccagagtctgctggggaacctatggtggtgacggcctctaccgccgtggctgtgaccgtcgataagcgcactgccatagctgcagctgcgggagtgcagatgaaactagagttcctgcagaggaagttctgggcagcaactcggcagtgttctacggtggatgggccttgtacccaatcatgcgaggacagtgatctcgactgctttgtcatcgataacaacggatttatcctgatttcaaagcggagccgagagacagggagattcttgggagaggttgacggggctgttctcacccaattactttctatgggcgtcttctcccaggtgaccatgtatgactaccaggccatgtgcaagccatcttctcatcatcattccgccgctcaacccctcgttagtcctatttcagcctttctgaccgccacacgatggttactccaggagctcgtgttgttccttctggagtggagcgtgtggggcagctggtatgatagaggagccgaagccaaatccgtatttcatcatagccacaaacacaaaaaacaagatcctttgcagccatgcgatacggagtaccctgtgtttgtttatcaacccgcaattagagaggccaatgggattgtggagtgcggcccttgccagaaggtgtttgtggtgcagcagatccctaattcaaacctgctgctactcgtcactgatcctacatgtgactgctcaatatttcctccggtgctccaggaagctacggaagtcaagtataatgcttcagtaaagtgcgaccggatgcgctctcaaaaactgcggaggcggcctgacagttgtcatgcctttcatccagaagagaatgcccaggattgcggtggggcatcagacacttcagcctccccaccactcctgctactacccgtgtgcgcgtggggattgctaccccagctgctccgttag

SEQ ID NO: 216573 - DNA, 3222 bp, synthetic construct
  misc_feature 1..3222: note = Description of Artificial Sequence: Synthetic coding sequence
  source 1..3222: mol_type = other DNA
atggccgtcgctctaggaactagaagacgagaccgcgtaaagctttgggcggacacatttgggggagatctgtacaatacggtgaccaaatactccggtagtcttctacttcagaaaaaatacaaggatgtcgagtccagtctgaagatcgaggaagtggatggcctggagctcgtcagaaagttctctgaagatatggaaaatatgttacgccgtaaagtcgaggcggtacagaacctcgttgaggccgctgaagaggccgaccttaaccacgagttcaacgagtcactcgtctttgactactacaattcagtcctgatcaatgagagagatgagaaagggaactttgtggagctgggggctgagttcctgttagagtctaacgcgcatttttctaacttacctgtgaataccagcatctcttcagtccaactccccacaaatgtgtataataaggaccccgacattctgaacggagtgtacatgagtgaagctctgaacgcggtctttgtggagaatttccagcgagacccaacgttgacgtggcaatatttcgggtcagccacgggcttttttaggatctatccaggtattaaatggaccccagatgaaaatggggtcattacattcgactgccggaacaggggatggtacatccaagcagccacaagcccaaaagacattgtgatccttgtcgacgtgagtgggtccatgaagggcctccgcatgacaatagcgaaacacaccattacgacaatcctcgataccttgggcgaaaatgacttcataaacatcatcgcctacaacgattatgttcactacattgaaccgtgtttcaagggaatcctggtgcaggccgatcgtgataatcgcgagcatttcaagctattggtggaagaactaatggtgaagggggtgggagtagtggaccaggcactccgtgaagctttccagatcctgaagcagttccaggaggccaaacaagggtcattgtgtaatcaagctattatgctgatctctgatggcgcagttgaggactatgaaccagtcttcgagaaatacaattggcccgattgcaaggttcgtgtcttcacataccttatcggccgagaagtgtcatttgcggaccgaatgaagtggattgcctgcaacaacaaaggttactacactcaaatcagcaccctcgcagacacccaggaaaatgtaatggaatatctgcacgtcctgagccggccaatggtgatcaaccacgatcatgacatcatctggactgaagcctacatggactcgaaactgttgagttctcaggcccagagtctgacgctactcactactgtcgctatgcccgtttttagcaagaagaacgagactcggtctcatggtattctcctgggtgtggttggaagtgacgtggccctgagggaactcatgaagcttgctccccgatacaaattgggcgttcacggctacgcattcttgaatacaaataacggatacattctgagtcatccagacctgcggccactgtatcgggaaggaaagaagctcaagccgaaacccaactataatagcgtggacctcagtgaagtggaatgggaagatcaggccgagagtctgagaaccgcgatgattaatcgcgaaacgggaaccttgagcatggacgtcaaggtgccaatggacaaagggaagagagtgctatttctgacaaacgactacttcttcacagatatcagcgatactcccttctctctgggggtcgtgctatcaaggggtcacggggagtatatcctattggggaacacgagtgtcgaagagggtctgcatgaccttctccatccggatctggccctggccggagattggatttattgcatcacggacattgacccagaccatagaaagcttagccagctggaagccatgatccgctttcttacacggaaagatcccgatcttgagtgcgatgaagagcttgtgagggaggtgctctttgatgccgtggtgaccgcccctatggaggcctattggaccgccctggccttgaatatgagcgaagagagtgaacatgtggtggatatggcatttctcggtaccagagccggtcttcttaggtcttccctgtttgtcggaagcgaaaaagtctcagaccggaagttcctcacgccagaggacgaggccagcgtcttcactctggatcgattcccactctggtatagacaggcctcggagcaccccgcaggatcatttgtgttcaatcttcgctgggcagaaggacctgaatcggccggagaacccatggtcgtcactgcgtcgacagccgtcgcagtcaccgtcgacaagcggaccgctatcgccgcagcagcgggagttcagatgaaactggaatttctgcagcgcaagttctgggctgccacaaggcaatgctccacagtcgacggaccatgtacccaatcatgcgaggacagtgatctggactgttttgtcatcgacaataacggctttatcttaatctcaaagaggtctcgtgaaactggaaggttcctgggagaagtggatggtgccgtactaacccagctccttagcatgggggtgttcagtcaggtgacgatgtacgactatcaggcaatgtgcaagccaagtagccaccatcattccgcggcacaaccgctggtgtcacctatctctgcgtttctgacggcaactagatggctgttgcaggagttagtactgttcctcctcgaatggtctgtatggggaagttggtatgacagaggggctgaggctaaatccgtcttccaccattctcacaagcacaaaaaacaggacccactacagccatgtgacaccgagtatccagtctttgtgtaccaacccgcaatccgcgaagctaacggcattgtggagtgcggcccatgccagaaagtgtttgttgtgcagcagattcccaacagcaatctgttgctgcttgtgacagaccccacgtgcgattgctcaatttttccgccagtgttgcaagaagctactgaagtgaagtataatgccagcgtgaaatgcgacaggatgagatctcagaaattaaggcgcaggcccgactcttgtcacgcttttcacccagaagaaaatgcccaagactgcggaggtgctagcgataccagtgcatcccctcctctgcttctgctgcctgtgtgcgcttggggtctcctgccacaactgctgagatag

SEQ ID NO: 216574 - DNA, 615 bp, synthetic construct
  misc_feature 1..615: note = Description of Artificial Sequence: Synthetic coding sequence
  source 1..615: mol_type = other DNA
atgtacgactatcaggccatgtgtaaaccatctagccaccaccattcggcagcccaaccactcgtgagtcccatctccgccttcctcacagcaacaagatggcttcttcaggagctcgtgttatttttgctggaatggagcgtatggggaagttggtatgaccggggtgccgaggcgaaaagtgtgttccatcactctcacaaacacaaaaaacaggacccgttgcagccttgtgataccgagtacccagtattcgtataccagcctgcaatccgcgaggctaacgggatcgtggagtgtggcccttgccaaaaggtgttcgtcgttcagcaaattcctaattccaatcttctgctccttgtcactgaccctacctgcgactgttctatttttcctcccgtgctgcaggaagccacagaggtaaaatataacgcatcagtcaagtgcgatagaatgcgctcccagaagttgcggcgtcgtcctgatagctgtcacgccttccatcctgaagagaacgctcaggactgcggaggggcttcggatacttctgcctcgccccctctgctacttctcccggtatgtgcctggggtctgctgcctcagttgttgcgatag

SEQ ID NO: 216575 - DNA, 615 bp, synthetic construct
  misc_feature 1..615: note = Description of Artificial Sequence: Synthetic coding sequence
  source 1..615: mol_type = other DNA
atgtacgattaccaggccatgtgcaaaccctcttcacaccaccactccgctgctcagccacttgtctcccctatctccgcttttctgaccgcaactagatggcttttgcaggagcttgtgctgttcctgttagagtggtctgtgtgggggtcatggtacgataggggcgcagaggccaaaagtgtattccatcatagccataagcacaaaaagcaggaccctctgcagccgtgtgacacggaatatcccgtgtttgtctatcagcccgctatcagagaggccaacggcatagtggagtgtgggccttgtcagaaggtgttcgtcgtacaacagatcccaaacagcaatcttctcctgctagtaacagacccgacctgcgactgtagcatctttcctcctgtcctacaggaggccacggaagtaaaatataacgcttcagtcaagtgcgatagaatgcggagccaaaaactgcgcagacgcccagattcctgccacgcgttccaccccgaagaaaacgctcaggattgcggaggcgctagtgataccagcgcctcaccccctctgctcttgctccctgtctgcgcttggggactgctgccccaactgttgcgttag

SEQ ID NO: 216576 - DNA, 804 bp, synthetic construct
  misc_feature 1..804: note = Description of Artificial Sequence: Synthetic coding sequence
  source 1..804: mol_type = other DNA
atgaaactggagttcctgcagcgcaagttctgggccgcaacaaggcaggacctggactgcttcgtgatcgataacaatggttttattctgatttcaaagcgctcgcgggagacaggtcggttccttggggaagtggacggggcagtccttacccagctcttgagcatgggagtcttcagccaagttactatgtatgactaccaagctatgtgtaaaccctcatcccaccaccattcagcagcgcagcccctcgtaagcccaatcagcgcttttctgacagccaccaggtggctgctgcaagaactagtactgttcctcctggagtggagcgtgtggggctcatggtacgatcggggtgcggaagcaaaatcagtgtttcatcactcccacaaacataagaagcaggatccgctgcagccttgcgatactgagtatccagtcttcgtgtatcagccagccattcgagaagctaacgggatcgtcgagtgcggcccttgccagaaggtgttcgtggtccagcaaattccaaactctaatctgctgctacttgtgacagaccccacttgcgactgcagcatcttccccccagtgctgcaagaggcaactgaggttaagtacaacgcctctgtgaaatgcgaccgaatgagaagccaaaaactgcgcaggcggccagatagttgccatgcttttcatcccgaagagaatgctcaagattgcggaggagcctccgacacatcggcttcccctcccctgctgctactgcctgtctgcgcatggggcctcctgccccagctgctgagatag

SEQ ID NO: 216577 - DNA, 615 bp, synthetic construct
  misc_feature 1..615: note = Description of Artificial Sequence: Synthetic coding sequence
  source 1..615: mol_type = other DNA
atgtatgactaccaggcaatgtgtaagccaagttcccaccatcacagtgctgcgcaacctcttgtatcccccatctcagcgttcctgactgccacacgctggctcttgcaggagcttgtgctgttcctgctggaatggtctgtttgggggtcctggtatgaccgtggggcagaggccaaatccgtgttccaccactctcacaaacacaaaaagcaggaccccctgcagccctgtgacacagaataccctgtgttcgtctatcaacccgctatccgagaggcgaacggaatagtggagtgcggcccatgtcagaaagtgtttgtggtgcagcagatcccaaactccaacttattgttattagtaacggacccaacatgcgattgttctatcttccctccggtactccaagaagcaacggaggtgaagtacaacgcatctgtgaagtgtgacagaatgagaagtcagaaactccgacgacgacccgacagctgccacgctttccaccccgaagagaacgctcaagattgcgggggagcttccgacacttcagcatcgccccctctgctattactgcccgtgtgcgcctggggactgcttccccagctgctgaggtag

SEQ ID NO: 216578 - DNA, 1572 bp, synthetic construct
  misc_feature 1..1572: note = Description of Artificial Sequence: Synthetic coding sequence
  source 1..1572: mol_type = other DNA
atggtgcagaaaacttccatgtcaaggggaccctatcccccatctcaggagattccgatggaagtattcgacccttccccacaaggcaaatacagtaaacggaagggcaggtttaaaagatccgatggctcaacctcctctgacactacctcaaactccttcgtccggcagggctctgcggaatcttacacctccaggccctccgactctgatgtttcccttgaggaggaccgcgaggcgcttaggaaagaagccgagagacaggcactggcgcaattggagaaggccaaaacaaaacctgttgcattcgccgttcgaactaatgtgggctataacccttctccaggcgatgaggtgcccgtccagggtgttgcgattacgtttgaacctaaggatttcctgcacatcaaagagaaatacaacaacgactggtggataggtcgactggttaaggagggctgtgaagtgggatttattccctcacctgtgaaactagacagcctgagactcctgcaggagcaaaagcttcgccagaatcggctgggatcatcaaagtcaggtgacaacagttcctccagtttaggcgacgtcgtgactggaacaagacgccctacaccaccggcaagcggcaatgagatgaccaacctggccttcgagctagatcctctcgagcttgaggaagaggaagccgaactgggcgagcaatccggttccgcgaaaactagcgtcagctcagttaccacccctcccccacatgggaaacgcattcccttttttaaaaagaccgaacatgtgcctccatacgacgtcgtgccctccatgagacctattattttagtgggaccgagtctaaaaggttacgaggtgaccgatatgatgcagaaggcgctcttcgacttcctcaagcacaggtttgacggccgaatctcaataaccagagtgaccgctgatatttctctcgccaaacggtccgtactcaataacccctccaaacacattattattgagaggtcgaacactcgttcatctctggccgaagtccagtctgagatcgagagaatcttcgagctcgcacgcacactgcagttagtggctctggatgccgacaccattaaccaccccgcacagctcagcaaaacgagccttgcgccaattatcgtttatataaagattactagcccaaaggttctccagcgactgattaagagccggggtaaatcccaatctaaacacctcaacgtgcaaattgctgcgagcgaaaaactggctcagtgtcccccagagatgtttgatattatcctcgacgagaaccagttagaggacgcttgcgaacatctagcagagtacttggaggcttattggaaggcaacacatcccccatcttccacccccccaaatcccctgctgaacagaactatggccaccgctgcacttgccgctagccccgcaccggtgtccaatttacaggtgcaagtattgactagccttaggcgtaacttagggttttggggcggtcttgagtcctcccagcgcggaagcgtggtgccacaagaacaggaacacgcaatgtag

SEQ ID NO: 216579 - DNA, 1797 bp, synthetic construct
  misc_feature 1..1797: note = Description of Artificial Sequence: Synthetic coding sequence
  source 1..1797: mol_type = other DNA
atggtgcaaaaaacatccatgtctcgcggtccctatcctccatctcaggagatcccaatggaggtgttcgatccctcaccccaggggaagtactccaaaagaaaaggcaggttcaaacggtcagatggcagcacttccagcgataccactagcaactcattcgttagacaggggtccgcagaatcatacacctcccgtccaagtgactctgacgttagcctggaagaggaccgcgaggctctccgcaaggaagccgaacggcaggccctcgcacaactcgaaaaagccaagaccaagccagttgctttcgccgtacgcactaatgtcggatataatccttcccccggtgacgaggtgcccgtgcagggtgtcgccatcacctttgaacccaaagacttcctccatatcaaggaaaagtataataatgattggtggataggcagactggttaaagagggctgcgaggtcggctttatcccaagcccggtaaaacttgacagcctcagactgttgcaggaacaaaaactacgccagaaccggctcggaagctcaaaaagtggagacaattccagctcttcattaggagacgttgtgactggaacacgaagacccacccctcctgcatcggcgaagcagaaacagaagagcactgagcacgtccccccttacgacgtggtgccctcgatgcgcccaatcatccttgtgggcccatctcttaaagggtatgaggtgactgacatgatgcaaaaggcactctttgactttttgaagcatagatttgacgggaggatttcaattacccgcgtcacagcagatatctcgttggccaagcgatctgtcctgaacaatccgtcaaagcacatcattattgagcggagtaacacacgctctagtcttgcggaggtgcaaagcgagattgagcggatcttcgagctggccagaaccctacagctcgtggccctcgacgccgacaccataaaccaccccgcacagctgtccaaaaccagtctcgccccaattatcgtgtacatcaagattacttctcccaaggtgcttcaacggctcattaagtctcggggtaagtcacagtcgaaacatcttaatgttcagatcgctgcatcagagaagctcgcccaatgcccgcctgagatgtttgacatcattcttgacgagaatcagctcgaagatgcgtgcgaacatcttgctgaatatctggaggcttactggaaagctacccatccccctagcagcactcctcctaaccccctgctgaaccggaccatggctactgcagctctcgccgctagtcctgcccctgtatccaatctccaagggccttacctggcttcaggtgaccagcccctggaaagggcaacaggcgagcacgcctctatgcatgaataccctggcgaactgggccagccacccggtctgtatccgagctctcacccaccaggtagagctggcacactgcgcgctctgtccaggcaagacacctttgacgccgacacccccggatcaagaaattccgcttatacggaactgggtgattcttgtgtcgacatggaaaccgacccttccgagggaccaggcctgggcgatccggctggcggaggtaccccgcctgcccgacagggctcttgggaggatgaagaagaggattatgaagaggagctgaccgacaatcgcaacagggggaggaataaagcacgatattgtgctgaggggggaggacctgtgctggggaggaataaaaacgaactggagggctggggaaggggtgtatacatcaggtag

SEQ ID NO: 216580 - DNA, 1437 bp, synthetic construct
  misc_feature 1..1437: note = Description of Artificial Sequence: Synthetic coding sequence
  source 1..1437: mol_type = other DNA
atggttcagaagacctccatgtccaggggcccatatccacccagtcaggagattccaatggaggtctttgatccgtcacctcagggcaaatattctaaacggaaagggagattcaaaagatctgatggatcaaccagctccgacacgacgtccaacagtttcgttaggcagggcagcgctgaatcctatacaagtcgcccttcagactccgatgtctccttagaggaggatcgagaggctctaaggaaagaggcagagagacaggctctggcccaactggaaaaagcgaagactaagcccgtggccttcgctgtgcgcaccaacgttggctacaatcctagccccggtgatgaagtgccagtgcagggggtcgctatcaccttcgaaccaaaggacttcctgcacatcaaggagaaatacaacaatgattggtggatcggccgactggtcaaagagggatgcgaggttggtttcattccgtccccagtgaagcttgattcactccgattgctccaagagcagaagttaaggcagaaccgcttgggatccagtaagtctggcgataattcaagttctagtctgggggacgtagttaccggaacacggaggccaacaccccctgcttctgcaaaacagaagcaaaagagcaccgaacatgtaccgccttatgatgtggtgccctcaatgaggccaattatcctcgtcggaccctctcttaagggctacgaggttaccgacatgatgcagaaggccttgttcgattttctaaagcaccgttttgacggcaggatctcaattacccgcgtgaccgcagatatcagccttgccaaacggtccgttctcaataacccttctaaacatatcatcattgagagatcaaatactaggtcttcgctggctgaggtgcagagcgaaatcgaaagaatctttgagctggcaaggactttgcagctcgtggccttagatgctgacaccataaatcaccccgctcagctgtcaaagacgtcattggcgccaattatagtgtatatcaagatcaccagccctaaggttctgcagcgattaattaaatccagaggcaagtcccagtccaagcatttgaatgttcaaattgccgcaagcgaaaagctagcacaatgtccccctgaaatgttcgacattatcctggacgaaaaccagctggaagatgcctgcgagcacttggctgagtacctcgaagcctattggaaagctacgcaccccccttccagtacccctcctaaccccttactgaatagaaccatggctacagccgcacttgccgcatctcccgcacccgtttctaacctacaggttcaagtgctgactagcctgcggagaaacctgggattttgggggggtctggagtcctcccaaaggggctctgtggtgccccaggaacaggagcatgcaatgtag

SEQ ID NO: 216581 - DNA, 1290 bp, synthetic construct
  misc_feature 1..1290: note = Description of Artificial Sequence: Synthetic coding sequence
  source 1..1290: mol_type = other DNA
atggaggctccatctaggactgtcgtcgtgggcagcgcagagagctacacatcccggccatctgattcagacgtcagccttgaggaagaccgagaggcgctgcgcaaggaggcagaaagacaggcactcgcacagttggaaaaagctaaaactaagcccgtggcctttgccgtgaggacaaatgtcggctacaatccctccccaggggatgaggtccctgtgcagggcgtggcgattaccttcgagcctaaggatttcctacatattaaagagaagtacaacaacgattggtggattggtcgccttgtgaaggaaggttgcgaggtgggatttatccccagcccagtgaagctggacagcctcaggctgttgcaggagcagaagctaaggcagaatcggctcggttcctcaaagagcggtgacaacagctcttccagcttaggcgatgttgtgacaggaacccgacgtccaacccctcccgctagtgattctccagtgcagaccgagcatgtgcctccctacgacgttgtcccctcgatgcgcccaattattttggtgggcccaagcctgaaaggctacgaggtaaccgatatgatgcagaaagcactgttcgactttctaaagcaccgcttcgacggcagaatttccatcactcgggttaccgccgacatctcccttgccaagcgcagcgtactgaacaacccttccaaacacattatcattgagagatcaaacaccaggagctcccttgctgaggttcagtctgaaatcgaacgaatctttgaactggctcgcaccctgcagctggtggcactggacgccgatactatcaaccatcccgcacagctgtctaagaccagccttgctcctatcattgtgtacattaagatcacgtctcctaaggtactccagcggctgattaaatctagggggaaaagtcaaagcaagcatctcaacgtccaaattgcagcttcagagaaactggcacagtgtccaccggagatgtttgatatcattctggacgaaaaccagttagaagatgcttgcgagcatctggcagaatacctggaagcttactggaaggctactcatccgccttcttccactcctcccaacccacttcttaatagaacaatggcaactgcagccctggctgcttctccagcccctgtgtcgaatctgcaagtgcaggtgctgacatccctgaggcgcaatttggggttctggggcggactcgagtccagtcagagggggagcgtcgtcccacaggaacaagagcatgccatgtag

SEQ ID NO: 216582 - DNA, 1647 bp, synthetic construct
  misc_feature 1..1647: note = Description of Artificial Sequence: Synthetic coding sequence
  source 1..1647: mol_type = other DNA
agcgggtccctgtatttccagggaagtgctgaatcttacaccagtaggcctagcgactcggatgttagccttgaggaggatcgggaggcgctgcggaaggaggcggaaagacaggctttggcccagctggaaaaagctaagactaaacctgttgccttcgcggtgagaacaaatgtcgggtacaatccaagtcctggcgacgaagtgccggtgcaaggcgtggccattacttttgagccaaaagatttcctgcatatcaaggagaaatacaataacgattggtggatcggtagattggtgaaggaaggttgtgaagtggggtttatcccatcacctgtgaaactcgactcccttcgcttgctccaggagcagaagctgcggcagaatagattgggatccagcaaaagcggagacaatagttcctctagcttgggggatgttgtcactggtactcgccgtcctacgccccctgcttcagggaaatcccaccggcacgcaacagaacacgtcccaccctacgatgtggtccctagcatgagaccgattatcctcgtgggaccatctctcaaggggtacgaggtcacggatatgatgcaaaaggccttattcgactttttgaagcatcgattcgatgggagaatctccattaccagggtgaccgctgacatatctctggccaaaagatccgtgttgaacaatccatccaagcacattatcatagagagatccaatacaaggtcttccttggctgaggtacagagcgaaattgaacggatttttgagctggcacgcaccctccagttagttgctctggacgccgacaccattaatcaccctgcccaacttagcaaaaccagcctggctcccataattgtgtacattaaaatcacctctcctaaggtgctccagcgcttaattaaatcccggggtaagtcccaaagtaaacaccttaacgtgcaaatcgccgctagtgaaaagctcgctcagtgcccaccagagatgtttgacatcatcctggacgagaaccagctcgaagacgcatgtgaacatcttgctgagtaccttgaggcctactggaaagcaacgcacccaccgtcatcgactcccccaaatccattgctgaatcgcacaatggccactgccgcacttgccgcatcgccggcacccgtctccaacctgcaaggaccttacttggcgtcaggagatcagcccctggaacgcgcaacaggcgagcatgccagtatgcatgaataccctggtgagttagggcagcctcctggcctgtatccctccagtcatccaccaggccgtgccggaactctgcgcgcactgtccagacaggacacgtttgacgctgatacccccggttcaagaaactccgcttacaccgagttaggcgattcttgcgttgatatggagacggatccatccgaggggccaggcctgggagacccagccggtgggggaacaccccctgctcgtcaaggcagttgggaagacgaggaggaagactatgaggaggagctcaccgacaataggaatcggggacggaataaagcccgttattgtgccgaaggcggaggcccagtgctgggacggaacaaaaacgagcttgagggatggggaaggggcgtctacatccgctag

SEQ ID NO: 216583 - DNA, 1899 bp, synthetic construct
  misc_feature 1..1899: note = Description of Artificial Sequence: Synthetic coding sequence
  source 1..1899: mol_type = other DNA
atgaaccaaggcagcggtcttgacttattaaagatctcttatggcaaaggagcaaggcgcaaaaatcggttcaaggggtccgatggatcgactagcagtgatacgacttccaactcatttgtccgtcagggcagcgccgacagctacactagcaggccctctgacagtgacgtgtctctggaagaagatcgggaggcggtcaggagagaggcagagcgtcaggcccaggctcaactcgagaaagcaaaaaccaagcctgtcgccttcgctgtgaggacgaatgtgtcttatagtgcagcccatgaggatgatgtgcccgtgcccggaatggccatctctttcgaggctaaggatttcctccacgtgaaggagaagttcaacaatgattggtggatcgggagactcgttaaagaaggctgtgagattgggttcattcccagtcctgtgaaattagagaacatgaggcttcagcatgaacagagagccaaacaaggcaagttttactcaagcaagagtggcggaaactccagtagcagtctgggagatatcgttccatcctccagaaagtcaacaccccctagttcagcgatagatatcgacgctactggcttagacgccgaggagaatgatattcccgctaatcacaggtcgcccaaaccatcagcgaattcggtgacttccccgcactccaaagaaaaaaggatgccattcttcaaaaagaccgagcacacaccaccctacgatgtcgtgccttccatgcggcctgtggtgctggtcggcccttccctgaaagggtatgaagtcaccgatatgatgcagaaagccttatttgacttcctgaagcaccgattcgagggaagaatctccatcacgcgggtcacagccgatatatcactcgccaagcgttctgtcttgaataaccccagcaagcacgctatcatcgaacgctccaatacccgcagctccctggccgaggtacagtccgaaattgagaggattttcgaactcgctcggaccctgcagctcgtggtgctggatgcggacaccattaatcacccagcgcagctgtctaaaactagtctggctcctatcatcgtgtatgtgaagatcagcagtcccaaagtattgcaaaggctcattaaaagtcgcggtaaaagccaagccaaacacctgaatgtgcagatggtggccgcagacaagctggcccagtgtcctcccgagctattcgatgtaatccttgacgaaaatcagctcgaggacgcctgcgagcatctggccgactacctcgaagcctattggaaagccacacaccctccttcctcaagtctccctaatcctctgctgagccgtacacttgccactagcagtcttcctctaagcccgacactggcctctaacagccaaggaagccagggggatcaacgcacggacagaagcgcgccaattcgatccgcatcccaggctgaggaagaaccctccgttgaacctgtaaaaaagtcacagcaccggagttcctcttccgccccacaccacaaccaccgcagcgggacttcccgaggtctcagccggcaggagactttcgactcggagacacaggagtcacgcgattccgcttatgtcgaacccaaggaggattacagccacgaccacgtagaccattatgcgtcacaccgggaccataaccatcgggacgaaacccacggcagttctgaccaccggcacagggagagccgccacagaagccgcgacgtggatagggagcaggatcacaacgagtgcaacaaacagcggagtagacacaaaagtaaggataggtactgcgaaaaagatggcgaggtcatttctaaaaaaagaaacgaagctggcgaatggaacagagatgtgtatataaggcagtag

SEQ ID NO: 216584 - DNA, 1983 bp, synthetic construct
  misc_feature 1..1983: note = Description of Artificial Sequence: Synthetic coding sequence
  source 1..1983: mol_type = other DNA
atggtgcagagggacatgagtaaatccccccctacagctgccgctgccgtagcccaggaaattcaaatggaactcctggaaaacgtagctcccgctggagctctcggcgctgccgctcagtcctacggaaagggggctaggcggaaaaatcgcttcaagggctccgacggctccacctctagtgataccacttctaacagctttgtcaggcagggatcagccgatagctacacgtctcgcccaagcgattctgatgttagtttagaagaagaccgcgaggcagtgagacgggaagcagagcgacaggcacaggcacagctcgaaaaggccaagacaaaacccgtcgcttttgccgtccgaacgaacgtgagctactcagccgcacatgaggacgatgtgccagtccccggaatggccatttcctttgaggcaaaggacttcctacatgtgaaagagaagttcaacaatgactggtggatcggcagacttgtgaaggaaggttgtgagataggcttcatcccaagtcctgttaagctcgaaaatatgaggctccagcatgaacagcgagccaaacaagggaaattctatagcagtaagtccggaggaaactcctcctcctccctgggcgatatagtgccttcatctcgcaaatctacccctccctcaagcgctatagacatcgacgcgaccggcctcgatgctgaggagaatgacatccctgctaaccaccgttcgcctaaaccctcagccaactcagtgacgagtccccactcaaaggagaagcgcatgccattctttaagaagaccgagcatacacctccctacgatgtcgttcccagcatgagaccagtcgtcttggtgggtccaagcctaaaggggtatgaagtcaccgatatgatgcaaaaggcattatttgactttctgaaacatagattcgaaggcagaattagcataacaagggttaccgctgacatttcccttgccaagagatcagtcctaaataacccatcgaaacacgcaatcatcgaacgatctaacacaaggagttcgctcgccgaagtgcaatctgaaatagaaagaatcttcgaactcgcgagaacactccagctagtggtgttggatgctgacacgattaaccacccggcacagctttctaagacctctttggcgcctataattgtgtatgtcaaaatctctagcccgaaagttcttcagcggctgatcaagtcccgtggcaagagccaggcgaaacacttaaacgtccagatggtcgccgcagacaaactggctcagtgtcccccagagctctttgacgtcattctggacgagaatcaactggaggacgcatgtgaacacctcgcagactacttggaggcctactggaaagccacacacccaccttcctccagcctgcccaaccctctcctgtcacggacactcgcaacatcctccctgccgctgtctcctactctagcaagcaactcacagggctcccagggtgaccagcgcactgaccgctccgccccaataagaagtgcctcacaagccgaggaggagccttctgtggaacccgtaaaaaagagccagcatcgcagttcctcctcagcccctcaccataatcatagaagcggcacaagtaggggtctgagcagacaagaaacgtttgactccgagacccaggagtctagggattcagcctatgtcgaacctaaggaagattattctcacgatcacgttgatcattatgcctcccacagagatcacaaccacagggacgagactcatggcagctcagatcatcgacacagggaatctcgtcacaggtcgcgggacgtcgatagggaacaggatcacaatgaatgcaataaacagcggagccggcataaatccaaggatcggtactgtgagaaggatggagaggtgatatcaaagaaaagaaacgaagccggagaatggaatcgggacgtgtatatccggcaatag

SEQ ID NO: 216585 - DNA, 1911 bp, synthetic construct
  misc_feature 1..1911: note = Description of Artificial Sequence: Synthetic coding sequence
  source 1..1911: mol_type = other DNA
atggtgcagagagacatgtctaaatccccgccaacggcagccgcagcagtggcgcaagagatacaaatggagctgctggaaaatgtggccccagcaggagctcttggggcagccgctcaaagttacggaaagggcgcacggcgaaagaacaggttcaagggttccgacggctctacctcctccgataccacaagtaactccttcgtacgccagggcagcgctgactcttatacttctcgcccatccgactctgacgtcagtttggaagaggacagggaggccgtccgaagggaagccgagcgccaggcccaggcccagctggagaaggctaagacaaagcccgttgcctttgccgtgcgcacaaacgtgagttacagcgcagctcatgaagatgacgtaccagtgcctggtatggcgatctctttcgaggccaaagacttcctgcacgttaaagagaagtttaacaatgactggtggattgggagactggttaaagagggttgcgagataggcttcatcccaagtcctgtgaagctcgaaaacatgagactgcagcacgagcagcgagccaagcagggaaaattctactccagcaaatccggcggtaatagttcttcctccctgggggatatagtcccttcctcacggaagagcacgcctccttctagcggcgctaaatcggccgatgaacaggatcagtggaagaccgcaggcctcttctggcggtttacaacagagcacactccaccttacgatgtcgtaccctctatgagaccagtcgtccttgtggggcctagcctgaaaggctatgaggtcacagacatgatgcagaaggccctattcgacttcttgaagcataggtttgaaggcaggatatccattacccgagtgaccgcagatatttcactcgcaaagcggagtgtgttgaataaccctagtaaacacgcgattatcgagcgaagcaacacaaggtcctctctagccgaggttcagtcagagattgagcgcatcttcgaactagcccgaactttacagctcgtggtactggacgccgacacaatcaatcatccggcacagttgagtaagacatccctggcccctatcatcgtatatgttaagatttcctcacctaaggtactgcagaggctgataaagtcacggggtaagtcccaggccaaacacctgaatgtccaaatggtggctgcagataaactggcacagtgcccaccggaactcttcgatgtgattctggacgaaaaccagttagaggacgcctgtgaacatttggccgactatctagaagcctactggaaggctacccatccgccatcgagctcccttcccaatcctctgctatcacggaccctggcaactagcagtctccctctttctcccacactggccagcaactcccaaggcagccagggagatcaacgaacagatagatccgcacctattcggtctgccagtcaagccgaggaggagccgagcgtggagccggtgaaaaagtcccaacatcggtcgagctcaagtgccccacaccataatcatagatccggaacctccagagggctttcccgtcaggagacgtttgactcagagacccaggagagcagggactctgcgtacgtagagccgaaagaggactactctcacgaccatgtagaccactacgccagtcacagggatcacaatcatcgtgacgagacacacgggtcctctgaccaccggcatcgcgaatctaggcacaggagccgtgacgtggacagagagcaagaccataatgaatgcaataagcagcgaagtcggcacaaatccaaagatcggtactgtgagaaagacggggaagttatatctaaaaaaaggaatgaagccggtgaatggaacagagacgtgtatatcaggcaatag

SEQ ID NO: 216586 - DNA, 1839 bp, synthetic construct
  misc_feature 1..1839: note = Description of Artificial Sequence: Synthetic coding sequence
  source 1..1839: mol_type = other DNA
atgaaggcgacatggatcagactgttgaagagggccaagggtggcagacttaaaaacagtgacatctgcgggagtgctgatagctacacttccaggccgtctgattcagatgtgagcctggaggaagatcgggaggccgttcgtcgagaggccgagaggcaggctcaggcccagctagaaaaagcgaagacaaagcccgtagcatttgctgtgcgcacaaacgtttcttactccgcagcccacgaagatgatgtgccagtgcccggaatggccatttcatttgaggctaaggactttctgcacgtgaaggagaaatttaataacgattggtggatcggtcgactggtgaaggaggggtgcgagatcgggtttatcccatcccctgtaaagctggagaatatgaggctacagcatgaacagagagccaaacagggcaaattctactctagtaaaagtgggggaaactcatcctcgtcgttgggcgacattgttccatcctcccgcaaatctactcctcctagttcggccatcgatatcgacgccactggtctggacgcagaagaaaatgatataccggctaaccacagatctcctaaaccttctgcaaattccgtgacctcgccccattctaaagaaaagcgcatgcccttctttaaaaagactgagcacactcccccatacgacgtggttccctcaatgaggcccgttgtgttagtcggcccatccctgaagggttacgaagttactgacatgatgcagaaggcgctgttcgactttctgaagcaccgttttgagggaaggatctccataactcgggtcacggcagacatctccctggccaaacgctccgtactgaataaccccagtaaacatgcaatcatagagaggagcaataccagatcaagcttagccgaagtccagtctgagatcgagcggatcttcgagttagcgagaacactgcagttggtcgtactggacgctgacaccattaaccaccctgcccagttatctaaaacttccctggcgccaatcatagtgtacgttaaaatttccagtcccaaggttctccagcgtttaatcaaatccagaggcaagtcacaagctaagcacctgaacgttcagatggtagctgccgacaagctcgcacagtgtcctcccgaactttttgatgtgattctggacgagaaccaactggaagatgcatgtgagcacctggccgattacctggaagcctactggaaggcaacacatccgccttcaagctcgctgcctaatccactgcttagtcgtaccctcgccaccagtagtcttccactttcacctactttagcaagtaacagccagggctcccaaggcgatcaaagaacagaccgatctgcacctattcgaagcgcctcccaggctgaagaagagccaagtgtcgagccagtgaaaaagtcccagcaccgctcatctagctccgctcctcaccataaccaccggtcaggcacctcgagaggtcttagcagacaggaaacatttgatagcgagactcaagaatctcgggattctgcatacgtagagccaaaagaagactacagccatgatcatgttgatcactatgcatcccatagggaccacaatcaccgtgatgagacacacggcagttctgatcaccgccaccgcgagtcccggcatcgatcacgcgacgtggacagagagcaggatcataacgaatgtaataaacagagaagccggcacaagagcaaggatagatattgcgagaaggacggcgaagtaatttccaaaaagcgaaacgaggctggtgaatggaacagagacgtttacatccgtcagtag

SEQ ID NO: 216587 - DNA, 1704 bp, synthetic construct
  misc_feature 1..1704: note = Description of Artificial Sequence: Synthetic coding sequence
  source 1..1704: mol_type = other DNA
atgcagtgttgtggcttagtgcacagacgaagagtgagggtatcttacggttctgctgacagctatacctctagaccctcggacagcgacgtgagcctggaggaagatagggaagctgtaaggcgcgaggcagagcgacaagcccaggcccagttagaaaaggccaaaactaagcctgttgcattcgctgttaggacaaacgtttcatacagtgccgcacacgaggatgacgtgcccgtccccggaatggcaatctcattcgaagcaaaagactttttgcacgttaaagaaaagttcaacaacgattggtggataggaagactggtaaaagagggatgtgagattgggtttatacccagccctgtgaaactggagaacatgcgacttcagcacgaacagcgggcaaaacagggtaaattttacagttctaagagcggcggtaatagcagcagcagcctcggggacatcgtgccaagtagcaggaagtctacccccccatcatcggccaaacaaaaacagaagtctactgagcataccccaccttacgacgttgttcctagcatgcgcccagtggtgctggtcggccctagcctgaagggctacgaggtgacggatatgatgcagaaagcccttttcgatttcctcaaacaccgattcgaaggtcggatctcaatcacccgcgtgacagccgatatcagcctggctaaacgaagcgtccttaataatccctctaagcatgccatcatcgaaaggtctaatacaaggtcgtccctggcagaagtacagtctgagatcgaaaggatcttcgagctcgcaaggactctacagctcgtagtccttgacgccgacaccataaatcaccccgcacaactgagtaagacctcactggccccaattatcgtctatgttaaaatttcatcgccgaaagttttacagaggctcatcaagtccagagggaagtcacaggcgaaacacctgaacgtgcagatggtggccgcagataagctggcgcaatgcccgcctgaacttttcgatgtgattctggatgaaaaccagctggaggatgcgtgtgagcacctcgccgattatttggaggcgtactggaaagcaacgcaccctccaagcagctcgttacctaatccattgctgtcacggacacttgcaaccagttctctccctctcagccccactttagcttcaaactcccaaggctcacagggagatcagcggaccgaccgttctgctccaatccggtccgctagtcaggccgaggaagagccttcagtcgaacctgtgaagaaaagtcagcatcgaagttcttcaagtgccccacaccataatcatcgctccggcactagccgcggtctcagcaggcaggagacattcgattcagagacccaggaaagcagggattcagcatacgtggagcccaaggaggattacagccatgaccatgtggaccactatgcttcgcaccgcgaccataaccaccgcgacgaaactcatggtagctctgaccatcgccatcgggaatcacgtcatagaagcagggacgtcgatcgggaacaggatcataatgagtgcaacaagcagcggtctcggcataagtccaaggaccgctactgtgaaaaagatggcgaggtgatctcaaaaaagcgtaatgaagccggagaatggaaccgtgacgtctatattaggcagtag

SEQ ID NO: 216588 - DNA, 1821 bp, synthetic construct
  misc_feature 1..1821: note = Description of Artificial Sequence: Synthetic coding sequence
  source 1..1821: mol_type = other DNA
atgttagacagaaggctaatcgctccgcaaactaagtatattattcccggtgggtccgctgacagctacacatctcggccatcggactccgatgtgtccctggaggaggatagagaggccgtgcgcagagaagccgaaaggcaggcccaggcccagctcgaaaaggcgaagacaaaacccgtggccttcgcagtccgtacgaacgtttcatacagtgccgctcacgaggacgacgtcccagttcccggaatggccatcagtttcgaagcaaaggactttctccatgtaaaagaaaagttcaacaatgactggtggattggccgtctcgtgaaagaaggatgtgagatcggttttattccctcacccgtgaagctcgagaacatgcgcctgcagcacgagcagcgcgcaaaacaggggaaattttatagcagtaagagcggcggaaactccagctcatcactcggggatatcgttccctcatcaagaaaatctaccccaccctcaagtgcaatcgacatcgatgccaccggccttgacgcagaggagaatgatattcccgctaatcaccggtctccaaaaccaagcgccaacagcgtcactagtccgcactcaaaagaaaaaaggatgcctttcttcaagaagaccgaacacacacctccctatgatgtagtgccttccatgcggccagtggtgctggtgggcccaagcctgaaaggctacgaggttactgacatgatgcagaaagcactattcgacttcctcaaacacagatttgagggccgtattagcataactcgtgtgaccgccgatatttccctggctaaaaggtctgttctaaacaatccatccaaacatgcaatcatcgagaggtccaatactcggtcttccctggctgaagtccagtcagaaattgagcgaatcttcgaactcgccaggacattgcaactagtggtgttagacgctgacacgattaaccatcctgctcagttgagcaagacttctcttgcacccatcatcgtttacgtgaaaatatcaagccctaaggtgctgcagcgactgatcaaatctcggggtaagagccaagcaaagcacttgaacgtgcagatggtggctgctgacaagttagctcagtgtcccccagaattgtttgacgtaatactggatgaaaaccagctggaggacgcatgtgagcatctcgctgattacctcgaggcatattggaaagccactcatccaccgagctcatccctgccaaatcccctcctttcccgaaccttagccactagctctctgcctctgtctcctacccttgccagtaattcacagggcagtcagggagatcagcggaccgatcgatccgcccctatccggagcgcttctcaggccgaagaagaaccctctgttgagccggtcaaaaaaagtcagcatcgctcgtccagcagcgcccctcaccacaaccataggtcagggacatcacgcggactctctcggcaagagaccttcgattccgagacccaggagtcccgggatagcgcatacgtcgagcctaaagaggactactcccacgaccacgtcgatcattatgcatctcaccgcgaccacaaccacagggacgagacccacgggtcttcggaccatcggcatagggaaagccgtcatcgctctagagatgttgatcgtgagcaagatcacaatgaatgcaacaagcagcgatctaggcacaagtccaaagacaggtattgtgaaaaggacggcgaggtgatcagtaagaaaagaaacgaagccggtgagtggaaccgggacgtgtatatacggcagtag

SEQ ID NO: 216589 - DNA, 1827 bp, synthetic construct
  misc_feature 1..1827: note = Description of Artificial Sequence: Synthetic coding sequence
  source 1..1827: mol_type = other DNA
atgaatcagggatcagggctcgacctgctgaagatatcctatggtaaaggcgctaggagaaaaaatcgctttaaggggtccgacggatctacctcttccgacactaccagtaattcttttgttagacagggctctgccgacagctacacctctcgtccaagcgacagtgatgtcagcctggaggaagaccgagaggccgtgagacgagaggccgagagacaggctcaggcacaactagagaaggctaaaacaaagccggtcgcttttgccgtgcgcacaaatgtgtcctattccgccgcacatgaggacgatgtgcccgtgcccggtatggccatatcctttgaggcaaaggacttcctgcacgtgaaagaaaagttcaacaatgactggtggataggccgactcgtgaaggaaggttgtgaaatcggatttataccaagccctgtcaagttggagaacatgcgcttgcagcatgagcagcgggctaagcagggaaagttctacagttcgaaatccggcggaaatagttcttcttccctgggcgatatcgtccccagcagccggaagtctacaccacccagcagtggggctaagtctgcggacgaacaggatcaatggaagacagctggattgttctggcgctttaccaccgaacacactccaccttacgatgtcgtcccttctatgcgccctgtcgtgctggtcggcccttccctgaaaggctatgaggttacagatatgatgcagaaagcactgttcgacttcctcaagcatcgctttgaggggcgtataagcattacaagagtaaccgccgacatatctctggccaaacgatctgtgttgaacaatccgtccaaacatgccattattgaaaggagtaatacccgaagttctctagcagaggtccagagcgagattgaacgcatcttcgagttggccaggaccctgcagctggtggtccttgatgcagataccattaatcatccagcacagctgagcaagacttcattagcgccaattatcgtgtacgtgaagatatcgagccccaaggtactgcagcggctgatcaagtctagaggaaaaagccaagcaaagcatctgaatgtgcagatggtggctgccgacaaactagcccagtgtccacccgagctttttgatgtcattctggacgagaaccagcttgaagacgcttgcgaacacctcgcggactacctggaagcctactggaaagcgactcatccaccctcatcctctctgcccaatcctcttctgtccagaaccctggctacctcatctctgcccctcagccctacattagctagtaatagccagggcagccagggcgatcagcggacggacagatctgctcctataagaagcgcttctcaggccgaagaggaaccgtccgtggaacctgtgaaaaaatctcagcatcgctccagctctagcgccccacatcacaaccatcgtagcggcacttccagaggattgagtcgccaggagacatttgacagcgaaactcaagaaagcagagatagtgcctacgttgaacccaaagaggattatagccatgaccacgttgaccactacgcttctcaccgcgaccataatcatcgggatgagacccatggatccagtgatcacaggcacagagagtctcgtcataggagccgagacgtggaccgtgagcaggatcacaatgaatgcaacaagcagcgttcccggcataaatccaaagaccggtactgcgagaaagacggagaagtcatctcaaaaaagaggaatgaggctggcgagtggaatcgggatgtatatatcaggcagtag

SEQ ID NO: 216590 - DNA, 1818 bp, synthetic construct
  misc_feature 1..1818: note = Description of Artificial Sequence: Synthetic coding sequence
  source 1..1818: mol_type = other DNA
atgcagtgttgtggcttagtccataggagaagggttcgagtgtcctatggatccgctgattcatacacctctagaccatccgacagcgacgtgtcgctggaagaggaccgagaggctgttcggagagaagcggaacgccaggcccaggcccaactcgaaaaggctaagacaaagcccgtggcattcgccgtcagaactaatgtgtcctactccgccgctcacgaagacgacgtgcctgtccccggaatggcgatcagcttcgaagcaaaagactttttgcatgtaaaggagaaatttaataacgattggtggattgggcgtcttgtgaaagagggctgtgagatcggattcatccctagcccggttaaactggaaaatatgaggttgcagcatgagcagcgtgcgaagcagggtaagttctattcctctaagagtggtggaaactcctccagcagtctgggggatattgtgccgagttcacgcaaatctaccccaccaagctccgcaatagatattgatgccaccgggctcgacgccgaagaaaatgacatacctgcgaatcaccggtcgccaaagcctagcgccaactctgtgacatccccccatagtaaagagaagaggatgcccttcttcaagaaaacagaacacacccccccatacgatgtcgtgcccagcatgagaccagttgtgctagtgggaccttcactcaaggggtacgaggtgaccgacatgatgcagaaagcactcttcgatttccttaaacatcgattcgaaggacggatatccatcactagagtcaccgccgatatcagtttagcaaagagatccgtgcttaacaacccaagtaagcatgctattatcgaaagatcaaacacacgctcatccctggctgaggtgcaatccgagattgaacgtatatttgagctggcccgaacactgcagctggtcgtgctggacgcggataccattaaccatcccgcacagttatccaaaacgagcttggcgcctatcatcgtatacgtaaagatctcctccccgaaggttctgcagcgtctgatcaaatctcggggaaagtctcaggccaagcatttgaacgtccagatggtggctgccgataagctggctcagtgccccccagagctgtttgatgtgatactggacgaaaaccagctcgaggatgcatgcgagcacctcgctgattaccttgaagcgtattggaaggccacccatcctccctcttcatcgttgcccaacccattactgagtaggaccctggctacgagttccttgcccctgtctccaacactggcatccaatagccaaggatcccagggtgaccaacggacagaccgatccgcccctattagaagcgcctctcaagctgaggaggagccgagcgtggagcctgttaagaaatcacaacacaggtcttccagcagcgctcctcaccacaaccacaggagcggaacctcacggggtttatcccgccaggagacctttgattccgagactcaggagtcaagggactctgcttacgtggagccaaaggaagattacagccatgaccacgtcgatcactacgcttcccatagagatcataaccaccgagatgaaacccatgggtcgagtgatcatcggcatcgtgaaagtcggcaccgcagcagagacgtggaccgagaacaggatcataatgaatgtaataagcaacgctcgcgccataaaagtaaggaccggtactgtgagaaagacggcgaagtgatttcaaaaaagcggaacgaagccggtgagtggaatcgagatgtatatattcggcagtag

SEQ ID NO: 216591 - DNA, 1455 bp, synthetic construct
  misc_feature 1..1455: note = Description of Artificial Sequence: Synthetic coding sequence
  source 1..1455: mol_type = other DNA
atgtatgacgactcctatgtgcccggatttgaggactcagaagctggcagcgcagatagttatacgagcaggccttctcttgatagtgacgttagcctcgaagaggaccgggaatccgccagacgtgaagtggaaagccaggcacaacaacagttagagcgagctaaacacaagcccgtagccttcgccgtacgcacaaatgtgtcgtattgtggtgtactcgacgaagagtgccctgtacagggcagcggcgtcaactttgaggcaaaggacttcctacacatcaaggagaagtatagtaatgactggtggatcggcagattggttaaggagggaggcgatattgcctttatcccttcgccacagcgcctggagtctatccggctaaagcaagagcaaaaggctaggagaagtggtaacccgagttcactgtccgacatagggaaccgcaggagcccccctccgagtttggccaagcaaaagcagaagcaggcggagcatgtgccgccatacgatgtggtgcccagtatgcgtccagtggtcctggtgggcccatcactgaagggttacgaagtcacggacatgatgcagaaagccctgttcgatttcttaaaacatcgcttcgacggcagaatttcaatcactagggtcacagctgacctgtccctggcaaagcgcagcgtgttgaacaatccgggtaaaagaacaatcattgagcgctccagtgcacggtcctcaatcgccgaggtgcagagcgagatagagcgcattttcgagttagccaagtctctgcagttggtcgttctggacgctgacaccatcaatcatccggcacagctggccaagaccagcctagcgcctattattgtgttcgtcaaggtctcttcccctaaggttctccagcggttaattaggagtcgtggaaaaagtcagatgaaacacctgactgtgcagatgatggcatacgataagctggtccagtgcccccctgagagcttcgacgtgattcttgacgagaatcaattggaagatgcctgcgagcacctggctgagtatctggaggtgtactggcgggcaacgcatcaccctgccccaggcccaggcttgctaggcccaccatcagccatccctggcttacaaaatcagcagctgttgggtgaaaggggcgaggagcacagccctctggagcgtgactcgttgatgccgtcggacgaggcatcagaatccagcaggcaggcgtggacgggcagcagtcagcgcagtagtcgacacctcgaggaggattatgcggacgcttaccaggatctctaccaaccacataggcagcacacgtcgggcctgccatctgcaaacgggcacgacccccaggatcggctcctggcgcaggacagcgagcacaaccattccgacagaaactggcagcgcaatcgcccttggcccaaggactcgtactag

SEQ ID NO: 216592 - DNA, 1566 bp, synthetic construct
  misc_feature 1..1566: note = Description of Artificial Sequence: Synthetic coding sequence
  source 1..1566: mol_type = other DNA
atgtcttctagtagctatgctaagaatggcaccgccgacggtcctcattccccgacttcacaggttgctcggggaacaacgaccagacggagcagacttaagcgctccgatggtagcactaccagcacctccttcatcttgagacagggaagtgcagatagctacacgtctcgtccgtcagatagtgatgtgtctctcgaagaggatcgggaggccattagacaggaacgtgaacagcaggcagccatacagctggagagagcaaaatctaaaccagtagcattcgcagtaaagaccaatgtgtcttactgtggggctcttgatgaggacgtgcccgtcccctccacagcaatcagtttcgatgccaaggatttcctccatattaaagaaaaatacaataacgattggtggatagggagactggtgaaggagggatgcgagatcggatttatcccatctcctctcagactcgaaaatatccgcatccagcaggagcagaaaagaggcagatttcacgggggaaaaagcagcgggaattcctcttctagtctgggggagatggtgtctggcactttccgcgcaacccccacctcaacggtcaagatggtgttgaaaatccacaccgagcacatccctccatacgacgttgtgccatctatgcggcctgtggtgctcgtgggcccttccctcaaaggctatgaagtaactgacatgatgcagaaggccttgttcgattttctaaagcaccgcttcgatggccgaatctcgatcacacgcgtcaccgccgacatctcgttagcgaagaggagcgtcctgaataacccctccaagagggctatcatcgagaggtccaatacaagatctagcctggcagaggttcagtccgaaattgaaagaatctttgaactcgccaggtcccttcagctggtagtgcttgatgcagacacaatcaaccatccagcccagctgattaaaacttcgctggctccaattatcgtgcacgttaaagtgagctccccaaaagtgctccagaggctcattaaatccaggggaaagagccaaagtaaacaccttaatgtgcagctggtggccgcagataaattggcccagtgccccccagagatgttcgacgtcatacttgacgaaaatcaattggaggacgcatgtgaacacctgggagaatacctcgaagcatactggagagccactcatacaacctcaagcaccccaatgacccctttactgggcagaaatcttggatctaccgccctgtccccatatcctactgccatttctgggctgcagtctcagcgcatgagacacagtaatcactctacagaaaattccccaatcgagaggcgctcactgatgactagtgacgagaattaccataatgagcgtgcacggaaatctcgcaaccgcctgagtagtagctcacagcactcaagagaccactatccactcgtagaggaggactatccggactcttaccaggatacttataaacctcaccgcaatcgtgggagccccggtgggtactcacatgactcacgtcatcgcctctag

SEQ ID NO: 216593 - DNA, 1464 bp, synthetic construct
  misc_feature 1..1464: note = Description of Artificial Sequence: Synthetic coding sequence
  source 1..1464: mol_type = other DNA
atgtatgataacctgtacctgcacggcatagaagattcagaagcaggtagtgctgacagttataccagcaggccatcagacagcgatgtgagccttgaagaggacagagaggctatccgacaggagagggaacagcaggccgcaatacaacttgaacgtgctaaaagtaaacccgtcgcctttgctgttaagacgaatgtgagttattgcggtgctttggacgaagatgttccagtcccttctacagcgattagtttcgacgctaaggattttttgcacattaaagagaagtataacaacgattggtggatcggaagactagtgaaagaaggatgtgaaattgggtttatcccatcgccacttagactggagaacatcagaatccaacaggaacagaagcggggtagattccacggagggaagtccagcggcaattcttcttcaagcctgggtgagatggtatccggtacctttcgcgctactccaacatccaccgtaaaaatggtgctgaagatccataccgagcatatccctccatacgacgtagtgccttctatgcggcctgtggtgctggtgggccctagcttgaaaggatatgaggtgaccgacatgatgcagaaagctctgttcgactttctgaagcacagattcgacgggaggatttcgattacccgagtaaccgctgacatctctctggcaaagagatcggtgttgaataacccctcgaagcgtgcaattattgagcgttccaacaccagaagctccctcgccgaagtgcagtcagaaatcgagcggatatttgagctcgcccgatctttgcagctcgtcgttttagacgccgatacgataaaccaccctgcacaactgatcaagactagcttagcccctatcatcgtgcacgttaaagtgagttcacccaaggtcttgcagaggctcattaagtctcgcggtaagagccagtcaaaacacctgaatgtgcaactcgtggcagccgacaagctcgcacagtgccccccagagatgtttgatgtcattctggatgaaaaccaactcgaagacgcctgcgagcacctcggggagtaccttgaagcatattggcgagccacgcataccaccagctccactccaatgactcctctgctgggtaggaatcttggcagcacggcattatcgccctatccgaccgcaatctcaggcctccagagccaacgaatgcggcactcaaatcacagcaccgagaatagtcctattgaacggcgatcactgatgaccagtgatgaaaactatcataacgaacgggctcgaaagagccgcaaccgactatcatcaagtagccaacatagccgggatcactaccccctggtcgaggaggactaccccgacagttatcaggacacgtataaacctcaccggaatagaggctcgcccggtggctactcgcacgactctaggcacaggttatag

SEQ ID NO: 216594 - DNA, 1461 bp, synthetic construct
  misc_feature 1..1461: note = Description of Artificial Sequence: Synthetic coding sequence
  source 1..1461: mol_type = other DNA
atgtatgacaacctgtacttgcacggtattgaggactctgaagctggctcagctgacagctatacttcccgcccttcagactctgacgtatccctagaggaggatcgcgaggccattcgccaggaaagggagcagcaggccgcaatccagttggaacgcgctaaatctaagcccgtcgcatttgccgttaagactaacgtaagttactgcggcgctcttgacgaagacgtgcctgtaccaagcacagcgatctcattcgacgctaaggacttcctccacattaaagagaaatacaacaatgattggtggataggacgccttgttaaggagggatgtgagatcggatttatcccatcccctctgagactcgaaaatattcgtattcaacaggagcagaaacgaggccgtttccacggtggaaaatcttctggcaactcatcttcttccctgggagaaatggtgagcggaacctttagagcaacacctacatctactgcaaagcagaaacagaaggttacagagcacatccctccttatgatgtcgttccctctatgcgaccggtcgttctagttggcccatccctgaagggttatgaagtgacagatatgatgcagaaagccttattcgactttctcaaacaccgattcgatggaagaatttcaataacccgcgtgacagccgatatatctctggctaagcggagtgttcttaacaatcccagcaagcgtgcaattatcgaacgaagcaatacccggagctcactggccgaggttcagtctgaaatcgagaggatcttcgagctagctcgatccctgcagctagtggtgctcgacgctgataccattaaccaccctgcgcagttaattaaaacttccctggcacctatcattgtgcacgtgaaggtcagcagtcccaaagtgttgcagagactcatcaagtccaggggtaaatcccagagcaaacatctgaacgtgcagctcgtcgccgctgataaattggctcagtgtcctccagaaatgtttgacgtgatcctcgacgagaaccagttggaagatgcgtgtgagcaccttggggaatatctcgaagcgtactggagggccacccacaccaccagcagtacacccatgacccctttgctaggtcgcaatcttggttctacagccctgagtccttacccaacggcaatctctgggctccagagtcaaagaatgcggcattctaaccatagtactgaaaactcaccgattgagagacggagtttaatgacttcagacgaaaactaccataacgagagggccagaaaatctcggaaccggctatcctcctcctcacagcatagccgggatcattaccccctagtcgaggaagattatcccgactcgtaccaggacacttacaaacctcatcgcaatcggggaagccccggaggatactctcacgactccagacatcgactttag

SEQ ID NO: 216595 - DNA, 1563 bp, synthetic construct
  misc_feature 1..1563: note = Description of Artificial Sequence: Synthetic coding sequence
  source 1..1563: mol_type = other DNA
atgtcctctagttcctatgcaaaaaacggcactgcagacggtccccactcccctacatctcaggtggccagaggcacgacaacacgcagaagtcggctaaagagaagtgacggctcgaccacatccacttcttttatcctgcgtcaaggctccgctgactcttacacttctcggccatccgactctgacgtttccttggaggaagaccgggaagcgattagacaggagcgtgagcagcaggctgccattcagttggagcgggcaaaatctaagcctgtggcttttgccgtgaaaaccaatgtcagttactgtggcgctctcgatgaggatgtgcctgttccatctaccgccatttccttcgacgcgaaggacttcctgcatattaaggagaaatataataacgactggtggatcgggcgattagtgaaggaagggtgcgagattgggttcataccaagcccacttcggctcgagaacattcggatacaacaggagcaaaagcggggtagattccacgggggtaagtcaagtgggaacagttcatcgtcactgggtgaaatggtaagcggtactttccgggctacgcccaccagcaccgctaagcagaagcagaaggtgacagaacatattccgccttatgatgtggtaccgagtatgcgtccagttgtgctggtcggcccttccctgaaaggatacgaggtcacggatatgatgcagaaggccctctttgactttctcaaacatagattcgatggtaggataagcatcaccagggtaaccgccgacattagtttggctaagagatccgttttaaataatccctccaagcgggctatcatagagcgatcaaatactcggtcctccctcgctgaagtccagagcgagattgagagaatctttgagctggcccgtagtttacagttggtcgtgctggacgcagacacgatcaaccaccctgcccagcttataaaaacaagcttggcccctataattgtgcacgtaaaagtgagtagtcctaaggtgctgcagcggctcattaaatctagggggaagagccagtctaagcatctcaacgttcagcttgtcgcagctgacaagcttgctcagtgccctcccgagatgtttgatgtgattctcgatgagaaccagttagaggacgcctgtgagcacctgggcgaatatcttgaagcctactggagggcaacccatacaactagctcaactcccatgactccactccttggacgaaatctgggatctactgctctgtcaccttatcccaccgccatttccgggctccaatcacaaagaatgagacactcgaatcactctacagagaattcgccaatcgagagaaggagcctgatgacatccgacgaaaactatcacaatgaacgagctcggaagtcccggaaccgcctatcctcttcatcccagcacagtcgggaccactaccctcttgtggaggaagattatcccgactcctaccaggatacctacaaacctcataggaatagaggtagccccggtgggtattcccacgattctagacaccggctgtag

SEQ ID NO: 216596 - DNA, 1248 bp, synthetic construct
  misc_feature 1..1248: note = Description of Artificial Sequence: Synthetic coding sequence
  source 1..1248: mol_type = other DNA
ttttacttcctatgtcagggctcagcggactcctatacatctagaccctctgatagcgacgtcagcctggaagaagacagagaggcaatccgccaggaaagagaacaacaggcagcgatacaacttgagagagctaaaagcaaacctgtggccttcgccgtgaagacaaacgtgagctattgtggtgcgctcgacgaagacgtaccagttccttccaccgcgatcagctttgatgccaaagatttcctgcatattaaggagaagtataataacgattggtggattggcagactggtaaaggaaggctgcgagatcggattcatccccagtccgcttcgtttggaaaatattagaattcaacaggagcagaagcggggaaggtttcatggcggtaagtcatctggtaatagcagctctagccttggggagatggtgagcggcacatttcgcgctacccccacaagtactgccaagcagaagcagaaggtcaccgagcacattcctccttacgatgtcgttccttctatgcgcccagtggtcctggttggcccttctcttaagggctacgaagtgacagatatgatgcaaaaagcgctgttcgattttctgaagcatcggttcgacggcagaataagtatcacccgcgtcaccgctgacatatccttggctaagagaagcgtgctgaacaacccatccaaacgcgctatcattgagcgttcaaatacaaggagtagtctcgccgaagttcagtcagagatcgagagaatcttcgaactcgcccgtagcctgcaactcgtggtgctcgacgccgacaccatcaatcaccccgcacagctgataaagacctcccttgctcccattatagttcacgtcaaagtaagctcacccaaggtgttacagagactaattaaatccagaggtaaatctcagagcaaacacctgaatgtgcagttggttgcagccgataagctggcacagtgtcccccatcacagagaatgcggcacagcaatcattcaaccgagaactcaccgattgagagaagatcactcatgacaagtgatgagaactaccacaatgaaagggctcgcaagtcgcggaataggctgagtagctccagccagcattcccgcgaccactacccgctcgttgaagaggattaccccgatagctaccaagacacatataaacctcatcgcaatcggggaagcccaggtggctacagccacgatagtagacatagactgtag

SEQ ID NO: 216597 - DNA, 558 bp, synthetic construct
  misc_feature 1..558: note = Description of Artificial Sequence: Synthetic coding sequence
  source 1..558: mol_type = other DNA
atgtcaggcagttttgagctgagtgttcaggacctgaacgatctacttagcgacggatccgggtgttactcactcccttctcagccatgcaatgaggtcaccccacgaatttacgtgggcaacgctagtgtggcccaagatatccccaagttgcagaagctaggcattacgcacgtattaaatgcggctgagggccgaagctttatgcatgtgaacacaaacgccaatttttacaaggacagtggaatcacatatttgggtatcaaagctaacgacacccaggagttcaatctcagtgcctacttcgagcgtgccgctgattttatagaccaggctctcgcccagaaaaacggaagggtcctggtgcactgccgtgaaggatattcacgaagcccaaccctagttatcgcttatttaatgatgcggcagaagatggacgtgaaaagtgccctgtcaatcgtaagacagaacagggaaatcggtccaaatgacggcttcctggcacaactctgccaattgaatgaccgcctcgcaaaagaaggaaagctgaagccctag

SEQ ID NO: 216598 - DNA, 972 bp, synthetic construct
  misc_feature 1..972: note = Description of Artificial Sequence: Synthetic coding sequence
  source 1..972: mol_type = other DNA
atgggactcttcgatcggggagtgcagatgttactcaccacagttggcgctttcgccgcttttagtctcatgaccatcgctgttgggaccgattattggctctattcccgcggtgtctgtaagacaaagagcgttagcgaaaacgagacctctaagaagaatgaggaagtgatgacccacagtggactttggagaacatgctgcctcgaaggcaacttcaaggggctctgtaaacaaattgatcacttccccgaggatgcagattatgaggcagacacagccgaatacttcctcagagctgtcagggcgtcttccattttcccaatactaagtgtcattctgctgttcatggggggtttgtgtattgctgcttctgagttctataaaacccggcacaacatcattctgtctgcgggtatttttttcgtttcagctgggctgtccaatatcatcggcatcatcgtgtacatcagtgccaacgcgggagatccttccaaaagcgactctaagaaaaatagctacagctatgggtggtccttctattttggagctttgagcttcattattgcagagatggtgggcgtgctggctgtgcacatgttcattgatcgccacaaacagctgcgggcaactgctagggcgacagactacttgcaagccagcgcgattactaggatcccatcatatagatatcgataccagcgcagatcacggtcctcttcccggagtacggagcccagccactcaagagacgcatctcctgtgggtattaaagggtttaacactctgccctccacggagatcagtatgtatactctgtccagggatcccttaaaggcggctactacgccaacagccacatacaacagtgacagagataatagtttcctgcaagtgcacaattgcatacagaaggaaaacaaagactcattgcattccaataccgctaaccgcaggacaacacccgtgtag

SEQ ID NO: 216599 - DNA, 948 bp, synthetic construct
  misc_feature 1..948: note = Description of Artificial Sequence: Synthetic coding sequence
  source 1..948: mol_type = other DNA
atgaggatgtgcgataggggcatccagatgctgataaccactgtcggagccttcgccgctttctctctgatgacaatcgccgtcggaaccgactattggctgtactctcggggagtgtgtagaacgaagtcaacttcagacaacgaaacgtcccggaaaaatgaggaagtcatgacccattcaggcttatggaggacttgttgcctcgagggcgcattcaggggcgtgtgcaagaaaatcgaccattttcccgaggatgcagactatgaacaggacacagctgaatacctgctaagagctgttcgagctagtagcgttttccctatcctgtccgtgaccctgttgttctttggcggactctgtgtggccgcatctgaatttcaccggagcagacataatgtgatcctgagcgcaggaatttttttcgtctcggccggattgagcaatatcatcggcatcattgtttacatcagcgctaatgcaggggatcccggacaacgagatagtaagaaatcttactcctacgggtggagcttctactttggagccttctcatttataattgcagagatcgtgggcgttgtggcagtgcatatatatatcgagaagcatcagcagcttagggcaaagtctcattccgaatttttaaagaagtccacattcgcgaggttgcccccttacaggtatcgcttcaggcggcgatccagttctcgaagcaccgaacctagatctagggaccttagtccaatttcaaagggctttcacactattcctagtacggacatctccatgtttaccctgagccgtgatccttcaaagatcacaatgggtaccctgttgaattctgacagggaccacgccttcctccagttccataatagcacgcctaaggagttcaaagagagtctacacaataatcctgcaaatcgtcgtaccactcccgtgtag

SEQ ID NO: 216600 - DNA, 891 bp, synthetic construct
  misc_feature 1..891: note = Description of Artificial Sequence: Synthetic coding sequence
  source 1..891: mol_type = other DNA
atgagcgcttgcggcaggaaagctttgaccttgctgtcatcagtattcgccgtatgcggcctcggactacttggaatagccgtgagcactgattattggctgtatttagaagagggcgttatcgtgccgcagaaccagtcaacagaaatcaaaatgagcttacactctgggctttggcgagtatgctttttggcaggagaggaacgaggcagatgcttcaccatcgagtacgtcatgccaatgaatactcaactgacatcagaatccaccgttaacgtgctgaaaatgatccgtagcgcaacaccattccccctggtgtctctgttttttatgtttatcggtttcatcttgaataacatagggcacatccgccctcatagaactatcttggcctttgtgagcggcatatttttcattctatccggtcttagcttggtggtgggcctggtcctgtacatctctagtataaacgatgaaatgcttaaccgtacgaaggacgccgagacatacttcaattataaatacggatggtcatttgccttcgcggcaatttcatttttactgacggaagttaagcccgtgaccctgtcgatggatcgcttgggcctgggtaccgcacccctcagtcgcggagaatggggatggggcaggcgcgatatccctcagccgttttggacccccgaccaccccctgtattttccttcttcaagccagaatgtgagtttatcatatctttccggatcacctcccgcacggatgagcccgggaccctgcagttgtccccacgtgcactttccccctcattccagctgcgtactctgcaggccacagccacgagaaatgaggcaggctccggcagcatccccctcctccgcagttttttccctctag

SEQ ID NO: 216601 - DNA, 828 bp, synthetic construct
  misc_feature 1..828: note = Description of Artificial Sequence: Synthetic coding sequence
  source 1..828: mol_type = other DNA
atgtctgcgtgtgggaggaaggctctaacactgctgtctagtgtgtttgcggtatgcggacttggcctgctaggaatcgccgtgagtaccgactactggctctatctagaggagggtgtgatagtgcctcagaaccaaagcacagaaatcaagatgagtcttcactcagggctctggcgcgtgtgtttcctggcgggtgaggaaaggggaaggtgtttcacaattgaatacgtgatgccgatgaatacccagctcacctctgaatccacagtcaacgtcctgaagatgattaggtccgctactcccttcccactagtgtctctgtttttcatgttcatcggcttcattcttaacaatattggacacattcgtccacatcgcacaattctggccttcgttagtggcatcttcttcattctgagtgggctgagtctagtggtggggctcgtgctctatattagctcaatcaacgatgagatgcttaatcgaacaaaggacgctgagacttacttcaactacaagtacggatggtcattcgctttcgcagctattagtttcttactgaccgaaagcgccggagtgatgtctgtgtatctgtttatgaagaggtacaccgctgaagatatgtatcgcccacatcccggattttaccgtcctagattgagtaattgcagcgactattcaggccagtttctccaccccgacgcctgggtgcggggaaggtctccctctgacatttcgtccgaggcctccttgcagatgaacagcaactatccagctttgctgaagtgtccagactatgatcagatgtcttcctctccgtgttag

SEQ ID NO: 216602 - DNA, 828 bp, synthetic construct
  misc_feature 1..828: note = Description of Artificial Sequence: Synthetic coding sequence
  source 1..828: mol_type = other DNA
atgtccgcctgcggaagaaaggcccttacgcttctgtcgtctgttttcgctgtgtgtgggctgggcctgttgggcattgctgtgtctacagattattggctgtatctggaggagggcgtgatagtgccgcagaaccagagcaccgaaattaaaatgtccttacactccggtctgtggagagtctgttttttggccggagaggagcggggtcgttgttttactattgagtatgtgatgccaatgaatacccagcttactagcgagagtaccgtgaatgtactgaaaatgatccggagcgccactccttttcccctggtgtccctcttcttcatgttcattggttttatactgaataatattggccacattaggccccatcggactatcctggctttcgtgagcggaatttttttcatactgagtggcttatcattagtggttggactagtactctatatatcatccatcaacgatgagatgttaaatcgcacaaaagatgccgaaacctactttaattacaaatacgggtggtccttcgcttttgccgctatatcgtttctccttaccgaatccgccggagtcatgtccgtgtacctgtttatgaagcggtacacggccgaagatatgtatcggcctcacccaggcttttatagacccaggttaagcaattgcagcgattactctggtcaatttctccacccagacgcatgggtcagaggacgctctcctagcgacatatccagcgaagccagtttgcagatgaactccaattacccagctttactgaaatgtccagattacgatcaaatgtcttcatccccttgttag

SEQ ID NO: 216603 - DNA, 783 bp, synthetic construct
  misc_feature 1..783: note = Description of Artificial Sequence: Synthetic coding sequence
  source 1..783: mol_type = other DNA
atgatgtggagcaactttttcctccaggaagaaaacagaaggcgaggcgcagcgggtaggaggagggcgcacggccaaggcagatccggtctgacaccggagcgtgaggggaaggttaaactggcactgcttctcgcagccgtcggagccacgcttgccgtgttgtcagtcggcaccgagttttgggtagaattgaacacctacaaggcaaatggcagcgctgtttgcgaagcagcacacttgggcctgtggaaggcttgtactaagaggttatggcaggctgatgtacctgtcgatagagacacatgcggcccagcagagctccctggagaagcaaattgcacctacttcaaatttttcactactggggaaaacgcaagaatttttcagaggacaaccaaaaaagaagtgaaccttgcggcagcagtcatcgccgtgctgggcctggccgttatggctcttggatgcctatgcattattatggtcctgtcaaaaggcgcagaatttctgcttcgggtaggtgccgtgtgctttggcctttccggtcttctgctgctagttagtctcgaagtgtttcggcacagtgtgagggcactgctgcaaagggtcagccctgagcctccccctgccccacgcctgacctatgagtacagttggtccctgggttgtggcgtgggcgcaggactgatactcctgctgggagctggctgctttcttctgctgaccctgcctagctggccttggggatcactgtgcccaaaacgaggccatcgagcaacctag

SEQ ID NO: 216604 - DNA, 645 bp, synthetic construct
  misc_feature 1..645: note = Description of Artificial Sequence: Synthetic coding sequence
  source 1..645: mol_type = other DNA
atgatgtggtctaacttcttcctccaggaagaaaaccgcagacggggtgcggcaggccgtaggcgagctcacggccagggtcggtccggtctcacccctgaacgggaggggaaagtgaaactcgcgctcctactcgccgcagtgggagcaacactggctgtcctgtcggtgggtaccgagttttgggttgaactgaacacatataaagcgaacgggagcgctgtttgtgaggccgcacacctgggcctttggaaagcctgcaccaaaagattatggcaggccgacgtaccggtggaccgcgatacctgcggacccgcagagttgccaggagaggctaactgcacatacttcaaattttttactaccggtgagaatgccagaatctttcagagaactaccaagaagggtctactgctcctggtgagcttggaggtgttccggcactctgtgagggcactactgcagagggtgtcacccgagcctcctcccgctcccaggcttacatacgaatatagctggagtttgggttgtggagtcggggctggtttgatcctgctgctaggggctggatgttttcttctgctgaccctcccatcatggccctggggcagcctatgccctaaaagagggcacagggccacatag

SEQ ID NO: 216605 - DNA, 570 bp, synthetic construct
  misc_feature 1..570: note = Description of Artificial Sequence: Synthetic coding sequence
  source 1..570: mol_type = other DNA
atgatgtggtctaacttcttcctgcaggaggagaaccggagaagaggggcagccggaagacgtagagcgcatggacagggcaggtcagggttaacccctgaacgcgaaggaaaagtgaaactcgcgcttcttctggccgctgtaggggctaccctggccgtactctctgtggggacagagttctgggtggaactgaacacttacaaggcaaacggttcggctgtatgtgaggcggctcacctgggcctgtggaaagcttgcactaaaagactgtggcaagccgatgtgcctgttgacagagatacatgcggaccagccgagctgccagggggtctgctccttctggtgtcactggaagtctttcgacatagcgtccgcgctctgcttcagcgggtgtcgccagagcctccccctgcacctaggttgacttacgagtactcctggagcctggggtgtggggttggagccggactcattcttttgctcggcgctggctgttttctgctactgaccctccctagctggccctggggctctctctgccccaagcgcggacatcgcgctacttag

SEQ ID NO: 216606 - DNA, 321 bp, synthetic construct
  misc_feature 1..321: note = Description of Artificial Sequence: Synthetic coding sequence
  source 1..321: mol_type = other DNA
atgtctacaaataacatgtcggatcctagaagacccaacaaagtgctccgctataaaccgccaccaagtgaatgtaaccccgctcttgacgatcctacaccggactatatgaacttgttggggatgatcttttctatgtgtgggttaatgctgaagctgaaatggtgcgcctgggtggccgtgtactgctctttcatttccttcgccaacagccggagcagtgaagacaccaagcagatgatgagttcctttatgctgtctatctcagcagttgttatgtcatacctgcagaatccccagccaatgacaccaccttggtag

SEQ ID NO: 216607 - DNA, 828 bp, synthetic construct
  misc_feature 1..828: note = Description of Artificial Sequence: Synthetic coding sequence
  source 1..828: mol_type = other DNA
atgagccattgctcatcccgagctctgacccttctgagctctgtattcggcgcttgcggcttgcttctggtgggcatagccgtcagcacggattactggctgtacatggaagagggcaccgtcctgcctcagaaccagaccacggaggttaagatggccctgcacgcaggactgtggcgcgtctgcttcttcgctgggagagaaaaggggagatgcgtcgccagcgaatacttccttgaaccagagatcaacctggttacagagaataccgagaacattcttaagacagtccggacagccaccccattccctatggtgtcactctttttagtgtttaccgcttttgttatcagcaacatcggtcacatccgcccacaaaggacaatactggccttcgtatccggtatattctttatactgtcaggactgagcctcgtggttgggttggttctgtacatttcctccataaatgacgaagtgatgaatcgcccatctagtagcgagcagtactttcactaccgttatggctggagcttcgccttcgctgcctcatcttttctgctgaaggaaggagcaggggtcatgtctgtatatctctttacgaagagatatgccgaggaggaaatgtacagaccccaccctgctttttaccgccctcgactgtcagactgcagcgactacagtggccagttcctgcaacccgaggcctggcgcaggggcaggtccccgtcagatatatcaagcgacgtttcaatccagatgacacagaattacccccctgccatcaaataccctgaccacctccacatttccacctcaccatgctag

SEQ ID NO: 216608 - DNA, 1278 bp, synthetic construct
  misc_feature 1..1278: note = Description of Artificial Sequence: Synthetic coding sequence
  source 1..1278: mol_type = other DNA
ttggaatcacttaaacgttggaacgaagagcgcggtctctggtgtgagaaaggggtccaggttctcctgactaccgttggggcttttgcggcttttgggctcatgactattgccatctccactgactactggctgtatacaagagctctgatttgtaacactactaatttaactgccggaggggacgatgggacaccgcacagaggaggtgggggagccagcgaaaagaaggacccaggaggtctgactcacagcggactttggaggatttgctgtctggaagggctgaagaggggtgtatgtgtcaaaatcaaccatttccctgaagatacggactatgatcacgacagcgcagaatatctcctgagagtcgtgagagcatccagcatctttccaatcctctctgccatcctgctgctcctgggcggagtctgtgttgcagcgagtcgggtatataaaagcaagagaaacatcattctgggtgcaggtatactgtttgtggcagctgggttatctaacatcattggggtgattgtgtatattagtgccaatgccggtgagccaggacctaagcgggatgaagagaagaagaaccattatagttacggctggagcttctattttgggggtctgagctttattctggccgaggtgataggtgtgctcgctgtgaatatctatatcgaaaggagtcgcgaagcccattgccagtcaagatccgatctgttgaaggccggagggggagccggtggatctggcggatcagggccaagcgcaattttgcgactgccgagttaccgcttccgctacagaagaagaagccgttcctcttctcgctctagcgagccttctccaagccgggatgcttcccccggaggacctggtggcccagggttcgctagcacagatatctctatgtatactttgagcagagacccttctaaaggatccgtcgccgctgggttggctggggctgggggtggcggtggtggcgctgtgggcgcttttggaggggcagccggtggcgcaggcggaggaggagggggagggggtggcgctggtgccgagagggacaggggaggcgcttcaggatttttgacacttcacaacgcctttccaaaggaggccggaggcggtgttaccgttactgtgaccggaccgcctgctcctccggcaccagccccacccgctcctagtgcaccagcccctggcaccttagccaaagaggcggctgcttctaacactaacacactcaacagaaagacaactcccgtatag

SEQ ID NO: 216609 - DNA, 6539 bp, synthetic construct
  misc_feature 1..6539: note = Description of Artificial Sequence: Synthetic coding sequence
  source 1..6539: mol_type = other DNA
atggtgaacgagaatacacgcatgtacatcccagaagagaatcatcagggtagcaattatggcagccccagaccagcccatgccaatatgaatgcgaacgctgcggcaggattggctcctgagcatatacccacgcccggtgcagccctgagttggcaggcagcaatcgatgccgcaaggcaggcaaagctgatgggcagcgcaggcaacgccaccatatccacggtgtcttctactcagcggaaaaggcaacagtacggcaagcctaagaagcaggggtctaccaccgccacacgccctcccagagcactgctgtgtctcacactgaaaaaccccatccggagggcttgcatctcgatagtggagtggaaacctttcgagatcatcatcctgctgacaattttcgccaattgcgtcgctcttgctatttacatcccgttcccagaggatgacagcaacgcaacaaattctaacctcgagagagtggaatatttattcctgatcatatttactgttgaggcctttttgaaggtcattgcgtacggcctgctttttcaccccaacgcctatctgcgcaatgggtggaatctcctcgacttcataattgtagtggtgggactattctcggccatattggagcaagcaaccaaagccgacggggcaaatgcgctggggggaaagggcgcagggttcgatgtcaaagctttaagagcatttagagtgctgaggcctctgcggttggtatcaggcgtgccctccctgcaggtggtgcttaatagcatcatcaaagctatggtgcctctgctccacatagccctgcttgttctgttcgtgatcatcatttacgccattatcggtttggagctgttcatgggtaaaatgcacaagacatgttacaatcaggaggggatcgcagatgtcccagccgaggacgatcccagcccttgtgctctagaaactggacacggaaggcaatgccagaatggcactgtctgcaagccgggatgggatgggccaaaacacggcataacaaacttcgacaactttgcgttcgccatgctgaccgtgttccagtgcattacaatggaaggctggacagatgtgttgtattgggtgaacgacgctgtcggcagagattggccatggatctacttcgtcaccctgattatcatcggttccttcttcgttttaaatctggtgctgggagtgcttagcggagaattttctaaagaaagggagaaagctaaggccagaggcgacttccagaaactacgtgaaaagcagcagttagaggaagatctcaaggggtatctagattggatcacacaggccgaagatattgacccagaaaacgaggacgagggcatggatgaagaaaaacctaggaacatgtccatgccgacctcagagaccgagagcgtgaacaccgagaacgtggcagggggtgacatcgagggagagaactgcggcgctagattggcccatcgcatttcaaaaagtaaattcagcagatattggcggaggtggaaccgtttctgccgtaggaagtgcagagccgctgtgaaaagcaacgtgttttattggcttgtgatcttcctggtatttttgaacacattgaccattgcctctgagcattataatcagcctaattggctgactgaggttcaggacacggctaacaaagccctcctcgcactgtttactgcagaaatgctgctcaagatgtacagcctgggactacaggcctacttcgtttccctctttaatcgatttgactgcttcgtcgtctgcggcggaatattggaaaccatcctcgtggagacaaagatcatgtccccacttggtatttccgttctccgttgcgtgaggctgttacgcatatttaaaatcacaagatactggaattcactgtctaacttggtggcatcacttctgaactctgtgcgatcaatagcctccctcttactgctgctattcctgtttatcatcatcttcagcttgctgggaatgcagctattcggtggcaagttcaactttgatgagatgcaaacccggaggtccacctttgacaatttccctcagtccttgctgacagtttttcagatccttactggcgaagattggaatagcgtgatgtacgatggcatcatggcctacggtggaccatcttttcccggaatgctcgtgtgtatatactttatcatcctgtttatatgtgggaattacatcctgttgaacgtcttcctggcaattgctgttgacaaccttgccgatgcggagagcctgaccagcgcccagaaagaggaagaggaggaaaaagagagaaagaaactcgcgagaaccgctagtccagagaaaaagcaggaactggtggagaagccagctgtgggggaatcaaaggaggagaagatcgagctgaaaagtattacggccgacggggaatcccccccagcaaccaaaatcaacatggacgatctccagcctaacgaaaacgaagacaaaagtccttatccaaatcccgagacgactggcgaggaggacgaggaggagccagagatgcccgtcggcccaaggcctcggcctctgtctgaacttcatctgaaggagaaagccgtaccaatgccagaagctagcgcctttttcatttttagctcaaataacagattccgattacagtgtcacaggattgtcaacgatactatcttcaccaatctcatactgttcttcatcctcttgtcctccatctccctcgccgcagaggatccagtccagcataccagcttccgcaatcacatcctgttttacttcgacattgtgttcaccaccatcttcacgatcgaaatagctctcaagatgaccgcttacggcgcttttctgcacaagggttcgttttgtagaaattactttaatatcctcgatctgttagtggtgtctgtgtctcttatctccttcggtattcagagtagcgctattaatgtggtcaagatcttgagagtgttgcgagttctgcggcctctgcgggcaatcaaccgggcaaagggcctgaagcatgttgtgcaatgtgtatttgtcgctattcgcaccatcggaaacatcgtgatcgtaacgaccttactacagtttatgtttgcctgcattggagtgcagttgttcaaggggaaactctacacttgcagcgactcatctaagcagaccgaagccgagtgtaaaggcaactacatcacctacaaagacggagaagtcgaccatcctattatccagccacgaagctgggagaatagtaagttcgactttgataatgtgctggccgctatgatggctctgtttaccgttagcacatttgagggctggcctgagctactctataggagtatcgactcacacactgaggataagggtcctatttataactatcgcgtggaaatcagcattttcttcatcatttatatcatcatcatcgctttttttatgatgaatatcttcgttgggttcgtgatcgtgactttccaggaacagggtgaacaggaatacaaaaattgcgagttggacaagaatcaacgccagtgtgttgaatatgccttgaaagccagacctctgcgacgctacatacccaaaaatcagcaccagtataaagtctggtatgtagtgaatagtacatatttcgagtacctgatgttcgtcctgattctgctcaacacaatctgtcttgccatgcagcattacggtcagagttgcctgttcaagattgctatgaatatcctgaatatgctgtttacaggtctgttcactgttgaaatgattctcaaactcattgcattcaaacccaaacattatttctgtgatgcttggaacacgttcgacgcgctgattgtagtaggatccatcgttgacatagcaattacagaagtgaaccctgccgagcacactcagtgtagcccaagtatgggcccaagttgttctcatccacctctggcagtgctgactgcaccgcctgtcgccgacggcttccaaaatgccgaagagaactctaggatctccataaccttttttagactgttcagagtgatgaggctagtgaaacttctgagtcggggagagggcatacggactctcctctggaccttcatcaagagctttcaggccttgccatacgttgcactgctgatagtcatgctctttttcatctacgcagtaatcggtatgcaagtgtttgggaagattgccctcaacgacactaccgaaatcaaccgcaacaataattttcagaccttcccccaggcagtgcttctgcttttcagatgtgctactggcgaagcctggcaggatattatgttagcatgtatgcccggtaagaaatgcgcacccgagtccgagcccagtaactcgaccgaaggcgaaactccttgtggctcgtcattcgcggtgttctacttcatcagtttctatatgctgtgtgcctttttgatcatcaatctgtttgtggccgtcattatggacaacttcgactatctgactcgggattggtccattctgggccctcatcatctggacgagttcaagcgcatatgggctgagtacgatccagaagctaagggtcgcattaaacacctagacgttgtgacactgctgcgacgcatccagccacctttgggcttcggcaaactctgtccacaccgagtggcttgtaaacgcctcgtctctatgaacatgcctctcaattctgatggtactgttatgtttaatgctactttgttcgccctcgtaaggacggccttgagaatcaagacagaagaaggcccatcacccagcgaggcccatcaaggggcagaggacccattcagaccagctgggaacctcgaacaggccaatgaggagctgcgggcaattattaagaaaatttggaaacgtacaagtatgaaactgttggatcaagtagtgccacccgctggtgacgatgaggtcaccgtcggaaagttttatgccacttttctgatccaggaatatttcaggaagttcaagaagcgaaaagagcaaggcctcgtaggtaagcctagccagcgcaatgctctctccctgcaggcaggcctacggacactgcatgacatcggtcctgaaattcggagggcaataagtggggatctgaccgctgaggaggagttggataaagctatgaaagaggcggtgtccgccgcatccgaggatgatatcttccggagagcgggtggtttatttggcaatcatgttagttattaccagagcgatggcagatctgcctttccccagactttcaccactcaacggccattacacatcaacaaagctggctcttcacagggggacaccgagtctccgtctcatgaaaaactcgtagatagcacttttacccccagctcttactcgtctacaggaagtaacgccaatattaacaacgctaataacactgccctggggagattgcccagacctgcaggttaccccagcacagtatccaccgtggagggccacggtcctcccctcagccctgcaatccgggtgcaagaagtcgcttggaaactgtcaagtaatcgctgtcattcacgagagtcccaggcggctatggcagggcaggaggagacttctcaggacgaaacttatgaagtgaagatgaaccacgatacagaggcatgcagcgaaccctcattactgtctacagagatgttatcttatcaggacgacgagaaccgccagctgactcttcccgaggaagacaaaagagatatacgccagagtccaaagcgcggattcctgcgcagtgcctctttgggaagaagggcatcctttcacctggagtgccttaaaagacagaaagataggggaggtgacattagccagaagaccgttctgccactgcatctcgtccaccaccaggccctcgctgttgctgggctcagtcccctgctgcagcggtcacattcccccgcatccttccccagaccttttgctacacctcccgcaacgcctggaagtcggggttggcctccccagcccgtgcctaccttaaggcttgaaggcgtggaatcttcagagaaactcaattcctccttccccagtattcattgtgggtcttgggccgagaccaccccaggtggcggaggctcctcagccgctaggagggtcaggccagtgtccctaatggtcccctctcaggccggagctcctggacgacagttccatggatcagcttcatccctagtggaagccgtcctcattagcgagggcttgggccagtttgctcaggacccaaaattcattgaggtgactacccaggagctggctgatgcctgtgacatgaccattgaggagatggagtctgccgcagacaacattttatcaggcggtgcgcctcaaagcccaaacggggctctattgccgttcgtaaattgccgtgacgcgggacaagacagggcgggtggtgaagaggatgccggatgcgtgcgcgcacgaggaagaccctccgaggaggaactccaggactcacgcgtctacgtctccagcctgta

SEQ ID NO: 216610 - DNA, 6560 bp, synthetic construct
  misc_feature 1..6560: note = Description of Artificial Sequence: Synthetic coding sequence
  source 1..6560: mol_type = other DNA
atggtaaatgagaacacacgcatgtatattcctgaggagaatcatcagggcagcaactacggaagcccgcgtccggcacacgccaatatgaatgcaaacgctgcagccggactcgcaccggagcatatcccaaccccaggagcagctttaagctggcaagccgctattgacgccgcacgccaggcaaagctgatgggctcagctggaaacgccactatttctacagttagtagtacccaaagaaaaagacaacagtacggcaaacctaaaaaacaagggtcgacgacagccactagacctccccgtgccctcctctgccttacactgaagaatccaatccgcagggcatgtatctccatcgtcgagtggaagcctttcgagataattattctgctcaccatctttgccaactgtgttgccctggctatttacattccctttcccgaggacgacagtaacgcaactaactctaacctggaacgggtggagtatttatttctgataatttttactgtagaggcctttctcaaagtgattgcttacggtctgctgttccacccgaatgcataccttcggaacgggtggaatctgcttgacttcattatcgtagtggttggccttttcagcgccatcttggaacaggctactaaagccgacggtgctaatgccttgggcggaaaaggggctggcttcgacgtcaaagccctgagagctttccgcgtcttgcgacctctgcgtttggttagcggcgtgccgagcctccaagtagttctgaattcgataatcaaggctatggtgcccttgctccatattgctctgctggtcttgttcgtgataatcatctatgcaattattggattggagctgtttatgggcaagatgcacaagacttgttacaaccaggaaggcattgccgacgtgccggctgaggacgatccttccccttgcgccttggagacgggtcatgggaggcagtgccaaaatgggacagtgtgcaagcccggttgggatggtcccaagcacgggatcacaaacttcgataacttcgcctttgctatgctgacagtatttcagtgcataacaatggaaggctggacagacgttctctactgggtcaacgacgcggttgggagggattggccctggatttatttcgtcacactgataattatcggctcattcttcgtgctgaatctggtgctgggagtgttgtcgggcgaattttccaaggaaagagaaaaagccaaagctcggggagatttccagaagctgagggagaaacagcagctggaagaggacttgaaaggatatctggattggattacccaggccgaggatatcgaccccgagaacgaggacgaggggatggatgaggagaaacccaggaacatgagtatgccaacgagcgagactgaaagcgtcaatacggagaacgtcgccggtggagatattgaaggcgagaattgcggggcacggctggcccataggatatccaagagcaagttcagtagatactggcgccgatggaatcgcttctgccgtaggaaatgccgagctgctgttaaatccaacgtattctattggctcgtgatattcttggtctttcttaacacccttactatcgctagcgagcactataatcagccgaactggctcacggaggtccaggacactgctaataaggcgctgctggctctgttcaccgctgagatgctgctcaaaatgtactccctgggactgcaggcttatttcgtatccctattcaacagattcgattgctttgtcgtgtgcgggggtatcttggagaccattctggtggagaccaaaataatgtcaccgctcggcatctcggtgctgcgctgcgtccggctgttacgcattttcaagattactcgctactggaactccctttccaacctggttgccagtctgctgaactcagtcagatctatcgcatctttacttctgttactcttcctgtttatcattattttcagtctgctcgggatgcagctgttcggcggaaagttcaactttgacgagatgcagacacggagaagtactttcgataacttcccacagagcttgctaacagttttccagattcttaccggagaagactggaactccgtcatgtacgacggtatcatggcctacgggggaccaagctttccaggcatgctggtgtgcatatatttcattatattgtttatctgtggcaactacatattactcaatgtgtttctcgccattgctgttgacaacctcgcggatgctgaatcacttacatcagcccagaaggaggaagaggaagaaaaggagagaaagaagcttgctagaaccgcaagccccgagaagaagcaagaattagtagaaaagcccgctgtgggagaaagcaaggaagagaagatcgagctcaaatcaatcaccgcggatggcgagtccccacccgcaaccaagataaacatggatgacctccagcctaatgagaacgaagataaaagtccataccccaacccggagaccacaggcgaagaggacgaggaggagccagaaatgcctgtgggtccgcgtcccaggcctctgtcagagcttcatctgaaggagaaggccgttccaatgcctgaagccagcgcattctttattttctccagtaataacaggttcagactgcagtgtcacaggatcgtgaatgacactattttcaccaacctcattctgttttttattctactgtctagtatttctttggccgcagaagatcctgtccagcatacttccttcagaaaccacattctgttttatttcgatatcgtattcaccactatcttcaccattgaaatcgctctgaagatccttggtaatgccgactacgtattcacctctatctttaccctggaaattatcctgaagatgaccgcatatggcgctttcctgcacaagggatctttttgccggaattattttaacatccttgacctactggtggtgtcggtgtcactgattagcttcggcattcagagctctgccatcaacgtggtgaagattctccgtgttctgcgggtacttagaccccttagggccattaatagggccaagggactcaagcatgtggtgcaatgtgtgtttgtggccatccgtaccatcggaaacatcgtgattgtcaccactttactgcagttcatgtttgcctgcataggcgtccagcttttcaaaggaaagctgtatacatgtagcgactcctccaaacagactgaggccgaatgcaagggaaattacattacctacaaggacggcgaggtagaccatcccataatccagcccagaagttgggagaattctaaatttgattttgataatgtgcttgcagccatgatggcgctcttcacagtatctactttcgagggctggccggaattgctgtaccgctccatcgatagtcacactgaagataagggccctatctataattacagggtcgagatttcaatcttctttatcatctacatcattatcattgcatttttcatgatgaacattttcgtggggttcgtgatagtgacctttcaggagcagggcgagcaggaatacaagaattgtgagctggacaaaaatcaacgtcagtgtgttgaatacgccttaaaggccaggccgcttagacgttatattcccaagaatcagcatcagtacaaagtctggtacgtggtgaactcaacttattttgaataccttatgttcgtcctaattctcctgaacaccatctgtctggctatgcaacattatggccagtcttgcctgttcaagatcgccatgaacattctgaacatgctgttcacgggtcttttcacggtcgagatgatcttgaaactgatagctttcaagcctaagggctatttcagtgatccctggaacgtattcgacttcttaatcgtcattggcagcattatagacgttattctgtccgagaccaatcactacttctgcgacgcatggaacacattcgatgccctcatcgtcgtaggttctattgtggacattgccattactgaagttaaccccgcagagcacacccagtgttccccatctatgaatgcagaggagaattcaaggatatcaattacattctttaggctgttccgcgtgatgcggctcgtcaagctgttatcacggggtgagggcattcggaccctgctgtggacctttattaagtccttccaggcgttgccatacgtggctctccttattgtcatgctcttcttcatctacgccgtgatcggaatgcaggtgtttggcaagattgccttaaatgatacgaccgagattaatcgcaataataacttccagactttccctcaggccgtgttgctgctctttaggtgcgccaccggggaggcatggcaggatatcatgttggcgtgtatgccaggaaagaaatgtgctcccgagtcagagccttccaacagcacagaaggtgagacaccttgtggatcttcctttgcagtcttttacttcatttcattttacatgctatgcgcgttcctgatcattaatctctttgtggccgtgatcatggacaactttgactatctgacccgggattggagcatccttgggcctcaccacctggatgagttcaagcgtatttgggctgaatacgaccctgaagcaaaggggaggatcaagcacctggacgtggtcacactgctgcgcaggattcaacccccactcggcttcggcaaactctgtccacaccgagtggcctgtaagaggctggtctctatgaatatgcccttaaatagcgatggtacagtaatgtttaacgctactctttttgcgttggtgagaactgccctgcggatcaagaccgaagggaatcttgaacaagcgaacgaggaattaagggcaataataaaaaagatttggaaaaggacttcaatgaagttgcttgatcaggttgttcctcccgctggcgatgacgaggttacagttggcaagttctacgcaacctttttgatccaagaatatttcagaaagttcaagaagaggaaagagcaggggctggtgggcaagcctagtcaacgaaatgctctgtccctgcaggcaggcctgcggacgctccacgatatcggccctgaaatccgaagagcaatctccggggatctcaccgctgaagaggaattggacaaggcgatgaaagaggctgtttcagccgcttcagaagatgacatctttaggagggcgggtggcctgtttggcaatcatgtgagttactatcagtccgacggccgttccgcctttccacagaccttcactacccaacggcctcttcatataaacaaggcgggtagctcccaaggtgacaccgagtcgcccagccatgagaagctggtagactccacattcacaccctcaagttacagctcaactggttccaacgcaaatattaacaacgccaacaacacagctctgggtcggcttcctagaccagcagggtacccatcaacggtatcaacggtggaggggcacggcccacctctgtcgcctgcgattagggtccaggaggtggcatggaagttgagctccaaccggtgccatagtagagagagccaggcagccatggctgggcaagaagagacgtcccaggatgaaacctatgaggtgaagatgaatcatgacaccgaagcttgtagcgagccgtcgcttctttccactgaaatgctttcttatcaggacgatgagaaccggcagctaactcttcctgaagaagataagcgcgacatccggcaaagtccaaagaggggttttttgaggtcagcatccctgggccgtagagcttcattccatttggagtgcctgaaacggcagaaggatcggggtggagacatctcccaaaaaactgtgttacccctgcatctcgtacatcaccaggcactggctgttgccggtctgtcacccttattgcagcgctcccactccccagcatccttcccacgcccatttgcgacccctccagcgacacctggcagcaggggttggccacctcaacctgttcctacacttcgcctggaaggcgttgagagcagcgaaaagcttaactcttcatttccctcaattcactgtggctcctgggctgagactacacctgggggtgggggatccagcgccgcacgcagagtccggccagtgagtctcatggttccctctcaggcaggcgctccaggccgtcagttccatggatccgcctcatccctagtcgaagccgtcctgatctctgaaggcctgggccagttcgcgcaggatcctaaatttattgaggtcacgacccaggaacttgcagatgcctgcgacatgaccatcgaagagatggaaagtgccgcagataatatactgagtggcggagcgccacagagcccaaatggcgcactcctgccctttgtgaattgccgtgatgctggtcaggatagagctggcggagaggaggatgcgggttgtgtccgcgcacgtggacgcccatcagaagaggaactgcaggattccagagtgtacgtgtccagcttata

SEQ ID NO: 216611 - DNA, 6440 bp, synthetic construct
  misc_feature 1..6440: note = Description of Artificial Sequence: Synthetic coding sequence
  source 1..6440: mol_type = other DNA
atggtcaacgagaatactcggatgtacataccggaagaaaaccaccagggctccaactacggtagccccaggccggctcacgctaacatgaatgcgaatgctgctgcgggactcgccccagaacatatccctactccaggggctgcactgtcttggcaggcagccattgacgcagcgcgtcaagcgaaactcatgggtagtgcgggtaatgccactatttccaccgtctcttctacccagaggaagcgtcaacagtatggaaaacctaagaaacagggctcaactacagccacccgtcctccccgagccctgctttgcctgaccttaaagaacccaatccgcagggcctgtatcagcatcgtggaatggaaacctttcgaaatcatcattctgttaaccatattcgcaaactgcgtagccctggctatttacattcccttcccagaggacgacagtaacgccacgaatagcaatctggaaagagtcgagtatctatttcttattatctttaccgtagaagcttttctcaaggtcatcgcgtatgggttactgtttcacccaaatgcttacctgagaaatgggtggaaccttctcgatttcataatcgtcgtcgttggcctcttttcagctattctggaacaggctaccaaagccgatggtgccaatgctttgggcggtaaaggagcagggttcgatgttaaggcactgagggcctttcgtgttctgcgaccattgaggctcgtctccggtgttcccagccttcaagttgtgttgaattccattatcaaagccatggtccccctcctgcacatcgcactgctggtactgtttgtgataataatttatgctataatcggactcgagttgttcatggggaagatgcataagacctgttataatcaggaaggaattgctgacgtgcccgcagaggacgacccttcaccctgcgccctcgagaccggacacggaagacagtgccaaaatggaaccgtttgtaaacccggatgggatggccctaagcatggaatcacaaatttcgataactttgcctttgcaatgctgactgttttccagtgtataaccatggagggatggacagacgtgctgtactgggtgaacgatgcagtggggagagattggccttggatctatttcgtgactctgatcataataggctctttcttcgtcctgaacctagttcttggggtgctcagtggagaattttccaaagaaagggagaaggccaaggctcgcggagattttcaaaagttgcgtgaaaagcagcaactggaagaagacctgaaagggtacctggactggattacccaagcagaggatatcgaccctgagaacgaggacgaaggcatggacgaagagaagccgcgaaatatgtccatgccaacctcagagacggagtctgtgaatactgagaacgtcgcaggcggtgatattgagggggagaattgcggcgctcgtctggcccataggatatcaaagagcaagtttagccgctattggcgccgttggaaccgattctgcagaaggaaatgtagggcagctgtcaaatccaacgtgttctattggctcgtgatttttctggtcttccttaatacgctcaccatcgcgtctgaacattataaccagcccaattggttaaccgaggtgcaggacaccgccaacaaagcactcttggccctgttcactgccgaaatgctgcttaagatgtattcattgggactccaggcctacttcgtgagcctctttaatcgctttgattgttttgtagtgtgcggagggatcttagagactatattagtcgagaccaagataatgtctccacttggcataagcgttctgcggtgcgtacggctgcttagaatattcaagattactcggtattggaatagcttatcgaatcttgtggccagcttattgaactcagtgagatccattgccagccttcttctcctgctgtttctgttcatcatcatctttagtctgctcgggatgcaactgtttggcggaaagttcaactttgatgagatgcagacacgaaggtctaccttcgataacttcccccagtccctgctcacagttttccaaatcttaactggagaggattggaacagcgtgatgtacgatgggatcatggcgtatggcggtccatcctttccaggaatgctggtttgcatttatttcatcatccttttcatatgcgggaattacatattacttaatgtatttttggccatcgctgtggataaccttgccgacgctgagagtctgacctctgcccaaaaggaggaagaggaggaaaaagagagaaaaaagctggctcgtaccgcctctccagagaagaaacaggaactcgttgagaaacccgcagttggagagtctaaggaggaaaaaattgagttaaagagcatcaccgccgatggggagagtccgccagcaacaaaaatcaacatggacgacctgcagccaaacgaaaatgaagacaaaagcccctaccccaatcccgagacaacaggggaggaggatgaggaagagccagaaatgccagttggcccacgcccaagacccctctcagaactgcacctgaaggaaaaggctgtccctatgccagaagcatccgccttttttattttcagtagcaataatcgattcaggctccagtgccacaggattgtcaatgataccatttttaccaacctcattctgtttttcatcctgcttagttccatatctttggccgctgaagatcctgttcaacacacctcatttagaaaccatatcctgggcaacgccgactatgtattcacttccatcttcacgctggagattattcttaagatgacggcctatggcgcttttctccacaaaggcagcttctgtcggaactatttcaacatactggacttgctcgttgtttcagtatcactcatctccttcggaattcaatctagtgctattaacgtggttaagatcctccgcgtgctgagggttttacggcctttacgggcaataaacagggcgaaggggctgaaacatgtcgtgcagtgtgtgtttgtggctatccgcactatcggaaatatcgtgattgtcaccaccttgcttcagtttatgttcgcatgtatcggcgtgcagcttttcaagggtaaactgtacacctgttcagacagcagcaaacagactgaggcggagtgcaagggaaattacatcacctacaaagacggtgaggttgatcatcccatcatccagccacgctcttgggaaaacagcaagtttgatttcgataatgtgctggcagctatgatggcccttttcacggtgagtaccttcgaggggtggcctgagctcctctacagaagcattgacagccatacggaggacaaaggtccaatctataattatagagtggagatttcaattttttttataatttatataattataattgcctttttcatgatgaacatcttcgttgggtttgttatcgtgacgttccaagagcagggcgaacaggagtataagaactgtgaactagacaaaaaccagagacaatgtgtggagtatgctctgaaagctcgtcctctgaggaggtacatccctaagaatcaacaccaatacaaagtgtggtacgtcgtcaatagcacgtatttcgaatatcttatgtttgtcttgatcctgctgaacacgatatgtttagccatgcagcactatgggcagtcgtgtctgtttaaaatcgctatgaatattttaaacatgttgtttacaggtctatttacagtagagatgatcctgaaattaattgcattcaaacctaagcactatttctgtgacgcttggaataccttcgatgccctgatcgtcgtcgggtcaatagtagatatcgcaatcacggaggtgaataatgcggaagaaaacagcaggataagtattaccttcttccggttgtttcgggttatgcggttagtgaaactcctgtctcggggagagggaattagaactctactgtggaccttcattaagagcttccaagcactcccctacgtggcccttctgattgtcatgctgttctttatatacgctgtcatcgggatgcaggttttcgggaagattgctctcaacgatacgacagaaatcaataggaataacaactttcaaacatttccacaggcagtcctgctactgttcagatgtgctacaggtgaggcctggcaggatatcatgctagcatgtatgcccggtaagaagtgcgccccagagtcagagccatctaattccaccgagggcgaaacgccgtgtggttcctcatttgccgtcttctacttcataagtttctacatgctctgtgcgttcttgatcatcaatctgttcgtcgccgtgatcatggacaacttcgattatctgacaagggactggtctatcctaggaccacaccatctggacgagtttaagcgtatctgggcagagtacgatcctgaagctaaaggccgaattaagcatcttgatgtggttaccctgctgcgcaggattcagccacctttggggtttgggaaactctgtccacaccgagtggcctgcaaaaggctggtcagcatgaatatgcctctcaattctgatgggacagtcatgttcaacgccacactgttcgctttagtgcggaccgccctccggatcaagaccgaggagggcccttcccctagcgaggcccatcagggagctgaagacccctttcgtcctgccggtaacctggaacaggccaatgaggagttgcgtgctatcatcaagaagatatggaagaggacatccatgaaactcctggaccaggtggtaccacccgctggcgacgatgaggtaactgtgggtaagttttatgccacttttctcatacaggagtacttccgaaagttcaagaaaagaaaggagcagggtctagtgggtaagccttcacagaggaatgctttgtcacttcaagctggcctgcggacgctgcacgatatcggtcccgagattcggcgtgctatcagcggggacctgactgccgaagaggagctggataaggctatgaaggaggccgtgtccgctgcatcagaagatgacattttcagacgagcgggtggtctcttcggcaaccacgtgtcttactaccagtcggacggcaggagtgcctttccccaaacgttcactactcagcggccacttcatatcaacaaggccggttccagtcagggcgacacagagtctccaagccacgaaaaattagtggacagcaccttcactccctccagttattcatccacaggctcgaatgcaaacatcaacaacgccaataacacagcattgggacggttgccccgaccagcgggatacccttccacggtctcaacagttgaaggtcatggtcctcccctttccccagccattcgtgtgcaggaagtcgcctggaagctgtcctcaaaccggtgccattcgagggagtcgcaggcagcgatggccggtcaggaggagacatcgcaggatgaaacctatgaagtcaaaatgaatcatgatacagaagcttgttctgaacctagtctgctatcgacagagatgctgtcttatcaggacgacgaaaatcgacaacttactttgccagaagaggataagagagacatccgtcagtcccccaaacggggttttctgagaagcgcctccttgggaaggagggcgtcgttccacctggagtgcttgaagaggcaaaaggaccggggaggtgatatctcccagaaaactgtcctgccgctccatctcgtacaccatcaggccctcgccgttgccggactgtctcccctgctccagcgcagccacagtcctgcaagtttccccaggccatttgccaccccacctgctaccccaggaagccgcggatggccaccacagcctgtacctacattgagactggagggcgtggaatcttctgaaaagctgaattcctcattcccatccatccattgtggatcctgggctgagactaccccaggaggagggggttccagtgcggctcgacgagtcagacccgtttcactgatggtacctagtcaggccggagctcccggtaggcaatttcacggatccgcctcttccctagtggaggcggtgcttattagtgaagggctgggccagttcgcacaggatcccaaatttattgaagtgactactcaagaactcgctgatgcgtgcgatatgaccatagaagagatggaatccgccgcagataatatcctgtcaggcggagcaccccagagcccaaatggcgctctgctccctttcgtcaactgtcgcgacgcgggtcaggatcgggctggaggcgaggaagacgccggttgtgtgcgagcgagggggagaccatccgaggaggaactgcaggactcccgggtgtatgtgagttcactgta

SEQ ID NO: 216612 - DNA, 6440 bp, synthetic construct
  misc_feature 1..6440: note = Description of Artificial Sequence: Synthetic coding sequence
  source 1..6440: mol_type = other DNA
atggtcaatgagaacactcggatgtatattccagaggagaatcaccagggtagcaactatgggagccctaggcctgctcatgccaacatgaacgcaaacgccgcagctggactggcccctgaacacattcctacccctggggctgcacttagctggcaggcagctatagatgcagcgaggcaagccaagttgatgggcagcgctggcaacgcaaccattagcaccgtttctagtacccagcgaaaacgtcaacaatatggcaagcccaagaaacagggctccaccaccgccacacggccacctcgtgcattgctttgccttacattaaaaaatcccattcgaagggcatgcatcagcattgtcgaatggaaacccttcgagatcatcattctgctgaccatattcgccaattgtgtggcactcgccatttacatccctttcccagaagatgatagtaatgcaaccaattccaatctggaacgcgtggaatacctcttcctgattatctttactgtcgaagcatttctgaaggtcatcgcatatggtcttctatttcacccaaatgcctatttacggaacggctggaacctgcttgactttatcatagttgtggtgggccttttctcagccatcttggaacaggcaaccaaggccgatggagccaacgcccttggaggaaagggggctggattcgacgtcaaagcccttcgcgcttttcgggtactgcggcctcttcggctggtgtcgggggttccctcactgcaggtcgtgctgaactccataatcaaggcaatggttccgctgctgcatatcgccctcttggttctgttcgtgattattatatacgccatcatcggattggagctcttcatgggaaagatgcacaagacctgttataaccaagaaggcattgcagatgtgccggctgaagatgacccatcaccgtgcgccctggaaaccggacatggtcgacagtgtcagaatgggacggtctgcaaacctggatgggacggccctaagcacggcatcacaaatttcgataactttgcgtttgccatgctgaccgtttttcaatgcattacaatggaaggatggaccgatgtgctatattgggtgaacgatgcagtgggtcgcgactggccgtggatctattttgtaactttgattattattgggtccttttttgtgctgaacttggtgctgggcgtcctctccggcgaattcagcaaggagagggagaaagccaaagctcgcggagactttcagaaacttcgtgaaaagcagcagttagaggaggatcttaagggatacttggactggattacccaggccgaggatatagatcctgagaatgaagacgagggcatggatgaggagaaaccccgaaatatgtcaatgccaacatcagagaccgaaagcgtcaacactgagaacgtcgccggaggggacatagagggggagaattgtggggctaggctggctcatcggatctcgaagagcaagttttccaggtattggaggcggtggaacaggttctgtcgccgaaaatgccgggctgcagtgaagagcaacgtgttttactggcttgtgatctttctcgttttcctgaatacactgacaattgcctctgagcattataatcagccaaattggctaacagaggtgcaagacacggctaacaaggctctgctggctctgttcactgctgaaatgctgctgaagatgtacagcctgggtttgcaggcctatttcgtgtccctcttcaatagatttgactgcttcgtggtgtgtgggggaattcttgagaccattcttgtagaaactaaaattatgtcacctcttggtatttctgtactccggtgtgtgagactgttaagaatctttaaaattacccgatattggaactctctgagtaacctggtcgccagcctgctgaatagcgtccggagtattgcctctttgttgttactgctctttctgtttatcattatcttcagcctgttgggcatgcaacttttcggaggaaagtttaacttcgacgaaatgcagacccgcagatcaacctttgataacttcccacagtctctccttactgtgtttcagattttgacaggcgaggattggaattccgttatgtatgacgggataatggcttatgggggaccatcgttccctggaatgctggtctgtatttactttatcatcctctttatttgcggaaattacatcctgcttaatgtctttctggccatcgccgttgacaatctcgccgatgccgaaagtcttacgtctgctcagaaggaggaggaagaggagaaggaacggaagaaactggccagaactgctagccctgaaaagaaacaggaattggtggagaaaccagcagtgggagagtcaaaggaggagaagatcgagcttaagtcaattaccgccgacggagaatcccctccggctaccaagataaacatggatgacctccaacctaacgagaacgaagacaaaagcccttatcctaacccagaaaccacaggggaggaggatgaagaggagccagaaatgccggtgggaccccgtcccagaccccttagtgagttgcaccttaaggagaaagcagttccaatgcctgaggcaagcgccttttttattttctctagcaataaccgattccgtctccagtgccatcggatcgtgaatgacacaattttcacgaaccttatcttgtttttcatactgctgagcagcatttccctggccgctgaagaccctgtgcagcataccagttttcgcaaccacatattgttctactttgatattgtgtttaccacgatcttcaccattgagatcgccctgaagatgaccgcatatggtgcttttcttcataagggatccttctgtaggaactattttaacatcttggacttactggtggtatctgtgagtctcattagttttggtatccagagctcggctattaacgtcgttaagatcctgagagtgctccgtgtgctgcgcccattgcgcgctatcaatcgggctaaagggctgaagcacgtggtccaatgtgtgttcgtggccattcgcaccatcggtaacatcgtcatcgtaaccactttgctgcagttcatgtttgcctgtattggagtccaattattcaagggcaagctgtacacttgtagtgattcctccaagcaaaccgaggccgagtgcaaaggcaattacattacatacaaggatggagaggtagatcatcctatcatccagccccgttcctgggagaactccaagtttgatttcgacaacgtgctggcagctatgatggctctctttacagtatccacattcgaagggtggcctgagctgctgtacagatcgatagactcccataccgaggacaagggcccaatttacaactatcgggtggaaatctccattttcttcatcatttacatcataattattgcctttttcatgatgaatatttttgtcgggttcgtaatcgttacatttcaagagcaaggggagcaggaatacaaaaattgtgagttagacaaaaaccagcgccagtgcgtggagtacgcactcaaagccagaccgctccggagatatattccaaaaaaccaacatcaatacaaggtctggtatgtggtgaactccacttactttgaatacttgatgttcgtcctcatccttctgaacacaatttgcctggccatgcagcattatggccagagctgtctgtttaagatcgcaatgaacatcctgaacatgctgttcactggcttattcacagttgaaatgatcctgaagctgattgcattcaaacctaaacactatttttgtgatgcctggaacacatttgacgctcttattgtggtgggctctattgtcgacatcgcaatcaccgaggtcaataacgccgaggagaactctcggatcagcataacattttttaggctgttccgggtcatgaggcttgtgaaactcttgagcaggggtgagggcattcgcacgctgctttggactttcatcaaatcctttcaagcgcttccctacgttgccttactaattgtcatgctattttttatctatgccgttattggcatgcaggtcttcggcaaaatcgctcttaatgatacgaccgaaattaacagaaataataacttccagacattcccgcaagctgtgcttttactgttccggtgtgctaccggggaggcttggcaggatatcatgttagcctgcatgccaggcaagaagtgcgcaccagagtctgagccgagcaacagcaccgaaggagaaaccccctgcggctcttccttcgctgtcttttacttcatcagcttttacatgttgtgcgccttcttaatcatcaacctctttgttgctgtcataatggataacttcgactacctgacaagagattggagtattctaggtcctcaccatttagacgaattcaagcgcatttgggctgaatacgatcccgaggccaaaggccgaattaagcacctggatgttgtcactctgctacgcaggatccaaccaccacttggattcggaaagctgtgcccccaccgagtggcctgcaagcgcttggtttccatgaacatgcccctaaatagtgacggtacagtcatgttcaatgctaccctgtttgctttggtgaggacagcccttcgaattaagaccgaagaagggccatcccctagcgaagcgcaccagggcgctgaggatccctttcgcccagccggaaacttagagcaggcgaacgaggagctgcgcgcaatcataaagaagatctggaagaggacgagcatgaagctcctggaccaagtggtcccaccagcgggtgacgacgaggtaaccgtcgggaaattctacgccacatttctgattcaagagtacttccgcaagtttaagaaaaggaaagagcagggactggtcggcaaaccctcccagagaaacgccctgtccctgcaagcgggactgcgcactttgcacgatatcggaccagaaatccgacgcgcaatctctggggacctgacagctgaagaagagctggataaagcaatgaaggaagctgtttctgccgctagcgaggatgatatttttcggagggcaggcggtttattcggcaaccacgttagttactatcaaagcgacggcagatctgcatttccgcagactttcaccacccagcggccattacatatcaacaaggcagggtcttcacaaggagatacggaatctccaagtcacgagaagctggttgactccactttcactccttcctcctacagctccaccggctcgaatgccaacattaacaatgcaaacaacaccgctctgggcagactaccacggccagcaggctatccctctacggtgagtaccgttgagggccacgggccacccctgagcccagctattagagttcaggaagttgcatggaaactctctagcaaccggtgtcatagtagagaaagccaggctgcaatggctggccaggaagagaccagtcaggatgaaacatacgaggtgaaaatgaatcatgacactgaggcctgctccgaaccttctcttctcagcaccgagatgctgagctaccaggacgatgagaacaggcagttaactctgccggaggaggataagcgcgacataaggcagtctcccaaacgcggtttcctgcgaagcgcttccctcggacgcagagcctctttccacctggagtgcctcaaacggcagaaagacaggggaggagacatttcacagaagaccgtactgccgcttcatctggtacaccaccaggctctcgccgtggccggactgagcccattactgcagagaagtcactctccagccagtttcccaaggccattcgctacacccccagccacgcccggtagtcggggatggccccctcagcctgtgcccacgctcaggttagagggcgtggaatctagtgagaaactgaactcgtcattcccctcaattcactgtggcagctgggccgaaactacacctggcggtggcggttcctcagcagcccgacgcgtaaggcccgtgagcctaatggtgccttctcaggctggggcaccaggaaggcagtttcacggttccgccagttcgctcgtggaagcagtcctcatttctgaagggctcggccagtttgctcaagatccaaagttcatagaggtgaccacacaggagctggcggacgcatgtgacatgactatcgaagagatggagtcggccgctgacaacatccttagcggaggcgctccccaatctcccaacggagcactgctcccctttgtgaattgcagagacgccggtcaagaccgcgctgggggagaagaagatgccggttgtgtaagagcacgaggacgtccgtccgaagaggaacttcaagacagcagagtttacgtaagcagtctgta

SEQ ID NO: 216613 - DNA, 6416 bp, synthetic construct
  misc_feature 1..6416: note = Description of Artificial Sequence: Synthetic coding sequence
  source 1..6416: mol_type = other DNA
atggtgaatgaaaacacacgaatgtacattcccgaagagaaccaccaaggaagcaattatggatcacctcggcctgcccatgcaaacatgaatgccaatgccgcagccggattagccccagaacacattcctacacccggagccgctctcagttggcaggcagcaatcgacgcagccagacaggctaagctcatgggctctgccggtaacgctactatttccacggtgtctagtacacagagaaagcggcagcagtacgggaaaccaaaaaagcaaggctccaccactgccactcgtccccctcgggctctgctgtgtctgaccttgaagaaccccatccggcgtgcttgtatcagcatcgtggagtggaaaccctttgagattattatactgctcactatttttgctaactgtgttgcccttgcgatctacatcccttttcctgaggatgacagcaacgccacaaactcaaatctcgaacgtgtagagtatttgtttctgatcatattcaccgtagaggctttcctgaaagtaattgcttacgggctgttgttccaccctaacgcatatctgcgtaacggctggaacctgctggactttattatcgtggtcgtcggtctcttctcggccatacttgaacaagccaccaaagctgatggtgctaacgctctggggggtaaaggagcgggatttgatgtcaaagcccttagggcttttagagtgctccggcctctgcgtcttgtgtccggcgtgccatccctacaagtcgtgctcaacagtatcatcaaggccatggttccgttactgcacatagccctgctcgtgctgtttgtaattatcatttatgccatcattggcctcgagttgtttatgggtaaaatgcacaagacgtgctacaatcaggaagggattgcagatgtccctgccgaggacgatccttctccgtgtgctctagaaaccggccacggtaggcagtgccagaatggaacagtatgtaaaccaggatgggacggccctaagcacggcattactaattttgataattttgcgttcgccatgcttactgtttttcagtgcattaccatggaaggctggacagacgtcctctactgggtgaacgatgcagtgggcagggattggccatggatttatttcgtgactctcatcatcattggaagcttctttgtgcttaatctggtgctcggggtcttatcaggagaatttagcaaagagcgcgagaaagctaaggccaggggagattttcagaaactgagggaaaaacagcagctcgaagaggacctaaagggttacctggattggattacccaggctgaagatattgaccccgaaaacgaagacgaaggtatggatgaagagaagcctcgtaacatgtcaatgcctacatcagagactgaatccgtgaacacggagaatgtagccggaggggacattgaaggcgagaattgtggagccagactggcccatcgcataagtaaatcaaaattctcgagatactggcggcgttggaatcgcttctgccgaaggaagtgtcgcgcagctgtaaaatctaatgttttctactggcttgtgattttcttggtttttctgaatactctgaccattgcctccgagcattacaaccagcccaactggctcacagaggtccaggatacggctaacaaggcactgttagccctgttcacagcggagatgctcctgaaaatgtattctttagggcttcaagcctactttgtctcactgtttaatcggttcgattgctttgtggtatgtgggggtatcctcgagacaattctcgtggagaccaaaatcatgagccccctcggaatttccgtcctcaggtgcgtgcgcctgctccggatcttcaaaatcacgcgctattggaattcgctatccaatctggtagcgagcctgttaaactccgtgcgttccatcgcttcactgttgctgctgctgtttttgttcatcataatcttctctctgctggggatgcagctgttcggcggaaagttcaatttcgacgagatgcaaactcgacgctctacgtttgacaattttccacagtcacttctgaccgtgtttcagatcctaaccggggaggactggaactccgtgatgtacgacggcattatggcttatggcggaccatcattccccggtatgctggtgtgcatctacttcataatcttgttcatttgcggaaattatatcctcctgaatgtctttctggccatcgcagtggacaacttggccgatgcggagtccctgacgtccgcacagaaggaagaggaggaagagaaggagaggaagaagcttgccagaaccgccagtcccgaaaagaagcaggagctggttgagaagcccgcagtcggagagagtaaggaggagaaaattgaactcaagagcatcactgcagatggcgagtcgccgccagccactaaaatcaatatggacgacttacagcccaacgagaatgaggataagtcgccgtacccaaatcctgagaccactggcgaggaggatgaagaggagccagaaatgcctgtgggccctcgcccacgacccctgtcagaactgcacctcaaagagaaggcagtgccgatgccagaggcatccgcattttttatctttagctctaataatagattcagattgcagtgtcaccgcatagttaatgacacgatattcactaacctcatattattcttcatcttgttgagctccatctcgctcgccgcagaagatcccgtacagcatacaagctttagaaaccacatcctgttctacttcgacattgtcttcaccactatcttcactattgagatagccctgaaaatgaccgcctatggcgctttcttgcacaaaggctctttctgtaggaattattttaacatattagacctactggtagtgtcagtgagccttataagtttcgggatccagtcatctgccatcaacgtcgtcaagatcctgagagttttacgcgtgttgcgaccccttagggctatcaatcgggctaaaggcttaaagcatgtggtgcagtgcgtatttgtggctatcagaactattggaaacattgtgatcgtgacaacattgttacagtttatgttcgcctgtatcggcgttcagctgttcaagggcaagctgtatacatgcagcgactcgtctaagcagaccgaagctgagtgcaaaggaaactacattacttacaaggatggcgaagttgatcatcctatcatccaaccgaggagttgggagaactccaagttcgattttgataacgtgttggcggctatgatggccctttttaccgtgtcaacctttgaaggctggcccgagctcttgtacaggagcatcgactcgcatacagaggataagggccctatctataattatcgggttgagatatcaatcttctttatcatatacattatcatcatcgcattctttatgatgaacatcttcgtgggatttgtcattgtcacctttcaggagcagggagagcaggaatacaaaaactgcgagctggataagaaccagcgccaatgtgtggagtacgcactgaaggccagacccctgcgcaggtacatcccgaagaatcagcaccaatacaaagtatggtacgttgtcaactctacatactttgaatatctaatgtttgtcttaatactcttgaacactatctgcctggccatgcagcactacggacaatcttgcctcttcaagattgcaatgaacatactgaatatgctatttaccggcctgttcacagtcgagatgatcttaaaactgattgcattcaagcctaagggatatttttccgacccttggaacgttttcgatttcttaattgtgatcggaagcatcattgacgtgatcctctccgaaacaaaccccgctgagcacacacaatgctctccttccatgaacgctgaggagaactcaaggatatctatcaccttttttcgtcttttcagagtcatgaggttagtgaagttactgtcacgcggagaagggatccgcaccctgttatggactttcatcaagtcttttcaagcactgccatacgtggccctcctgatagtgatgctcttcttcatatatgcagtcattggcatgcaggtgtttggaaaaattgccctgaatgatactacagagatcaaccgaaacaataactttcagacattcccccaggcagtcctgctgctgttccggtgtgccacaggagaagcctggcaggatataatgctggcctgcatgcccggaaagaaatgcgcgcctgagagtgagcctagcaactctacagagggagaaacgccatgtggaagcagttttgccgtattttatttcatatccttttatatgctttgtgcttttttgattatcaatttgttcgtcgctgtcataatggataactttgactatctaactcgcgattggagtatcttgggaccacatcatctggatgaattcaagcgcatctgggctgagtatgatccagaagccaaaggtcgcattaaacatctggacgtcgtgaccttgcttaggaggatccagcctcccctcgggttcggcaagctttgtccccacagggtggcatgtaagcggcttgtgtcaatgaacatgcccctcaacagtgatgggaccgtcatgttcaatgcgacattattcgcactggttcgaaccgctctgagaatcaaaacggagggaaacctggagcaagcgaatgaggaactaagggccatcatcaaaaaaatctggaagaggacctctatgaagctgctggatcaggtggtccctcccgcaggcgacgacgaagtgacagtagggaaattctacgccacgttcctcattcaggagtatttcaggaagtttaaaaaacgcaaggagcaggggcttgtgggtaaacccagccagcggaacgcattgtcgcttcaggcaggacttaggacattgcatgacatcggccctgagattaggcgcgcaatttccggagacctcaccgccgaggaagagcttgataaggcaatgaaagaagcggtgtccgctgcatctgaggacgatatttttcgcagagctggcggactttttggaaatcatgtaagttactatcaaagtgatggtaggtctgccttcccccagacgttcacaacccagcggccactgcacattaataaagctggcagttcccagggagacaccgagagtccctctcatgagaaactcgtcgatagtactttcacaccttcctcttactctagcaccgggtctaatgccaatatcaataacgcaaataacaccgctctaggtcgactgcccaggccagcaggatatccttctacggtgtctacagtggagggtcacgggccaccattgagccctgcaatacgagtacaggaggtggcctggaagctgtctagtaataggtgccatagccgggaaagtcaagccgctatggccggacaggaggagacatcacaggatgaaacctatgaggtcaaaatgaaccacgataccgaggcctgcagcgagccaagtctcctgagcacggagatgctctcctaccaagatgacgagaacagacagttgacactgcccgaggaggacaagcgcgatatacggcagagccccaagcgcggattcctgaggtccgcctcattgggtcgcagggcttcattccatttggagtgccttaagagacagaaagatcggggtggcgacatctctcagaagactgttctgcccctgcaccttgtgcaccaccaggccctcgcagtggcaggcctatctccgctgctgcaacggagccattcaccggcaagtttccctcgcccatttgccacacctccagccactccgggaagccgcggatggccaccgcagccggtgcccacccttaggctcgagggcgtagagagttctgagaaactgaacagttcctttccttcaatccattgcggcagctgggccgaaacgacgcctggcggtggagggtcctctgccgctagaagagtgcgccctgtctcattaatggtaccctctcaagctggggcacctgggcgacagtttcatggctccgccagtagtttagtggaggcagtcctcatcagcgaaggcctgggccagtttgcacaggacccaaagttcatcgaggtaaccactcaggaattggcggatgcttgtgacatgacaattgaggagatggagagtgctgctgataacatcctgtccggaggggcaccccagtctcccaacggcgctttgctcccttttgttaattgtagggatgctggtcaggatagagctgggggtgaagaagacgcgggatgcgttagagcacggggacggccaagtgaggaagaattgcaggatagtcgagtatacgtctctagtctata

SEQ ID NO: 216614 - DNA, 6416 bp, synthetic construct
  misc_feature 1..6416: note = Description of Artificial Sequence: Synthetic coding sequence
  source 1..6416: mol_type = other DNA
atggttaacgagaacacaagaatgtacatcccggaggagaaccaccaaggctccaactatggaagtccgcgaccagctcacgccaatatgaatgcgaacgcggcagctggtctagcccctgaacacatccctacacccggagccgctctgtcctggcaagctgcgatcgatgctgccagacaagcaaaactcatgggttccgccggaaacgccacaataagtaccgtctcctccactcagagaaaaagacaacagtatggcaagcccaagaagcagggctctactaccgccactcgccctccaagggcactgctgtgcctcaccctgaaaaaccccatcaggcgcgcttgcattagcattgttgagtggaaaccattcgagatcataatcctgttgactatttttgcgaactgcgtcgcgctagcgatatatattccttttcccgaggacgactcaaacgccaccaattctaatctggaaagagtagagtacctgttccttattatttttaccgtggaggcattcctcaaggtgatagcatacggtcttctcttccatccaaacgcttacctccgcaatgggtggaacctgctcgactttatcattgtggttgtcggccttttttcagccatactggagcaggccactaaggccgacggcgctaatgcgctgggcggaaagggcgctggattcgacgtgaaggctcttcgtgcctttcgcgttctgcggccactccgccttgtgtctggcgtcccatccctccaagtcgtgctgaacagcatcattaaggctatggtccctctgttacacattgcactgcttgtgctgtttgtcattatcatctatgccattattggcctggagctgtttatgggcaagatgcataaaacctgttataaccaggagggtattgcggacgtacccgctgaggatgatcctagtccttgtgctcttgagacaggccatgggagacagtgccagaacggcacagtgtgcaagccgggttgggacggacccaaacatgggatcacaaattttgacaatttcgcattcgcgatgctcaccgtcttccaatgtatcaccatggagggctggacagacgtgttatactgggtcaacgatgctgtggggagagactggccatggatttatttcgtaaccctgattataataggatccttcttcgtactgaacctggtgctgggcgtactgtctggtgaattttcaaaggagcgtgaaaaggctaaggctagaggcgatttccaaaaactgcgggagaagcaacagctggaggaggatctcaaggggtacctggactggattactcaggccgaggacatagatccagagaacgaggacgaaggaatggatgaggagaaaccccgaaacatgtccatgccgacaagtgaaaccgagtctgttaacacagaaaacgtggctggcggagacatagagggagagaactgtggtgccaggctggctcacaggatctccaaaagcaagtttagccgctactggcgcagatggaatcgattttgtaggcgaaaatgcagagctgccgtaaaaagcaacgttttctactggctcgttatctttcttgtgttcctcaacacgctgacaatcgcctcggagcactacaaccagcccaattggttgacagaggtgcaagacaccgctaataaagccttgttggccctcttcaccgctgagatgcttcttaagatgtatagcctcggccttcaggcctattttgtatcactctttaaccgcttcgactgtttcgtggtgtgtggcggtattctagagacaattttggtggagacaaagattatgtcccctttgggaatcagcgtgctcaggtgcgtacggctcctgcgcattttcaaaatcacccgttattggaacagcctgtctaatttggtggcctcactgttgaatagtgttcggtcaatcgcctctctgctcttgttactgttcctcttcatcatcatatttagtttgttgggcatgcaactgtttggtggaaagtttaacttcgacgaaatgcagactcgcaggagcacctttgataactttcctcagagtttgttgacagtcttccagatcctgactggcgaggattggaattccgtgatgtatgacggcatcatggcctacggagggcctagctttcccggaatgctggtgtgcatttactttattatactcttcatctgcggcaattatattttgctaaatgttttcctggccattgccgtggacaacttagcggacgccgaatctcttacctctgcgcagaaggaggaggaagaagaaaaagagaggaagaaactggccagaaccgcctctccagagaaaaagcaggagctcgtcgaaaagcccgctgttggggagtcaaaggaggaaaagattgaacttaaatctattacagccgatggcgagtctccacccgcaacaaaaattaacatggatgatctgcagcccaacgagaatgaggataagtcaccatatccgaatccagaaaccaccggggaggaggacgaagaagagccagaaatgcctgtgggccctagaccaagaccactgtctgagctccatttaaaggagaaagcagtgcccatgcccgaggcatccgccttcttcatatttagtagcaataatcggtttagactgcaatgccacaggattgtaaatgacaccatcttcaccaacctgatcctgttctttattctgctgtcttccataagtttagcagctgaggatcccgtccagcacacaagcttccgaaaccatatcctaggcaatgctgactacgtgttcacctcaatatttacactggaaatcatcttaaagatgaccgcatacggagcctttctccacaagggaagtttctgtaggaattacttcaacatcttggatcttcttgtggtctcagtgtctttgatttccttcggcattcaatcctcagctattaatgtggtgaagatccttcgcgtcctacgcgtactgagacctttgcgagcaattaaccgcgcaaagggcctcaaacacgtggttcaatgtgtttttgtggccattagaactatcggtaacatcgtcatcgtcactacgctcctgcagttcatgtttgcatgcattggcgtgcaactttttaagggaaaactttacacctgttccgactcttccaagcagactgaggcggaatgtaaaggcaactatatcacttataaggatggagaggtagatcacccgatcattcagccccgatcttgggaaaattctaaatttgacttcgacaatgtgctggccgctatgatggcgctgttcactgtctcaacctttgagggatggcccgaattgctctaccggtccatcgattcccacaccgaggataagggacccatctacaattatcgcgttgagatttccatattcttcatcatttacatcattattatcgcctttttcatgatgaatatcttcgtcgggttcgtaatcgtgacgttccaggaacagggcgaacaggagtataagaactgtgaactggataagaaccagcggcagtgcgtcgagtacgcgctgaaggcacgccctttgcggcgatacatccctaagaatcagcaccaatataaggtctggtatgttgtgaacagcacttacttcgagtatctgatgttcgtccttatcctgctcaataccatttgcctggctatgcagcactatggccagtcatgtctctttaagatagcaatgaatattctgaatatgcttttcaccggcttgttcacagtggaaatgattctgaagttaattgcctttaagcccaagcattacttttgcgatgcgtggaatacttttgatgccctgatagtagtgggatccattgtcgacattgccataaccgaagtaaaccccgcagagcacacccagtgctccccaagtatgaacgctgaggagaatagccgcatcagcatcacctttttcaggctgttcagggtgatgcgcctggtcaaattgctgagccgcggtgaaggcatcaggaccctgctatggacctttatcaaaagcttccaagctcttccatatgtggctctcttgatagtgatgcttttcttcatctacgccgtgataggtatgcaggtctttggtaagatagcactgaatgacactaccgagataaatcgcaataataacttccaaacttttccccaagctgtgctcctcctgtttagatgtgccactggagaagcgtggcaagacataatgctggcttgcatgcctgggaagaagtgtgccccagagagtgagccttctaatagcactgaaggagagaccccgtgcggttcatctttcgccgtgttctacttcatatctttttacatgctgtgtgcttttctgataattaatctgtttgtcgccgtgataatggataacttcgattatctgacaagggactggagcatattgggcccacatcatctggatgagtttaaacgcatctgggcagagtacgatcctgaggctaagggcagaattaaacatctcgatgtcgttactttgctcaggcgaatccagcccccactgggatttgggaagttatgcccccaccgcgtcgcatgcaagcggttggtaagcatgaacatgccattaaacagcgacgggacggttatgttcaatgccacgcttttcgcacttgtgaggactgcactgagaatcaaaacggagggaaacttagagcaagccaatgaggaactcagggcaatcatcaaaaaaatatggaagcgaacttctatgaagcttctcgatcaagttgtgccccctgccggtgacgatgaagtgactgtcggtaagttctatgctacatttctgatccaggagtacttcagaaagttcaaaaaacgcaaggagcagggccttgtgggcaagcctagccaacgcaacgccctctcgctacaagctgggctgagaactctccacgacattggtcctgagattcggagggcgattagcggggaccttacagctgaggaggagttggacaaggcgatgaaagaggctgtaagtgccgcttctgaggatgacatatttagacgagcaggcggattattcgggaatcatgtatcctattatcaaagtgacgggaggagtgccttccctcagacttttaccactcaaagacctctgcacattaataaggccggatcatcccagggtgacacagagtctccatcccatgagaaattggtggacagtactttcactccatccagctatagtagcaccgggtccaatgccaatatcaataacgctaataatacggcgctgggacggctccctagacccgcagggtacccctctaccgtaagcacggtcgagggacacgggccacctctctctccagccatcagagtgcaggaggtggcgtggaaattgagcagcaacaggtgccacagcagagagtcccaggctgctatggccggacaggaagagacctcccaggacgaaacatatgaggtgaaaatgaaccacgatactgaggcatgcagcgagccgagcctcctgagcacagaaatgctatcctaccaggatgacgagaatcgccagctaacacttcctgaggaggacaagcgtgatatcagacagtcccctaaacggggtttcctgcggtccgcatccctgggaaggagagcctcctttcatctcgagtgtctgaagagacaaaaagataggggtggagatattagtcagaaaacggtgctccctttgcatctggtccaccatcaagccctcgcagtcgcaggattgagccctctgctacagcggagccatagcccggcatctttcccaagaccttttgccacccctcccgcaacgcctggatctcgaggttggccaccacaacctgtgcccacacttagattagagggggttgagagttctgagaagctgaattcatctttcccatcaatccattgtggttcctgggctgaaaccacacccggaggcggaggatcctcagccgctcgaagagtgagaccggttagtttgatggtaccctcccaggccggagcccctggcagacaattccacggctccgccagctcacttgtggaggctgtgttgattagtgaggggctggggcagtttgcccaggaccccaagttcattgaggtcaccacccaggagttggctgatgcctgtgacatgactattgaggaaatggagagtgcagcagataacatcctcagcggcggtgcacctcagagccctaatggagctttactgccctttgttaattgtcgcgatgcaggccaagacagagctggcggagaagaggacgcaggttgcgtgagagctaggggacgcccttctgaggaggagctgcaggatagcagagtgtacgtcagttctttgta

SEQ ID NO: 216615 - DNA, 6416 bp, synthetic construct
  misc_feature 1..6416: note = Description of Artificial Sequence: Synthetic coding sequence
  source 1..6416: mol_type = other DNA
atggtgaatgagaacaccagaatgtacattcctgaggagaaccatcaggggagtaattacgggtctccacggcctgcccacgccaacatgaatgcgaacgcggcagccggattggccccagaacatatccccacccctggcgcagccctatcttggcaggcggcaattgacgcagccaggcaggcaaaactgatgggctcagccggaaacgccaccatctctactgtgtcctccacacagagaaaaagacagcaatacgggaagccgaaaaaacagggatccaccactgccactagacccccaagagctctgctctgtctcaccctaaagaacccaattaggcgggcatgtatttctatagtcgagtggaagccctttgaaatcatcatcttacttacgatcttcgccaattgtgtcgccctggctatctatattccattccccgaggacgatagtaacgcgaccaacagcaaccttgagcgcgtcgaatacctgttcctgattatcttcaccgtcgaggctttcctcaaggtaatcgcgtatggtttgctgttccaccccaatgcttatttgaggaacggctggaacctgctggattttatcattgtggttgttggactattttctgccattcttgaacaggccaccaaggccgatggagcaaatgctttaggcggaaagggggctgggttcgatgtgaaagcactgcgcgcttttcgagtgctccgtccgttaaggctggtctccggggttcctagtcttcaggtggtgctcaactccattattaaagccatggttccactgcttcacattgcacttctcgttctgtttgtgatcatcatatacgctatcatcggactcgagctgtttatgggaaagatgcataaaacatgctataaccaggagggtatcgccgatgtacccgctgaggacgatccttctccttgcgcactggaaactggacacggtcggcagtgtcagaatggaaccgtgtgcaagcctggatgggatggccctaagcacggcataactaactttgacaacttcgccttcgcgatgctgacagtgttccaatgcattaccatggaaggttggacagatgtactgtattggatgcaggacgcaatgggctatgagctgccttgggtttatttcgtgtccctggtgatcttcgggtccttctttgtcctcaacctcgtgctgggtgtcctctctggtgagttctctaaagagcgcgaaaaagcaaaggccagaggggattttcagaagcttcgcgagaagcagcagctcgaagaggacctcaaagggtacctggactggatcacacaggccgaggacatcgacccggagaatgaggatgaaggcatggacgaggagaagccaaggaatatgtccatgccgacatcagagacagaaagcgtgaatactgaaaacgttgccggtggggacattgaaggagaaaattgtggagcgaggttggcccatagaattagtaaatccaagttttctaggtactggcgcaggtggaacagattctgcagaaggaaatgccgggctgcagtaaagagcaacgtattttattggctggtaatcttccttgtatttctgaatactctgaccatcgcaagcgaacattacaaccagccaaactggctgactgaagtacaggacactgcaaataaagccctcttggcactgttcactgctgaaatgctactgaaaatgtatagcttgggtcttcaggcttatttcgtcagtcttttcaatagattcgattgctttgtggtgtgcgggggaattcttgagacaatcttagttgaaacaaagattatgtcccccctgggcatttccgtgctgcgatgcgttcgcctgttgcgaatttttaaaatcactaggtattggaactcactttcaaacttggtggcctcactcctaaattctgtcagaagcatcgcttccctgcttctactgttattcctttttataatcattttctccctcctggggatgcagctgtttgggggtaagttcaacttcgatgagatgcagacacgcaggagtacattcgataactttccgcaatcactcctgacagttttccagatcctcaccggggaagattggaattctgttatgtacgacggtataatggcttatggtggaccttcatttccgggtatgttagtgtgcatctacttcattatccttttcatttgcggtaactacatacttctgaatgtctttttggcgattgcagtcgacaacctggctgacgcagagagtttgaccagcgcacaaaaggaggaagaggaggagaaagaaaggaagaagctcgccagaactgctagccccgaaaagaaacaagaacttgttgaaaagccagccgtgggagagtctaaggaagagaagattgagctgaagtccattaccgccgacggtgaatctccacccgctactaagatcaatatggacgatctgcagccgaacgaaaatgaggacaagtctccctaccctaaccccgaaacaactggcgaggaagatgaggaggagcccgagatgccggtgggtccgcgtccaagacccctttctgaactccatctcaaggaaaaggccgtgcccatgcctgaagctagtgcattcttcatcttcagctcgaataatagatttcgcctccaatgtcaccggatcgtgaacgacactatctttaccaacctgatcctgttttttatcctgctgtccagcatctccctcgcagcggaggatccagttcaacacaccagttttcggaatcacatcctgttttactttgacatagtgttcactaccatattcacaatcgagatagccctgaagatgaccgcatatggtgcgttcttacacaaagggagcttctgtagaaattacttcaatatactggacctgctggtggtctctgtttctctcatatcattcggcatccaaagctccgctattaatgtcgtgaagatcttacgtgttctgagagtcctgcggcctcttagggcgattaatagggcaaaggggctgaaacacgtcgtgcagtgcgtgtttgttgctatccggacgataggcaatatcgttatagtcactaccctcttacagttcatgttcgcgtgtatcggcgtccagctgtttaagggaaagctgtacacatgctccgacagttctaagcagaccgaggccgagtgcaagggcaattacatcacttataaggacggcgaggtcgaccatccaatcattcagccgagatcttgggagaactccaaattcgacttcgataatgtgctggccgcaatgatggctctatttacagtttcaaccttcgaaggctggccagaactgctttaccggagtattgacagtcacaccgaggataagggtcccatttacaattaccgggtggaaatctcaatcttcttcatcatttacattattatcatcgctttttttatgatgaacatatttgtaggtttcgtgatcgttacttttcaggaacagggtgaacaggaatataagaactgtgaattggacaaaaatcaacgacaatgcgtcgagtacgcactcaaggcacgtccgctccgtaggtacattcccaagaaccagcaccaatataaagtctggtacgtcgtgaactccacttattttgaatacttgatgttcgtgctcatcctactgaatactatttgtctggctatgcagcattacggacaaagctgtttgttcaaaattgccatgaacattttgaacatgttgtttacggggcttttcaccgtggaaatgattctcaaacttatcgccttcaagcccaagggctacttttccgacccttggaacgtatttgacttcttgattgtcattggaagcataatagatgtcatattgagcgagactaacccagccgaacacactcagtgtagcccgagtatgaatgctgaggagaattctcggatcagtataaccttttttcgtctctttagggtcatgagacttgttaagctgcttagtaggggggaaggcattcgaaccttgctgtggactttcatcaagtcgtttcaagccctgccctatgttgccctgctgattgtgatgctgttctttatctatgcggtcatcggaatgcaagtctttggcaagatcgccctcaacgatactactgagatcaatagaaataacaatttccagacattcccccaggcagtcctcctactcttccgctgcgcaaccggcgaggcttggcaagatattatgctggcttgcatgcctggcaaaaagtgtgcaccagagtccgaacctagcaactctaccgaaggtgagacaccctgcgggtcttcatttgccgtcttctattttatcagcttctatatgctatgcgcatttttgataatcaatctgttcgtagccgtcatcatggataatttcgattatctaactagagactggtccatcttggggcctcaccatctggatgagttcaaacgcatatgggccgaatacgatccagaggcaaaaggtcgaataaaacacctggacgtagtcactcttctgagaagaattcaaccccctcttggatttggtaaattgtgccctcaccgggtggcctgtaagcggctcgtctccatgaatatgccattaaactcagacggaacagtgatgttcaacgccactcttttcgctctggtaagaaccgcccttagaatcaagaccgaagggaatctggaacaggccaatgaagagctgagagcgatcattaaaaaaatctggaaaaggacatctatgaagctgttagatcaggtggtcccacccgcaggagacgacgaggtgaccgtcggcaaattttacgcgaccttccttatccaggagtattttcgcaaatttaagaagcggaaagaacagggtcttgtggggaaaccatcgcagcggaacgcactttccttgcaagctggactgagaactttgcacgatatcggtccagagatcagacgggctatttcgggcgatctgacggccgaagaagagctggacaaggccatgaaggaagctgtatctgcggcatccgaggatgatatttttcgtagagcgggtggtctgtttggtaaccatgtctcatattatcagtcagacggtcggagcgcgttcccgcaaacgttcacaactcagaggcctttgcatattaataaagctggatccagtcagggtgataccgagtcccctagccatgagaaactggtggattccacttttaccccctcttcgtattcaagcaccggtagtaatgccaatatcaataacgccaacaacacggctctcggcagacttccacgtccagccggatatccgagtactgtgtcaacggtggaaggtcatggtcctccactgtctcctgccatccgggtgcaggaagtagcttggaagctgtcctccaaccgctgccatagccgtgagtcgcaggctgccatggccggacaggaagaaacgagccaggacgagacgtatgaagtaaaaatgaatcacgacaccgaagcatgctctgaaccttctcttctgtcaaccgaaatgttatcctaccaagacgacgagaaccgacagctcacattgcccgaagaggataagagagatattagacagagccccaaaagaggttttctgcggtctgcttccttggggaggcgggctagttttcaccttgagtgccttaaacgacagaaggatagaggtggggatatttcacaaaagacagtgttgcccctgcacctggtgcatcatcaggccctggcggtcgctggcctgtcacctctgctccagagatcccattcccccgcttcattcccacgtcccttcgcgacaccgccagccacccccggatctcggggttggccaccacagcccgtcccgacattgagactggaaggggtagagagctcagagaaattgaactcatctttccccagcatccactgcgggtcttgggccgagactacacctgggggtgggggtagtagtgccgctcgccgagtgcggccagtgtccttgatggtcccgtcccaggcaggcgcaccagggcgacagttccatggatccgccagcagcctcgtggaggccgttctcattagcgagggccttggccaatttgcccaggacccaaaattcattgaggtcaccacccaggaactggcagatgcttgtgatatgaccattgaggagatggagtccgccgcagataacatcctctcaggtggcgctccacagtcccctaacggcgcactcctgccgttcgtcaactgtcgcgatgccggacaagatcgtgccggtggggaggaagatgccggatgtgtgcgcgcacgagggaggcccagcgaggaagagctgcaggatagccgagtctatgtgtcaagtcttta

SEQ ID NO: 216616 - DNA, 6477 bp, synthetic construct
  misc_feature 1..6477: note = Description of Artificial Sequence: Synthetic coding sequence
  source 1..6477: mol_type = other DNA
atggtgaacgagaacacgcgaatgtatatcccagaggagaaccatcaaggcagtaattacgggagtccaagacctgctcatgctaacatgaacgcaaatgcggcagcgggtctggccccagagcacatccctacgcccggagccgctcttagttggcaagccgctatcgacgccgcacgtcaggcaaagctaatgggctctgccggaaacgccactatatctactgtctcctctactcaaagaaagagacaacagtacgggaagcccaaaaagcaaggaagcactaccgccactagaccaccaagggccctcctgtgtctgaccctcaaaaatccaatcagacgagcctgcatcagcatagttgagtggaaaccattcgaaatcatcatcctgctgaccatctttgcaaattgtgtcgccctcgccatatatattcccttcccagaagatgactctaacgcaactaactcaaatctagagagggtcgaatacctgtttctcatcatttttacagtcgaggcattcctgaaggtgattgcttacggcctcctcttccaccctaatgcctatttgaggaatgggtggaacttgcttgatttcattatcgtggttgtgggactgttcagcgcaatcctggaacaggcgacaaaggctgatggcgcaaacgcgctggggggaaagggcgctgggtttgacgtcaaggccctgcgcgcattccgagtactcaggcctctccgcctggtgagcggggtcccatcactgcaggtggtgctgaactcaatcatcaaggctatggtgccgctgctgcatatcgccttattggtgttatttgtgataataatttatgcgatcatcgggcttgagctgttcatgggaaagatgcacaagacctgctacaaccaagagggcatcgctgacgtccccgcagaggatgatcccagtccgtgcgcccttgagactggacatggcagacagtgccaaaatggaacagtttgcaaacctggatgggacggccctaaacacgggatcaccaattttgataacttcgcttttgccatgttgactgtgttccagtgtatcaccatggagggatggaccgacgtgctttactgggtcaatgacgccgtgggtagagattggccatggatttacttcgtaacgctcattattatcggctctttcttcgtattaaatctggtactgggcgttctgagtggagaattttccaaagagagagagaaagctaaagcacggggtgacttccagaagctccgggaaaagcaacagctggaagaggatctcaaaggatatctagattggatcactcaggcggaagatatcgaccccgaaaacgaggacgagggcatggacgaggagaagccgagaaatatgtcaatgccaacaagtgagactgaaagcgttaataccgaaaacgtggcaggtggggacattgaaggggaaaactgtggagctaggctggcccatcgtattagcaaaagtaaattcagtcggtactggagaagatggaacaggttctgcaggaggaagtgcagggccgctgttaaatccaatgtgttctattggctggtcatattcctggtatttttgaacaccctcactattgcgtccgaacactacaatcagccaaattggctgactgaagtgcaggacacagcaaataaagcactattagccctgtttaccgcagaaatgttactgaagatgtacagcctcggcttacaggcatattttgtgagcctgtttaatcggtttgattgcttcgtggtgtgtggcggaatcctcgagacaattctagtcgaaaccaagatcatgagtccactcggcataagcgtgctgcgttgcgtgagacttttgaggatctttaaaatcacacggtactggaattccctgtctaaccttgtggcctccctgctaaactctgtcaggagcatcgcgagtttattgctcctgctgtttttattcatcatcattttttctcttctaggtatgcagctgtttggtgggaaatttaactttgatgaaatgcagacgagaaggagcacgttcgacaacttcccccagagcctgttgactgtgtttcaaatcctgaccggagaggactggaacagcgtgatgtatgacggtataatggcttacggaggccctagcttcccagggatgcttgtatgcatctatttcatcattcttttcatctgtggtaattacattctactcaatgtcttcttggccatcgctgtggacaatttggccgacgctgaatcacttacatctgctcagaaagaggaagaggaggagaaagagcgaaagaagcttgccaggacagccagccccgagaagaagcaagagctggttgagaaacctgccgtgggtgaatcaaaagaagagaagatagagctgaagagcatcaccgcagatggagaaagtcctcccgcaaccaagataaacatggatgatcttcaaccgaacgagaacgaggacaagtccccctacccaaatccagagaccacaggggaggaggacgaagaagagcccgaaatgccagtgggacccagaccaaggccattgtctgagctacacctgaaagagaaagccgtgcctatgccagaggcatccgcgttctttatcttttctagcaataatagatttcggctgcagtgtcatagaattgttaatgatactatcttcactaacctcatactgttcttcatactgctttctagcattagtctggccgcagaagacccagtacagcacacttctttcagaaatcatatcctgttctacttcgatatcgtttttaccaccatattcacgatcgaaatcgccctgaagattctgggcaacgccgattatgtctttacatcaatattcacccttgagatcattctgaagatgacagcttacggtgcctttctgcacaagggctccttctgccgaaattattttaatattttggacttgcttgtggtctcggtgtcactcatcagcttcggtattcaatcttccgcaattaatgttgtgaaaatcctgagggtgcttagagtcctcagacccctcagagcgattaatcgggctaagggtctgaaacacgtggtgcagtgcgtctttgttgctattagaacgataggaaacatagtgatcgtgacaacgctgttgcagttcatgttcgcctgtataggagtacagcttttcaaaggaaaactgtacacttgttctgacagtagtaaacagaccgaggccgagtgcaaagggaactatattacatacaaagacggagaggtcgatcaccccataatccagcccaggtcgtgggaaaattccaagttcgactttgataatgtgctggcggctatgatggcactctttaccgtttccacctttgaaggatggcccgaactgctgtaccggtctatcgactctcacactgaggacaaaggacctatttacaactatagggtggaaattagtattttctttatcatttacatcattatcatcgcgttctttatgatgaatatctttgtggggttcgtgatcgtgacttttcaggaacagggagagcaagaatataaaaactgcgagctggacaagaatcaaagacagtgcgtggagtacgccctgaaagctcgacccctccgcaggtatatacccaaaaatcaacaccagtataaggtgtggtatgttgtaaacagtacatacttcgagtacttaatgttcgtcctgatcttgctcaacactatttgcctggctatgcagcattatgggcaatcttgcttgttcaagatcgccatgaacatacttaacatgctgtttaccgggctcttcactgtggaaatgatcctcaaactgatcgccttcaaaccaaagcactatttttgtgacgcctggaatacattcgacgccctgatcgtcgtggggtctatcgtggatattgccattactgaagtcaaccccgcagagcatacccagtgctctcccagcatgaacgccgaggaaaattccaggatctcaattacctttttccgcctgttcagagttatgagacttgtcaaactcttaagcagaggcgaaggcattagaactctgctctggacctttatcaaatcattccaagctctcccatatgtcgccctactgatcgtgatgctgtttttcatctacgcagtgatcggcatgcaggtgttcgggaaaatcgctttaaacgatacaaccgaaatcaatcgtaataataactttcagaccttcccccaggcagtgttactcctcttccgctgcgcaactggggaggcttggcaggacatcatgcttgcttgtatgcctgggaagaagtgtgctcctgaatctgagccaagtaactcaaccgagggagaaactccctgtggatcctcttttgccgtgttttactttatctcattctatatgctctgtgcgttcctcatcatcaatctgtttgtggccgtgattatggacaactttgactatctgacaagggattggagcattctcgggcctcaccacttagacgagtttaaacggatctgggccgaatatgatcccgaggcgaagggacggatcaaacatcttgacgttgtgaccctgctgagaagaatccagccacccctaggtttcggaaagttatgcccccacagggtcgcctgcaagaggctggtgtcaatgaacatgccactgaactctgacggcaccgtgatgtttaacgccaccctcttcgctcttgtcaggaccgcccttcggatcaagaccgaaggcaatctagagcaggccaatgaagaactgcgtgcaattattaaaaaaatatggaaaaggacctctatgaagctcctggaccaggtggtgccccctgccggagatgatgaggtcaccgtaggcaagttttatgcaacgtttctgatacaggaatacttccgcaagttcaaaaaaagaaaggagcagggactcgttggcaaaccatcccagcggaatgccctttccttacaggctggactcaggaccctacatgatataggtcctgagatccggagggccatttctggcgacttgaccgctgaagaagagctggataaagcaatgaaggaagccgtgagtgctgctagcgaggatgatatttttcgtcgggctgggggtctttttggaaatcacgtgtcatactatcaaagtgatgggaggtcggcattcccccagacattcacaactcagcggccactgcacattaataaggcaggttcatcccagggcgacacagagagcccttcacatgagaaactggtcgatagtactttcacgccctcatcctacagcagcacagggagcaatgcaaatatcaataatgcaaataatactgctcttgggagacttcctcggccagctggctacccctccaccgtctctacagtggagggtcatggccctcctctgtctccagcgattcgcgtccaggaggtggcctggaagctgtcttccaatcggtgtcactcgagggagagccaggctgcaatggccggtcaggaggaaactagccaggacgagacttacgaagtgaagatgaatcatgatacagaagcttgcagcgagccatctcttctgtccacggagatgctgtcctaccaagacgacgagaatagacaactgacactgccggaagaggataaacgagatatccggcagtctccaaagcgaggtttccttcgttctgccagcctagggcgtcgtgcctcttttcacctagaatgtctcaaacgccagaaggaccgcggaggggatataagccagaaaaccgtcctccccctgcatctagtccaccaccaggctcttgccgtcgctggcctgtcgccgttactgcaaaggtctcactccccagcgtcttttcccaggcccttcgcgacaccccctgctactccaggctcaagaggctggccgcctcagccagtgcctaccttgaggctggagggcgtggaaagtagtgaaaaactcaactctagttttccatctattcactgcggctcttgggctgaaaccacccctggaggtggaggctccagtgctgctagacgagttagacctgtgtcactgatggtcccctcccaagccggagcccctggaaggcagttccatggatctgcaagctccctcgttgaggcagtattaatatctgaggggcttggccagtttgctcaggatccaaagtttattgaggtgacaactcaggagctggccgatgcctgcgacatgactattgaggagatggagagcgccgcagataatatactgtctggaggcgcaccgcagtcgccaaacggggctctgttgccctttgtgaactgccgggatgcaggtcaggatcgggctgggggtgaggaggacgcagggtgtgtgcgcgcacggggaagaccttctgaagaagaactacaagattcccgtgtctacgtgtcgagtctgtac

SEQ ID NO: 216617 - DNA, 6521 bp, synthetic construct
  misc_feature 1..6521: note = Description of Artificial Sequence: Synthetic coding sequence
  source 1..6521: mol_type = other DNA
atggttaacgaaaacacccggatgtatatccctgaggaaaaccaccaaggttccaactacggtagccctaggcccgcacatgctaatatgaatgccaatgcggcagctggcttggcaccagagcacatacccactccgggagccgcacttagctggcaggcagcaatagatgccgctcgacaagccaagctgatggggtcagccggaaatgccactatttccacagtcagcagtacacagcgaaagcgacagcagtacggtaaacctaaaaagcagggtagtaccactgccacgcgtccgcctcgcgcattgttgtgtctgacactcaagaaccctattaggagagcttgcatcagcattgttgaatggaagccatttgaaattataatcctgctgaccattttcgctaattgtgtcgcactcgccatctatatcccctttcccgaggacgatagtaacgcaaccaacagcaacctggaacgggtggaatacctctttttgataatcttcactgtggaggcgttccttaaggtaatcgcgtacggcctcctgttccaccctaacgcatatctgcgcaatggatggaacctcctggattttattatcgttgtggtgggcctgttctcagcaattctggagcaggccacaaaggccgacggtgctaacgcactgggcggaaagggagcaggttttgatgttaaggctctccgggctttcagggtgctgcggccattgaggctggtttcaggcgtcccaagtctgcaggtagtgctgaactcaatcatcaaggcgatggttccactcctccacatcgcactcctggtgttattcgtgattataatatacgccatcattgggctggaactgtttatgggcaaaatgcacaagacatgctacaatcaagagggtatcgccgatgtgccagccgaagatgatccctctccatgtgccttggaaacaggtcacggcagacagtgccaaaatggcacagtatgtaaacccggttgggatggccctaagcatgggatcacgaattttgacaatttcgccttcgccatgcttactgttttccagtgtatcacgatggagggctggacggatgtcctgtattggatgcaagacgccatgggctacgagctcccatgggtgtattttgtctctctcgttatattcgggtccttctttgttttgaacctggtcctgggagtgctgagtggtgagtttagtaaggagagggagaaggcgaaggccaggggtgatttccagaaattgcgagagaagcaacagctggaagaggaccttaagggctatttagactggatcacacaggcggaggatatcgacccagaaaacgaggacgaaggaatggatgaggagaagcccaggaatatgagcatgcctaccagcgaaactgagagtgtaaacacagaaaacgtagcagggggagacattgaaggcgagaactgtggagcgcgtcttgcccacagaatcagtaaatccaaattttccaggtactggagaaggtggaatagattttgtaggaggaagtgtcgtgctgcagtgaagagtaacgtgttctactggctggtgatctttctggtctttctaaacactttgacgatcgcatccgagcactacaaccagcccaactggcttaccgaagttcaagataccgccaataaggcgttgctggccctatttactgctgagatgctcctgaagatgtattccctgggcctacaggcttattttgtcagtctctttaacaggttcgactgcttcgtcgtctgcgggggaattctggagaccattctggtggagactaaaattatgagtcctctggggataagtgttcttagatgcgtccgcctgttgagaatatttaaaattactcggtactggaactcattgtccaatctcgtcgcaagcctgctgaacagtgtcagatccatcgcatccctccttctgctgcttttcctattcataatcatcttctccctgcttggaatgcaactcttcggaggtaagtttaactttgatgagatgcagacccgaaggtcgacctttgacaatttcccgcagagcttgctgacagtgttccagattcttactggcgaagactggaactctgtgatgtacgatggcatcatggcatacgggggtccaagttttccaggcatgctggtttgcatctactttatcatccttttcatctgtgggaattatatactgctcaacgtgtttctagccatagcagttgacaatctggcagacgctgaatccctgacatccgctcaaaaggaggaagaggaggagaaagaacgtaaaaaactcgccaggacagcatcgccagaaaaaaaacaagaactcgttgagaagcccgctgttggtgaatctaaggaggagaaaatcgagttgaagtcgattacagccgatggcgagtcccccccagccaccaagattaatatggatgacctgcagcctaacgaaaacgaggacaagagcccgtacccaaaccccgaaacaaccggggaggaggatgaagaggagcccgagatgcccgtcgggccacggcctcgccctctttcagaattgcatctaaaggaaaaggccgtccctatgcccgaagcgagtgcgtttttcatcttctctagcaacaatagatttcgtcttcagtgccaccggattgttaacgacacgatctttaccaatctcattctgtttttcatactgcttagctccatctctctggcagcggaggatcctgtccagcatacttcctttcgtaatcatatcctgttttactttgatattgtctttactaccatcttcactatcgagatcgctctgaagatgactgcttacggggctttcctccataaaggatccttctgtcgcaattattttaatattttagaccttctggtggtcagcgtcagcctgatttcatttggcatccagagttccgcgataaacgtggtgaagatactgcgcgtgttgcgcgtacttcgcccactgagagccatcaaccgggcaaaaggcttgaaacacgtagtccagtgtgtgtttgttgctatccgaactatcggaaacatcgtgattgtcactactctgctgcaattcatgttcgcctgcataggggtgcagctgtttaaaggaaagctttatacctgctccgatagctccaagcagactgaggccgaatgcaaaggtaattatattacatataaggacggggaggtcgatcatccaattatccaacccaggtcctgggagaacagcaagtttgacttcgataatgtgctggctgccatgatggcacttttcaccgtgtccacttttgagggctggcctgaactgctttacaggtccattgatagccacacagaggacaaagggccaatatataattatagggtcgagatttcgatttttttcattatctatattatcatcattgcattttttatgatgaacatcttcgtgggcttcgtaatcgtgacgtttcaggagcagggcgagcaagagtataagaactgtgagctggataagaaccaacgccagtgcgtcgagtatgccctgaaagccaggccactgagacgctacatccccaaaaaccaacatcaatacaaggtttggtacgtcgtgaattctacatatttcgaatatctgatgtttgttctgatattactgaataccatttgcctcgctatgcaacactacgggcagagctgcttgttcaaaatcgctatgaatatcctgaacatgctcttcactggcctgtttacagtggagatgattctcaagttgattgcctttaagcccaagggctactttagcgatccctggaatgtgttcgacttcctgatcgtaataggcagtatcatcgacgtgattttaagcgagacgaacccggctgaacatactcagtgcagccccagcatgaacgcagaagagaattccaggatttcaatcacattttttcggttgtttagggtgatgaggttagttaagctcctctcccgaggagaaggcatccgcactttgctctggaccttcataaaaagttttcaggcgcttccctatgtggcgcttctcatcgtcatgctgttctttatctacgcagtcattggaatgcaggtgtttggcaaaatcgcactcaacgacactaccgagatcaacaggaacaacaactttcagactttcccacaggcagtgttattgctgtttcgttgcgctaccggggaagcctggcaggatatcatgcttgcctgcatgcccggaaagaaatgtgcgcctgaatctgaaccgtcaaactctaccgagggggaaactccatgtggctctagttttgctgtattctacttcatttcattttatatgttgtgcgcctttcttatcatcaaccttttcgtagctgtcatcatggataactttgactaccttaccagggattggagtatccttggccctcatcacttagatgagttcaagcgcatctgggcagagtatgatccagaagctaaaggcagaataaaacacctggacgtcgtgacgctccttcggcgtatccaaccacctctgggctttggaaaactttgtcctcaccgggtcgcatgcaaaaggctggtttctatgaatatgcccttaaattcagacggaaccgtaatgttcaacgcgaccctgtttgcactggtgcgtacagccctgcgaattaaaacagaaggtaacttagagcaggccaatgaggaactgcgggcaattatcaagaaaatttggaaaaggaccagtatgaaactgttggaccaagtggtgcctccagccggtgacgacgaggtaaccgtgggtaagttctatgctacgttcctgatccaggagtattttcgcaaatttaagaaaagaaaagaacagggtttggtggggaagccaagccagaggaatgccctctccctgcaagcgggactccggacccttcatgacataggcccagaaatcagaagagccatctctggagacctgacggccgaggaagagttggacaaggccatgaaagaggccgtgtccgctgcgtcggaagatgacatttttagacgcgcagggggactttttgggaaccatgtgtcatactaccagtccgatggccgtagcgctttcccacagactttcactacgcagaggccattgcatatcaacaaagctggaagctcccagggagataccgagtcacccagtcacgagaagcttgtggattctacctttacaccctcgtcatactcttcaacgggcagcaacgcgaatataaacaatgccaataacacagcacttggtcgcttgcccagacctgcaggataccctagcactgtttcaactgtggaggggcatgggcctcctctgtcccccgcaatcagggtgcaggaggtcgcatggaagctcagctctaaccgagaacgtcacgtaccgatgtgcgaggatctcgaactgcgccgtgatagcgggtctgccggtacacaggctcattgcctgctcctccgaaaagccaacccttcacggtgccacagccgggagagccaggctgccatggcgggacaggaggaaacctcacaggatgagacatacgaagttaaaatgaaccatgacactgaggcttgcagtgaaccatcattattatctactgagatgttgtcttaccaagacgacgaaaatcgacagctcaccttgccagaggaggataagcgggatatcaggcagtctcctaagagaggttttctcagaagcgcttcactcgggcgaagggcatcttttcacctggagtgtcttaagcggcagaaagataggggcggagatatctctcagaaaacggtcctgcctctccacctcgttcaccaccaagccttggcagtagcaggcctgtcacctctcttacaaaggtcacactcacctgcatcattccccaggcccttcgcgacacccccagccacccctggatcgagagggtggccacctcagccggtgcccacgctgcgccttgagggagtcgagagcagtgagaagcttaactctagctttccctccatacactgcggttcttgggccgaaactactcccggtggcggtggaagttcagccgctcggagggtgcgacctgttagcctcatggtgcctagccaggcgggagcacccggtcggcagtttcatggcagcgccagctcactggtggaggccgtgctgatcagtgaagggttgggccagttcgcacaggatcctaaatttatcgaggtaacgacccaggagttagctgatgcgtgcgacatgaccatcgaggagatggagagcgccgctgataatatcctttctggtggcgctcctcagtcccctaatggtgctcttctgccctttgttaactgtagagacgcaggtcaagacagggctggcggagaggaggacgcgggttgtgtgcgcgcaagaggtcgacctagtgaggaggaactacaggactctagagtttacgttagcagccttta

SEQ ID NO: 216618 - DNA, 6474 bp, synthetic construct
  misc_feature 1..6474: note = Description of Artificial Sequence: Synthetic coding sequence
  source 1..6474: mol_type = other DNA
atggtgaacgagaatacccggatgtacattcccgaggagaaccaccagggatctaactacggctcacctcggccagcccacgccaacatgaacgctaacgcagcggctggcctggcgccagagcacatccctacccccggagcggctctgtcatggcaagcagctattgatgctgctagacaggcgaaattgatgggctcagccggaaacgctaccatcagtactgtctcaagcacccagaggaagagacaacaatacggtaaacctaagaagcagggctcgaccacagcgacccgacccccaagagctctcttgtgcctgactctcaagaaccccattcggagggcatgtatctccatcgtggaatggaaaccattcgaaataattatcctgctcaccatatttgctaactgcgtggctctcgccatatacatcccatttccagaggacgactcaaacgcaaccaactcaaacttggagcgagtggagtatctattcctcattatttttacggtcgaggcgtttcttaaggtgattgcctatgggctgttattccaccccaatgcttatttgagaaacggatggaaccttttagactttatcattgtggttgtgggtctcttctcagccatcttggaacaggcgactaaggcagatggcgcaaatgcactgggcggtaagggagccggtttcgacgtgaaggctctgagggccttcagggtgcttcgtccactccgcctggtgtccggtgtcccatccttgcaggtggttcttaatagcatcatcaaagccatggttccactcctacacattgctctacttgttttgttcgttattatcatttacgctataatcggccttgagctctttatgggtaagatgcataagacatgttacaatcaggagggcatcgcggatgtgcccgcagaagacgacccatctccctgcgcactcgaaacgggccacgggagacagtgccagaacggcactgtctgcaaacccggatgggacgggccaaagcacggtatcaccaacttcgataactttgcttttgccatgctgacagtttttcagtgcatcacaatggaaggttggacagatgtgctctactgggtgaacgatgctgtcggtagggattggccctggatttatttcgtgacactcatcataatcgggtctttcttcgtgctgaacctggtattgggggtgttaagcggggagttcagtaaagagagggagaaagcaaaggcgcgaggcgattttcaaaaactgagagaaaaacagcagttagaagaggatctcaaggggtacctggactggatcacccaagccgaagatattgaccctgaaaatgaggacgagggcatggatgaagagaagcccagaaacatgagcatgccgacctctgagactgagagtgtgaatacagaaaacgtggctggaggtgatatcgaaggcgaaaactgcggcgcaaggttggctcaccgcatttcaaagtctaaatttagtaggtattggaggagatggaacaggttctgtagaaggaaatgtcgggcagctgtgaaatctaatgtgttttattggctggtaattttcttggtcttcttaaacaccttgaccatcgcctcggagcattataaccagcccaattggcttacggaagtccaggacaccgccaacaaggccctgctggccctctttaccgccgaaatgctgctgaaaatgtattccctgggtcttcaggcctacttcgtctcccttttcaataggttcgattgtttcgttgtttgtgggggaatcctcgagacaatcctggtggaaacaaagattatgagtccgttgggcatctcagtactgaggtgcgtgagacttctccgcatatttaagataaccaggtactggaacagtctctccaaccttgtggcttcactgctgaactctgtgaggtctattgctagtctgcttctgctgttatttttgttcatcatcatctttagcttactgggcatgcaactcttcggcggaaaattcaatttcgacgagatgcagacccgccgatctacattcgataacttcccccaatcgcttctcacagtgttccaaattttgacaggcgaagactggaatagcgtcatgtatgatggcatcatggcatatgggggaccatcgtttcctgggatgctggtgtgcatttattttataattctgtttatctgtggaaattacatccttctcaatgtgtttctcgccatagctgtggataatctggcggacgcggaatctcttacctccgcacagaaagaggaagaggaggagaaggaacgaaaaaagctcgcacgtactgcgtcacctgaaaaaaagcaggagttggttgaaaaaccagctgtaggcgaatccaaggaggagaagatcgagcttaagagcatcacagccgacggtgaatctccccctgcgactaaaatcaatatggacgatctgcagccaaatgagaacgaggataagagtccatacccaaacccagagaccacaggcgaagaggacgaggaagaaccagagatgcctgtgggaccgaggcctcgtccactatccgaactccacttgaaagaaaaagccgttccaatgccagaagcctccgcattctttatcttttcctctaacaaccgctttcgtctgcaatgccatcgtatagtgaatgacacaatcttcacaaaccttatcctgtttttcatactgctttctagtatatccctggccgcagaggaccctgtacaacacactagctttcgtaatcacattctgttttattttgatatcgtgttcacgacaattttcaccatcgaaatcgcgctcaagatgaccgcatacggggctttcctccacaagggtagcttctgtaggaattatttcaacatactggaccttctcgttgtatccgtgtccctgatctccttcggaatccagtcatccgcgattaatgtggttaagattctgcgggtgctgcgggtcctgaggcctctcagagccatcaatcgtgctaaggggctgaaacacgtcgtgcagtgtgtgtttgtggccattcgtacgattgggaacattgtgatcgttacgaccctgctgcagttcatgttcgcctgcattggtgtgcagttattcaagggtaagctgtacacttgttccgatagtagcaaacaaactgaggctgaatgcaaaggcaattacattacctataaagatggggaggtggatcacccaataattcagccccgaagctgggagaattcaaaattcgatttcgacaatgtgctggcagctatgatggcactgttcacagtgtctacatttgaggggtggcccgagttactgtacaggtcaatcgactcacatacggaggataagggccctatatacaactatagggtcgaaataagcatctttttcatcatatacattattattatcgctttctttatgatgaatatcttcgtaggcttcgtcatagtgacttttcaggagcagggagagcaagaatacaaaaattgcgagctggataaaaaccaaagacagtgcgtggaatatgccctaaaggctcgcccacttaggcgatatattccaaagaatcagcaccagtataaggtgtggtacgtggtgaattccacctatttcgaatatcttatgttcgtgctgatccttctcaatacgatttgtcttgctatgcagcactacgggcaaagctgcttgtttaaaatcgccatgaacattttaaacatgctgtttactggactcttcactgtggaaatgatactgaaattaatcgcctttaaacctaagcattatttctgtgacgcttggaatacgttcgacgctctgatcgttgttggttccatcgttgacattgccattactgaagtgaatccagcagagcacacacagtgctctccctctatgaacgcagaagagaacagccgaatcagcataacattctttcgtctgttccgcgtcatgaggctagtaaagctcctgtcacgcggagaggggatcaggaccctgctatggacattcatcaaaagtttccaggcacttccatatgtggcactccttatcgtaatgcttttcttcatctacgctgtgatcggcatgcaggtcttcggcaagatcgcgctgaatgatacaacagaaataaaccgcaacaacaatttccagacatttccccaagcagttttactgctgtttcgatgcgccaccggagaagcatggcaggacattatgctcgcttgcatgcccggaaagaaatgcgcacccgaatcggagcccagcaatagcactgaaggagagaccccatgcggctcttcctttgctgtgttttatttcataagcttttacatgttgtgcgcttttctgatcataaacctcttcgtcgctgtgataatggataattttgattatctgacgagggactggtccatcctcggccctcaccatttggatgagtttaagcggatatgggctgaatatgacccagaggcaaaaggtcggattaaacatttggacgtggtcaccctgttgagacgcattcagccacctctgggatttggcaaactgtgtccacatcgagttgcttgcaaacggcttgtgtcaatgaatatgcctctcaactccgacggcaccgtcatgttcaatgccacattattcgccttagttcgcaccgcactaaggatcaagacagaggagggtcccagtccctcagaagctcatcagggcgcagaggacccgtttcgccctgccggtaaccttgaacaggctaatgaggaacttagagcgatcattaagaaaatctggaagcgcacgtctatgaagctgctggatcaggtggtgcctcccgcaggcgatgacgaagtaacagtcgggaaattttatgccacattcctcattcaggaatactttcgaaaattcaaaaagcgcaaagaacagggactggtgggcaaaccatctcagagaaacgccctcagccttcaggctggactgcgcacactgcacgatatagggcctgaaatccggagggccatatcaggcgatttgaccgctgaggaggagctcgataaagctatgaaagaggcagtgtccgccgcttcagaggatgatattttcaggcgggcaggcggactcttcggaaaccacgtgtcctactatcaatcagatggacgttccgcgttcccccaaacgtttacaacccagcgcccactccacattaacaaagcaggaagcagccagggggacaccgagtccccctctcatgagaaactggtagacagcacattcactccctcctcttatagtagtactggtagcaatgctaatattaataatgcgaataacaccgcactcggaagactgcctcgcccagccggatacccctccaccgttagcaccgtcgagggtcatggcccaccacttagcccagcgattcgtgtccaggaagtcgcctggaaacttagctctaatagatgtcacagcagggaatcacaagccgctatggctggacaggaagaaacatctcaggacgaaacgtacgaagtcaagatgaaccatgatacagaggcctgtagcgaaccaagcttgcttagcacagagatgttatcctaccaggatgatgaaaatcggcagctcacactgcctgaagaagacaaaagagacatacgccaatcgccgaagcgaggctttctacggtccgcgagtttgggcagaagggccagtttccacctggagtgtctcaagagacagaaggatagaggtggcgatatttctcagaaaacggttctaccactgcatctggtgcaccatcaagctttggcagtcgccggtcttagccctctgctgcagcggagccactctccggcttcctttccaaggcccttcgccactccccctgctactccgggatcccggggttggccgccacagccagtgccaaccctccggttagaaggcgtcgagtcatccgagaagctcaacagcagcttcccgtcaatccattgcggctcctgggctgagactacgcccggtggcggtggctccagtgcagcacgccgtgttagacctgtgtcccttatggtgccctcccaggcgggagccccagggagacagtttcatggaagtgcaagttccttggtggaggctgttcttatctcggaggggctcgggcaatttgcgcaggatcctaagtttattgaagtgacaacacaggagctcgcagatgcatgcgatatgaccatagaagagatggaatccgctgcagacaacattctgagcggcggtgctcctcagagccctaatggagccttgctgcctttcgtgaattgcagggacgccggtcaggatcgggctggtggagaggaggatgccggatgcgtccgggcacgaggaagaccttctgaggaagaactgcaagattcaagagtatacgtttcatctctctac

SEQ ID NO: 216619 - DNA, 6468 bp, synthetic construct
  misc_feature 1..6468: note = Description of Artificial Sequence: Synthetic coding sequence
  source 1..6468: mol_type = other DNA
atggtgaacgaaaacacacggatgtacatacccgaggagaaccaccagggctctaattatgggtcaccaaggcctgcccacgctaatatgaatgccaacgccgcagcagggctcgcccctgagcatatcccaacacccggagcggcactcagctggcaggccgcaatagatgcagcacggcaggctaagttgatggggtccgcaggcaacgcgacaatctctaccgtcagctcaactcaacgaaaacggcagcagtatggaaagcctaaaaaacaagggagtacaacggctacacgaccccctagggcactgctctgcctgactcttaagaaccctatccgcagggcttgcattagcatcgtcgaatggaagccatttgagataataattctgctcacaattttcgccaattgtgtcgccctggccatctacattccctttcccgaggacgacagcaacgccacgaattccaatctggagcgggtggagtatctgttcctcataatttttacagtcgaggcctttttgaaggtcatcgcctatggactgctcttccatccgaatgcgtacctccgaaacggctggaatctgctcgacttcatcatagtggtggttggcttattttcggcgatcttggaacaggccaccaaggctgacggagcgaatgcactaggcggaaagggagcgggttttgatgtgaaggctctgcgcgctttcagagtgcttcggcctctgaggctcgtttccggtgtaccttccctacaggtggtgctgaatagtataatcaaggcaatggtccctcttctgcacattgccctgctcgtgctgttcgttatcatcatctacgcaattattggactggagctgttcatggggaaaatgcacaagacatgctacaatcaagagggaattgccgatgtgcctgctgaagatgaccccagcccatgcgcactcgaaactgggcacggtcgacaatgtcaaaacggcacagtctgcaaaccgggatgggacggaccaaagcatggaataaccaatttcgataattttgcatttgccatgcttactgtgtttcaatgtattactatggagggatggacagacgtgctgtactgggtgaacgacgccgtgggcagggactggccttggatctactttgtgactttgatcattataggcagtttctttgttctgaatcttgtgttaggcgtgctcagcggtgaattcagcaaggagagggagaaagccaaggccaggggagacttccaaaagctgcgggagaaacagcagttagaagaggacctaaaggggtatctggactggataacccaggcagaggatattgaccctgaaaatgaagacgagggaatggacgaggaaaagcctcggaatatgtccatgccaacctccgagacggagtccgtgaatacggagaatgtcgcgggtggagacatcgagggtgaaaactgtggtgccagattagctcaccggatttcaaaaagcaagttctccaggtactggcgcaggtggaatagattctgtcgtcggaaatgccgcgcagccgttaaaagtaacgtgttttattggctggttattttcctggttttcttaaatactttgacaattgcaagtgagcactataaccagccaaactggcttacggaagtccaggacaccgccaataaagcgctccttgcccttttcactgctgagatgctgctcaaaatgtattccctggggctgcaggcatacttcgtttccctctttaacaggttcgattgcttcgtcgtttgcggcggaattttggagaccatcttggtcgagacaaaaatcatgagtcctctgggaatctcagtgctccgctgtgtgcgtttgctcagaattttcaagattacccgctactggaactcgctgtccaacctcgtggctagcttactgaactctgttcggtctatcgcatcacttttgctcctgctctttctttttataatcattttctctctgctggggatgcaactgtttggaggcaaattcaatttcgacgaaatgcagactagaagaagtactttcgataatttcccccagtctttgctgaccgtcttccagatccttactggcgaggactggaacagcgtgatgtatgacggaatcatggcctatgggggtccatcctttccgggtatgctggtatgcatttactttattattttatttatttgcgggaattatatactccttaacgtgtttcttgctatcgctgttgacaacctcgcggatgccgaaagcctgacatctgcacagaaggaggaggaggaggagaaagaaagaaaaaaactggccagaacagcatcaccagagaaaaagcaagaactggttgagaagccggctgtcggcgagtccaaggaagaaaagatagaactcaaatctataaccgcggacggtgagtccccgccagcaactaaaatcaacatggacgacttgcagcctaacgaaaatgaggataagtccccgtacccgaatccagagaccactggcgaagaggacgaggaggagcctgagatgcccgtgggaccgagaccaagacccctttcggaactccacctgaaagagaaggcagtcccaatgcccgaggcttctgcattcttcatctttagctctaacaatcggtttaggctccagtgtcataggatcgtaaatgacacaatattcactaaccttatcctgtttttcattcttctgtcttccataagcctcgcagcagaggatcccgtgcagcatactagtttccggaaccacatattagggaacgccgactatgtgtttacctctattttcacactcgaaataatactgaagatgacagcctacggcgcttttcttcataagggatccttttgcaggaattacttcaacatactggacctcttagtcgtgtcagtgagcctcatttcattcggtatccagtcatctgctataaatgtggtgaaaattctgagggtgcttagggtgttgcggcctttgagagccatcaaccgcgctaagggtctcaaacacgtagtccagtgcgtcttcgttgccatccgcacaattgggaacatcgtcatcgtcaccactctattacagttcatgttcgcctgtatcggtgtgcagctttttaaagggaaactgtatacttgtagcgacagctccaagcagacagaggcagaatgcaagggcaattatattacctataaggatggcgaggtagaccatccaatcatacagcccagatcctgggaaaactctaagttcgatttcgacaatgtcctcgctgccatgatggcccttttcactgtctctacatttgaaggatggccagaactcctctacagatctatcgatagccataccgaggacaaaggtcctatctacaactaccgagttgagatctctatcttttttattatctacatcatcatcatcgctttttttatgatgaatatctttgtcggtttcgtgatcgtgacctttcaggaacaaggtgaacaggaatataagaactgcgagcttgacaagaatcagcggcaatgcgtggaatatgctttaaaggccagacccttaagacggtacatccctaagaatcagcaccagtacaaggtttggtacgtggtgaactcaacctatttcgagtatcttatgttcgtcctgattcttctgaacaccatttgtctcgccatgcagcactatggacagtcctgtctgttcaaaattgcgatgaacatacttaacatgcttttcactggcctgttcacagttgaaatgatcctgaaactcattgcctttaagcccaagggttacttctcagacccttggaacgtgtttgactttctaatcgtcattggaagtatcatagacgtgatcctgagcgaaaccaatcactacttctgtgatgcatggaatactttcgacgcgcttattgtcgtggggtccatagtggatattgctattacggaagtgaacaacgctgaagagaactctcggatatccatcaccttttttcggctgttcagggtaatgcggctggtcaaattactgtcaagaggggagggcattcgaacactgctgtggactttcattaaatccttccaggcactgccttacgtggcactgttgattgttatgctattttttatttacgcagtgatcgggatgcaggtttttggcaagatcgccttaaacgacacaaccgagataaaccgaaataacaacttccaaacctttccacaggctgtcctgttattgtttcggtgcgctactggcgaggcgtggcaggatatcatgcttgcgtgtatgccgggaaagaagtgtgcccctgaatcagagccttctaactctactgagggagagactccatgcggatcgtccttcgcggtcttctatttcatttcattttacatgctgtgtgcttttctgatcattaatttgttcgtggctgtgatcatggataatttcgattatctcactagggattggtccattctgggccctcaccatctggacgagttcaagcgcatctgggcggaatatgatcctgaggccaaaggacggatcaagcacctggatgtcgtgactctgctgcgcagaattcagccacccctaggcttcggcaaactgtgcccacacagagttgcttgtaagagactcgtgtcaatgaatatgccacttaatagcgacggaaccgtgatgttcaacgccaccttattcgctctggtgagaaccgctctgcggataaaaaccgaaggaaacctcgagcaagctaacgaggaattaagggcgatcattaaaaagatctggaagagaaccagtatgaagttgcttgaccaggtggtacctcccgctggtgacgacgaggttaccgtgggtaaattctatgccacgtttcttatccaggaatactttcggaagtttaagaagagaaaagaacagggcttggtgggtaagccatcccagcgcaatgccctttctctgcaggctgggctgcgcacgctacacgacatcgggcctgagataaggcgagcgatctccggagacctgactgccgaggaggagctcgacaaggcaatgaaggaagcagtatccgccgctagtgaagacgacatcttccgcagggctggcggactgtttggtaatcacgttagctattaccagagcgatggcagaagcgctttcccacagacattcacaactcagcggccattacatataaacaaggccggtagcagtcagggggacactgagtccccgtctcacgaaaagctggtcgatagcactttcaccccctccagttactcctcaacagggtcaaatgccaacatcaacaatgcgaataatacggcccttggtagacttcctcgccctgcaggctacccgtctaccgtcagcacagtagagggtcacggtccgcctctctcccctgctattcgggtgcaggaggttgcatggaaattgtcaagcaacaggtgccactccagagagtctcaggccgctatggccggacaggaagagacttctcaggatgaaacgtatgaagtgaaaatgaatcacgacaccgaagcctgctccgagccgtcactgttatcaacagaaatgttaagctaccaggatgacgaaaaccgccagctaactttgcccgaggaagataagagagacatccgacaatccccgaaaaggggctttctgagatctgctagcctaggcaggcgggcttcatttcatctggaatgcctgaagcgtcagaaggatcggggaggagacatttctcaaaaaacggtgctccccctccatctggtgcatcatcaggccttggccgttgccggacttagcccccttctacagcggagccattcacccgcaagcttccctaggcctttcgcaactccccctgctactcctggcagtcgtgggtggcctcctcagccggtgccaacgctccgactggaaggtgtggagagcagcgagaaactgaacagctcatttcccagcattcattgcggatcctgggctgaaaccactccaggtggtggtggcagctcggccgctcgcagggttcggccagtcagtctcatggtgccttcccaggccggagcgcctgggcgacagtttcacggttccgcgagttcacttgtcgaggcagtgttaatttccgaaggattgggtcagttcgctcaagatccgaaattcattgaagtcaccacccaagaactggccgacgcctgtgatatgaccatcgaggaaatggagtccgccgctgataatatccttagcggtggcgcacctcagtcccctaatggcgcacttcttccctttgttaactgcagggacgctggccaagatagggcgggaggggaagaggatgcaggctgcgtccgcgctagaggcaggccatctgaggaggagcttcaggattcacgggtctatgttagctctctctag

SEQ ID NO: 216620 - DNA, 6629 bp, synthetic construct
  misc_feature 1..6629: note = Description of Artificial Sequence: Synthetic coding sequence
  source 1..6629: mol_type = other DNA
atggtgaatgaaaatacaagaatgtatatccccgaagagaaccatcaggggtccaactatggatcaccgagaccagcccacgccaatatgaatgctaatgccgcagccggtctagcacctgaacacattcccaccccaggcgcagcattatcttggcaagcggcaattgacgcagccaggcaggcgaagttgatggggagtgcaggcaacgcgaccatctctactgtatctagcacccagaggaagcgccagcagtatggcaaacctaagaaacaaggtagcactaccgccactcgccctccccgagctttactttgtctgacgctaaagaacccgatccgcagggcttgcatctcaattgtggaatggaagccgtttgagattattatcctccttaccattttcgctaactgtgtggcactcgccatctacatccctttcccggaagacgattccaatgctacgaactccaacttagagagggtggagtatctgttcttgatcatcttcacagtcgaagcttttctgaaggtgattgcgtacggcctgcttttccaccccaacgcttacctgcgcaacggatggaatctgctggactttatcatcgttgtcgtcgggttgtttagtgcaattctggagcaggctaccaaagcagatggggctaacgcactggggggaaaaggcgctggcttcgatgtcaaagctctgagagcgttccgtgtgctaagaccactcaggttggtcagcggagtgccgagcctccaggtagtgctgaatagtattataaaggccatggtcccattactgcacatagcattattggttttgtttgtgatcattatctacgccattattggcctggagctgttcatgggcaagatgcacaagacttgttataatcaggaggggatcgccgatgtcccagccgaggatgatccttcaccttgtgccctggagaccggacacggtagacaatgccagaatggaaccgtctgtaaaccaggctgggacggaccaaagcacggtatcaccaactttgacaatttcgcctttgcaatgctgactgtgttccagtgtatcactatggaaggatggaccgatgttctttactggatgcaggacgctatggggtacgagttaccttgggtctactttgtaagcctggtaatctttggttctttcttcgtactgaatttagtgctcggcgtgctgagcggagaatttagcaaagagcgcgagaaggcgaaggccagaggcgactttcagaagctacgcgagaaacaacaattggaggaagaccttaagggatacttggactggatcacacaggccgaagacattgacccggagaacgaggatgaggggatggatgaggaaaaacctcgaaatatgtctatgccgacatccgaaacagaatctgtgaataccgaaaacgtcgctggcggagatatcgagggggaaaattgcggtgctaggttagcacacagaatctcaaagagcaagttttccagatactggagacgatggaatcggttctgtcggagaaagtgtcgagctgccgttaaatccaacgtgttttactggctggtgatctttctggtatttctcaacaccctcactattgcctccgaacactacaatcaacctaactggctgaccgaagtgcaggatacagcaaacaaggccttactggcactatttacagctgagatgctgctgaagatgtattcgctcgggctgcaggcatattttgtgtctctcttcaatcgcttcgactgcttcgtcgtgtgcggagggattttagagacaatcctggtggagaccaagataatgagtcctctgggtatcagcgtcttgagatgtgttcgcttgctgcgtatattcaagatcactcggtactggaattctctttctaacctggtagcgtcattgctgaacagcgtgcgcagcatcgcaagtctcctcctcctgctgttcctgtttattatcatcttttctctcctcggaatgcaattgtttggtggaaaattcaacttcgacgaaatgcagacgagacgctctactttcgataatttcccccagtcacttctgactgtttttcagatcctgaccggtgaggactggaactctgtgatgtacgatggcattatggcgtacggcggaccttctttcccgggtatgctggtgtgcatctacttcatcatcctgtttatctgcggaaattatatcttgttaaacgtttttctcgcgattgctgtcgacaatctcgcggacgctgagtctttaacttcggcccagaaagaagaggaagaagaaaaggagcggaaaaagttagcccgaactgccagccccgaaaaaaaacaggagttagtcgagaaacccgctgtaggagagagcaaggaggagaagatcgaactcaaatcgatcacggccgatggagaaagtccccctgctacaaagattaacatggacgatctgcagcccaatgaaaatgaggataagagtccctatcctaatcctgaaaccactggcgaagaagacgaggaggaaccagaaatgccagtgggccctcgcccaaggcctttgagcgaactgcacctcaaggaaaaagctgtccccatgccagaagcatctgcgttttttatttttagctcgaataacaggtttcgtctccagtgtcaccgcatagtgaacgatacaatttttacaaacctcatcctttttttcatactcctgtccagcattagtctcgccgcagaggacccggtgcagcatacatcttttcggaatcacatcctcttttacttcgacattgtattcactaccattttcaccatcgaaattgcactcaagatgactgcctacggggctttcttacacaagggatccttctgtcggaattacttcaacatcttggacttactggtagttagtgtgagtctgatatcctttgggatccagtcttccgccattaatgtcgttaagatcttgcgtgtgctgcgcgtcttgagacccctgcgggctatcaatcgggctaagggcctgaaacacgtggtgcaatgcgtcttcgtcgctatcaggacgatcggcaacattgtcattgtgactacattgctgcagttcatgttcgcatgtatcggcgtgcagctgtttaagggaaaactctatacatgctcagactccagcaagcagacagaggccgaatgcaaaggcaactatatcacctataaggatggagaagtggaccacccgatcatccagccacgatcctgggagaacagcaaattcgacttcgacaatgtgttagcagcaatgatggccttgttcacagtgtccacgtttgaggggtggccagagcttctgtaccgatcaattgactcacacacagaggacaaaggccctatttacaactaccgcgtggagatttccattttcttcatcatctatatcatcatcatcgcattctttatgatgaacatattcgtaggtttcgtaatcgttacgtttcaggaacagggtgagcaagagtacaagaattgtgaactcgataagaatcaacgccaatgtgtcgagtatgctctgaaagcccgaccgctgaggcgctacatacctaagaaccagcatcagtacaaggtgtggtatgtagtcaactctacctactttgaatatctgatgttcgtgctgatcctgttgaataccatatgtctggcaatgcaacactatggccaaagttgcttattcaagatcgcaatgaatatcttgaacatgctgttcacgggcctgtttactgtggaaatgattctgaaacttatcgcatttaaaccaaaacactatttctgtgatgcctggaataccttcgacgccctcattgtggtaggctcaatagttgatatagctatcactgaggtgaatccggcagaacatacacagtgttccccgtccatgaatgccgaggaaaactctcggatctctataacattttttcgccttttcagggttatgcgtttggtgaaattgcttagtcgtggagaagggatcaggactctgctgtggacgttcatcaagtccttccaggctctgccctatgtggcactgctgatcgtgatgctcttctttatctacgcagttatcggcatgcaagtctttggtaagattgctctcaacgacaccaccgagatcaataggaacaataattttcagacctttccgcaggcagtgttgctcctattcagatgtgctaccggagaagcatggcaagatattatgctggcctgtatgcccggtaagaagtgcgcacctgaatcggaaccaagcaactccactgagggggaaactccctgcggcagtagcttcgcagttttttatttcatcagcttctacatgctttgtgccttcctgatcataaacctcttcgttgccgtcatcatggacaacttcgactatttgacacgggattggtccattctgggccctcatcacttggacgagtttaagcgaatctgggcggagtatgatcccgaggccaagggacgcattaagcacctcgacgtggttactctattgagacggattcagccgccactcgggtttggaaagctctgccctcatcgtgtggcatgcaaacggctggtaagcatgaacatgccactcaattctgacgggaccgttatgttcaatgccaccctcttcgctcttgtgagaacagccctacggattaaaacagaggggaacctggagcaggccaatgaggaactgagggctataatcaaaaagatttggaaacgaacctccatgaagttgcttgatcaagttgtcccacctgccggagacgacgaggttaccgtcggcaaattttacgccacttttctcatccaagagtactttcgtaagttcaaaaaaaggaaggagcagggcctcgtgggcaagcccagccagcggaatgcccttagtctgcaggccggactgcggaccttgcacgatatcgggcctgagattcggagggccatctctggggacctgacagccgaagaagagctggataaggccatgaaggaagccgtgagcgctgcctcggaggatgatatatttagacgcgcaggaggactcttcggtaaccatgtgtcctattatcaatccgacggaagatctgcgttccctcagacgttcaccactcagcggcctttacacattaataaagctgggtcatcacagggggatacagaatctccctctcatgaaaagttggtcgacagtacatttacccctagttcatactccagcactggctcaaatgccaatatcaacaatgccaacaataccgctctaggcagactgcccaggcctgctggctatccttctactgtgtcgaccgtggagggccacgggcctccactgtctccagcaattcgggtgcaggaggtcgcgtggaagctgagctcaaaccgcatgcattgctgcgacatgttggatgggggaacctttccacctgccttagggcctcgcagggctcctccctgtctgcatcagcagctacagggaagtctggccggattgagggaggacaccccctgcatagtaccaggacatgccagtctgtgttgctctagtcgagtgggggagtggctgccggcaggttgcactgcaccacagcatgcgagatgccatagccgggagagccaagctgctatggcaggtcaggaagaaacaagtcaagacgaaacgtacgaggtgaaaatgaatcacgatacagaggcatgttccgagcctagcctgttatctacagaaatgctcagctatcaagatgatgaaaacaggcagctgactctgccggaggaggataaacgggacattaggcagagcccaaagagaggattcctgcgtagcgcttcccttggacggagagccagtttccacctggaatgtctcaagaggcaaaaggatcgtggtggagatattagccaaaagacggtccttccactgcaccttgtgcatcaccaggctttggccgtcgcgggattaagtccactacttcagcgaagtcattcccccgcatccttccctcgccctttcgctactccgccagcaacaccgggaagccggggatggccaccccaacccgtgcccacccttagactggagggagttgagagctctgaaaagctgaactcctcttttccaagcatccactgtgggagttgggcagaaaccacccccggaggagggggatctagcgctgccagacgcgttagaccagttagtctcatggtcccaagccaagcgggagcccctggacggcagtttcacggatctgcaagcagcctcgttgaggctgtgctcatctctgaaggactcgggcagttcgcccaagatcctaaattcattgaggttaccacccaggagctggcggatgcttgtgatatgaccatcgaggagatggaaagcgcagcggataatatcctttcaggtggagcgcctcagtcacccaatggcgctcttctgcctttcgtcaattgtagagacgcaggacaggacagggctggcggtgaagaggacgctggctgcgtgcgcgcacggggacgcccttccgaggaagagttacaagacagtagagtttatgtaagctcacttta

SEQ ID NO: 216621 - DNA, 6474 bp, synthetic construct
  misc_feature 1..6474: note = Description of Artificial Sequence: Synthetic coding sequence
  source 1..6474: mol_type = other DNA
atggtcaacgagaacaccagaatgtacatccccgaggaaaatcatcaggggtccaattatgggtccccacgtccagcgcatgctaacatgaatgctaatgccgcagcaggcttggctccagaacacattcccaccccaggcgcagcactctcttggcaggcagccatcgatgcagcacgtcaggctaaactaatgggttccgctggaaatgctaccatatctacagtaagctccacccagcggaaacgccagcagtacgggaagcccaaaaagcagggttctaccacagccactagaccccctcgagcgctgctgtgtctgactctgaagaatccgatcagacgggcttgtatctcaatcgtggaatggaaacctttcgagatcatcattcttctcacaatttttgctaattgtgtcgccctcgcgatctacatcccctttcctgaggatgacagcaacgcaacgaattcaaacttagaacgagtggaatatcttttcttgatcatcttcacagttgaggctttcctaaaggtgattgcatacgggctgctgttccaccccaacgcatacctccgaaacggctggaatctactcgacttcattatcgtcgtcgtcggcttgttctctgctattctagagcaggctaccaaggccgatggggctaatgccctgggcggaaaaggagcaggcttcgacgtgaaggcactgagagcgttcagagtcctgaggccacttcggcttgtctcaggagtgccctctctccaggtggtgttgaactccattattaaagccatggtgcccttacttcacatcgccctgttagtgctgtttgtaattattatttacgccataatcgggcttgagctgtttatggggaaaatgcataagacctgctacaaccaggaaggaattgctgacgtgcccgctgaagacgatccgtccccctgcgcattagagaccggtcacggcagacagtgtcagaacggtacggtgtgtaagccaggttgggacgggccaaaacacggcattaccaactttgacaactttgctttcgcaatgttgacagtgttccagtgcataacgatggagggatggaccgacgtgctgtattgggtcaatgatgccgtcggcagagattggccatggatttatttcgttactttgataataattggtagcttctttgtcttaaacctggtcttgggagtattgagtggggaatttagcaaagaaagggaaaaagcaaaggcgagaggggattttcaaaagttgagagaaaagcagcagctggaggaagacctgaagggctatttggattggattacccaggccgaggacatcgatcccgagaacgaggatgagggcatggacgaagagaaacctcgaaacatgtccatgccgacaagcgagaccgaaagtgtcaacactgaaaacgtggcaggcggagatatcgaaggcgagaattgtggcgctagactggcacatcgcatctctaagagtaagttctcccggtattggcgacgctggaatagattttgtaggcgtaaatgccgggctgccgttaagagcaacgtcttctactggctggtgatttttcttgtgttcctcaacacacttacgatcgcttcagagcactacaatcagcccaactggttaaccgaggtacaggacactgctaacaaagctttgctcgcgctattcacagccgaaatgctattaaagatgtacagcctgggcctccaagcctacttcgtgagtctgtttaatcggttcgactgttttgtggtttgcgggggtatattggaaaccatactggtggaaacaaagataatgtcccccctgggaatttctgttttacgctgtgtgcgcctgctcaggattttcaagattaccagatattggaattcactaagcaacctggttgcatccctcctgaactcagtccgaagtattgcaagcctactactccttctgttcctgtttatcatcatctttagtctgctaggcatgcaactgtttggcggaaaattcaattttgacgaaatgcagactcgacggagcacattcgacaactttccccagagtttattgaccgtgtttcagatcctaactggagaagactggaattctgtgatgtacgatgggataatggcatacgggggaccgagctttcctggaatgttggtgtgtatatactttatcatcctgttcatctgcggcaactacatcctcctgaacgtttttcttgcaatcgccgtagacaatcttgccgatgcggaaagccttacctccgctcagaaggaagaggaagaagagaaagaaaggaagaagctggccaggactgccagccccgagaagaaacaagaattagtggaaaagcccgcagtgggtgaatcaaaggaagaaaagattgaattgaagtctataacagccgatggagagagtccccctgccacaaagataaatatggatgacctccagccaaatgagaacgaggacaaaagcccataccccaaccccgagaccactggcgaggaagacgaggaggagcccgagatgcccgtggggccacgcccacgccctctgtctgagctccacctcaaggagaaggccgttcctatgcccgaagcttcagccttttttatattttcaagcaataataggttcagactccaatgccacagaattgtgaatgacacaattttcacaaatctgatcttgttctttatcctgttatctagtatttcattggccgctgaagacccagtacaacatacatctttccgcaatcatatcctgggcaatgctgactacgtgttcacttcgatatttacgctggaaataatcctcaaaatgacagcttatggcgcttttctccacaagggatccttctgcaggaattactttaacatacttgacctccttgtagtctctgtgtccctgatctcattcggcattcagagtagcgccattaacgttgtgaagatattgcgcgtgctgagagtgctgcggcctctcagggcaatcaacagggcaaagggccttaaacacgtggtccagtgcgtgtttgtcgctatccgaactattggaaacatcgtgattgttaccacccttttgcagttcatgttcgcgtgtatcggcgtccagctgttcaagggcaaattgtatacatgtagcgacagcagtaagcagaccgaggcagaatgcaaggggaactacatcacatacaaggacggcgaggttgatcatccgatcattcaaccacggtcctgggagaattcaaaattcgacttcgataacgtgctggctgcaatgatggcactgtttacagtttccacatttgaagggtggcccgaactgctctacaggagtattgactctcatacggaagacaaaggaccgatatataattatcgagtcgaaattagcatatttttcattatatacatcatcattatcgcattcttcatgatgaacattttcgtggggttcgttatagtgacattccaagagcaaggcgagcaagagtacaaaaactgcgagctggacaaaaaccagaggcagtgcgtggagtacgcattaaaggccagacctttgaggcggtatatacctaagaaccagcaccagtacaaggtgtggtatgttgtgaacagcacttatttcgagtatctcatgtttgtcctgatacttctgaacactatttgtctcgcgatgcagcactacggccaaagctgtttgtttaagatcgcaatgaatatcttgaacatgctcttcaccggcctgtttaccgtggaaatgatcctgaaactgatcgccttcaaaccaaaacactatttttgcgatgcctggaataccttcgacgcgttaattgtggtgggttccatagtggacatcgccattaccgaagtgaaccctgcagagcatacccagtgctctcccagcatgaatgcagaggaaaactcaagaatcagcattacctttttcagactgtttagagtgatgcggctggtgaagctactcagccggggagaaggcattagaaccctactctggactttcattaaatctttccaagccttaccatacgtcgccctcctcattgtgatgctattttttatatatgccgttattggcatgcaagtgttcggtaagatagccctgaatgatactactgagatcaatcggaataacaactttcagactttcccgcaggccgtcctgctgctcttccgatgtgccaccggggaggcatggcaggacataatgcttgcctgcatgcccggtaagaagtgcgcaccggaatctgagccgagcaattctacagaaggtgagaccccttgcggctcaagctttgctgttttttacttcatcagcttctatatgttgtgcgcattcctcatcataaacctgttcgtggccgtcataatggataatttcgactatctcacacgtgactggtccatcttgggtccacatcatttagacgagttcaagagaatttgggcggagtatgatcccgaagccaaaggcagaattaaacacctggacgttgtgacactgctgagacgaattcagcctcccctgggcttcgggaagctctgcccccatagagttgcttgcaaaagattagtgtccatgaatatgcccctgaacagcgacggaaccgtgatgtttaatgccaccctgttcgccctggtccggaccgcattaaggatcaagacagaggaagggccatcccctagtgaagcacaccagggcgctgaggacccgttccgccctgccggaaatctggagcaggctaatgaggaactccgagccatcattaagaagatttggaaacgcacgtccatgaagctgctggatcaggtagtgccccctgccggagacgacgaagtcacggtggggaagttctacgccacgttcttgatccaagaatacttcagaaagtttaagaaacgaaaggagcagggtctggtcggcaagcccagtcagcgaaatgccctttcactgcaagctggtttgcgcaccctccacgatataggacccgaaatcaggagggccatctccggcgatctcacggctgaagaggagctggacaaggctatgaaggaggccgtgtccgccgcatctgaggacgatatatttcgcagagctggcggactgtttggaaatcatgtctcatactatcaatctgacggacgcagcgcattcccccagacgttcactacgcagcggccactacacattaataaagcgggatcgtcacagggagatacagaatcgccttcgcatgagaagctcgttgattcgaccttcactcccagctcctatagcagtacagggtccaacgcaaacattaataacgccaacaataccgcacttggcaggctgccgcgaccggctggctacccctccaccgtctctactgtcgaggggcatggcccaccactgagccctgcaattcgcgtacaagaagtagcctggaagctcagcagtaatcggtgccactccagggaatcacaggccgctatggcagggcaggaggaaacctcccaggatgagacttatgaggttaagatgaaccacgacaccgaagcttgttccgagccatcgctcttgagcaccgaaatgctgtcctatcaggacgacgaaaacagacagcttaccctgccagaggaagataagcgcgacatccgacagtcgcctaaacgaggctttctgcgctccgctagcctggggcgacgagcttcattccacctggagtgcctcaaaagacagaaggatcgagggggagatatctcccagaaaacagttctgcccctgcacctggtgcaccatcaggcattagccgtcgcaggtttaagccccctgttacagagatctcactcacctgccagcttcccgcgaccatttgctaccccaccggctacccctgggtctcgcggatggccccctcaaccggttccaactcttaggttggaaggggtcgaaagctccgaaaaactgaattcatcattcccctctattcactgcgggagttgggccgagacaaccccagggggtggtggatccagcgctgccagacgcgtgcgacctgtgtcactcatggttccctcgcaagctggcgcaccgggacggcagtttcacggatcagcaagctcacttgttgaggccgtactgatctcagaggggcttggtcagtttgcccaagatccaaagttcatcgaagtgaccacccaagaactggctgatgcatgcgatatgaccatagaggaaatggagtccgccgcagacaatattctttcaggcggagcaccccagtcccccaacggcgctctgctgcccttcgttaattgccgggatgctggacaggatcgcgctgggggagaggaagatgcaggttgtgtgcgtgccagaggcaggcccagtgaagaagagctgcaggatagccgagtctacgtcagctcactttat

SEQ ID NO: 216622 - DNA, 6500 bp, synthetic construct
  misc_feature 1..6500: note = Description of Artificial Sequence: Synthetic coding sequence
  source 1..6500: mol_type = other DNA
atggttaacgaaaacacaaggatgtacatcccggaagaaaatcatcagggctcaaactacggctcccccaggccagctcacgcaaacatgaacgccaacgccgctgccggactggcccctgaacacatccccacccccggtgccgcactcagttggcaggcggcaatcgatgctgctcgccaggccaaactgatggggtcagccggaaatgccacaatctcaactgtaagctccacgcagcggaagcgccagcagtacggaaaacctaaaaaacaaggaagcactaccgcaacccggccacctcgcgctctgttgtgtttgactctcaagaatcccattcggcgagcatgcatcagcatcgtagagtggaagcctttcgagattatcatcttgctgacaatcttcgctaattgtgtggctttggctatctatattccctttcctgaggatgactcaaatgcaacaaactctaatctggaacgcgtcgagtacctctttttaatcatcttcactgtcgaggccttccttaaagttatcgcttacggactcctgtttcacccgaatgcatatttgagaaacggatggaatctgctggacttcataatagtggtcgtgggtttgtttagcgcaatactcgagcaggccacaaaagcagacggcgctaacgccttgggcggaaagggagctggcttcgacgtgaaggcccttagggcctttcgtgtcctccgacccttgcgcctggtgtccggggtacctagcctgcaggtggtcctcaattcgatcatcaaagctatggtaccacttctgcatatcgcccttctggtgttgttcgtgattattatctacgccataattggcctcgagctctttatgggcaagatgcacaagacctgttacaatcaggagggaatcgcagatgtgccagcagaggatgacccctctccctgtgctctagagacgggccacggcaggcagtgtcaaaatgggaccgtgtgtaagcccggttgggacggacctaaacacggaattacgaacttcgataattttgcctttgctatgttaacagtgttccagtgcatcactatggagggatggactgacgtgctttactgggtgaacgatgcggtcggaagggactggccctggatctacttcgtgaccttgatcattatcgggtccttttttgtcctcaacttggtgctgggggtgctttccggcgagttctctaaggaaagagagaaagccaaggccagaggagactttcagaagcttagggagaagcagcaactggaggaggacctcaagggttacttagactggataacgcaggccgaggatatcgatcccgaaaacgaggacgaggggatggatgaggaaaaacctcggaatatgagtatgcctacaagcgaaaccgaaagtgtcaataccgagaacgtcgcagggggagatatcgagggggagaactgcggcgctcggctggcccacaggatctctaagagcaaattttcaaggtactggagacggtggaataggttttgccgacgtaaatgccgcgcagcggtgaagtcaaatgtgttttactggttggtgatcttcctggtctttttgaacaccctcacaatcgccagcgagcactacaaccagcctaattggctgacggaagttcaggatacagcgaacaaggcattgcttgctctgttcaccgccgaaatgctcctgaagatgtatagcttaggtctgcaggcttatttcgtgagcctgttcaatcgtttcgactgcttcgtggtgtgcggcggtattttagagaccatcttggttgaaaccaagatcatgtctcctctcggcatctcagtgctgagatgtgtgcgacttcttaggatttttaagattacgcgttattggaattccctctcaaacctggttgcttcactgctcaactctgtgagaagcatcgctagcttgttgttactgctcttcctgtttatcattatcttctccttgctgggaatgcagctcttcggcggtaagttcaattttgacgagatgcagaccagacggagcaccttcgacaacttcccacaaagcctcctgaccgtttttcagatcctgaccggcgaagactggaattccgtgatgtatgacggcattatggcctacggcggaccgagcttccccggaatgcttgtgtgcatctattttattatattattcatctgcgggaactatatccttctgaacgttttcctagctatcgcagtggacaacctggccgacgcagagtcgctgacttcagcccagaaggaagaggaagaggagaaggagcgaaaaaagctagctcggaccgcttcccctgagaagaagcaggaactcgtggaaaagccggctgtgggggaatcaaaggaggaaaagattgaactcaagtcaatcactgccgacggtgaatcccctccagcaacaaaaataaatatggatgacctccaaccaaacgaaaacgaagataaatcaccataccccaatccagaaactaccggtgaagaggacgaagaggaacccgagatgccggtggggccaaggccaaggccgttgtccgagctacacctgaaagaaaaggccgtccccatgcctgaggcgtcagctttctttattttctcaagcaacaatagattcagactgcagtgccatcggattgttaatgacacgattttcactaatctgattctgtttttcatactcttgagcagtataagtcttgcggcagaagatccagtacagcacacctcattcagaaatcatatcctcttttacttcgacatagttttcactacgatcttcaccattgagattgccctcaagatgacagcatatggagcttttctgcacaagggcagtttttgccgtaactattttaatattttggacctgttggtcgtatccgtctcactcatctccttcggtattcagagttcagcaattaatgttgtgaagattctgagggtacttagggtgctgaggcctctaagagctattaacagagccaaagggctgaagcatgtggtgcaatgcgttttcgttgctattaggacaattgggaacatcgtgatcgtaactacactcctgcaattcatgtttgcctgcatcggcgtacagctgttcaaggggaaattatacacctgcagtgactcttccaaacaaacagaggcagagtgcaaaggaaactatattacatacaaagatggggaagttgaccaccccattattcagcccaggtcatgggaaaactctaagttcgactttgataatgtactggccgctatgatggcgctatttacggtttccacatttgaaggatggcctgagttactctacaggtcaattgactcccacaccgaggataagggcccaatctataattaccgggtggaaatttcaatcttttttattatctacattattataatagcgttcttcatgatgaatatttttgtgggatttgttattgttacgtttcaggaacagggggaacaggaatacaaaaattgtgaactggataaaaatcaaaggcagtgtgttgagtatgccctcaaagccagacccctccggaggtacatccccaagaatcagcaccaatataaagtatggtacgtggtgaattcaacatacttcgaatacctgatgttcgttctgatcctcctgaacactatctgcctagcaatgcaacactacggccagagctgcttgtttaagattgcgatgaatatcctcaatatgctgttcaccggcctgttcaccgtcgagatgattttgaaactcatcgcttttaagcctaagggctatttcagtgatccatggaatgtgtttgatttcctgattgtgattggaagcatcatcgatgtcatcttgtccgaaaccaaccactatttctgcgatgcgtggaacacctttgatgcccttattgtcgttggcagcattgtagacatcgcgatcacagaggtgaatcctgccgaacacactcagtgcagcccgagtatgaatgcggaggagaactcccggatcagtattaccttcttccgcctgttccgagtcatgcgcctcgtaaaattattgtctcgcggagagggcattcggacactgctgtggacttttattaagtccttccaagcgctgccctatgtggcgttgctgattgtgatgctctttttcatttacgcggtgattggcatgcaggtgtttgggaaaatcgcactcaatgacacaactgaaattaaccggaataataattttcagacttttccccaggccgtcctgctgctgttcagatgtgctaccggcgaagcgtggcaggacatcatgttagcatgcatgcctgggaagaagtgcgcccctgaaagcgagccttctaactccaccgaaggggagacaccgtgtgggagctcttttgcagtcttctatttcatctctttctacatgctttgtgcctttttgatcattaacctgtttgtggccgtgatcatggacaattttgactatctcactcgggattggagcattttgggccctcaccatctggacgaattcaaaaggatctgggcagaatacgatcccgaggccaaaggcaggatcaaacacttagatgtcgtgacactcttaaggcggatccaacctcccttagggtttgggaaactgtgccctcatagggtcgcttgcaaacggctggtgagcatgaacatgcctcttaactccgacggaaccgtaatgttcaacgccacactttttgcattggtcagaacagccctgcggatcaaaaccgaaggtaacctagagcaggccaatgaagagttgcgcgctattataaaaaaaatctggaaacgaacatctatgaagctgttggaccaggtagtgcccccagcaggagatgacgaggtaacagtgggcaagttttatgccaccttcctcatacaggaatatttccggaaattcaaaaagaggaaggaacaaggactggtggggaagccatcccagcggaacgctttgtcattgcaagctggtctcagaacccttcatgatattggccctgaaattcggagggccatatccggagaccttacagccgaagaagaactggacaaggcaatgaaagaagctgttagcgccgcatctgaggatgacatcttcagaagggccggtggactgttcggcaaccacgtgtcatactatcagagcgatgggaggtctgcctttccccagacctttaccactcagaggcctctgcacattaacaaggccggatcaagtcagggcgacactgaatcgccctcccacgaaaagctggtagactccacttttaccccatcgagctactccagtactggaagtaatgcgaatatcaataatgcgaacaacactgcactgggccgattgcccaggcccgctggctatccgagtaccgtgtcaaccgtggagggccacgggccaccgttatcacccgctattcgggttcaggaagtagcctggaagcttagcagtaatcgctgtcacagtcgcgagtcccaagcagccatggcgggacaggaggagacttcccaggatgagacttatgaggtcaaaatgaatcacgatacggaggcttgcagtgaaccctcactattgtcaaccgagatgctatcgtaccaggacgacgagaatcgacagcttactttgcctgaggaggataagagggatatacgccagagcccaaaaagggggttccttaggtcggcctcgttgggtaggagggcttcttttcacttagagtgcctcaagaggcagaaagatcggggtggtgacatttcccagaaaacggtgctgcccctgcacctggttcaccaccaggcactggccgtggcaggcctatcaccattgcttcaaagatcgcattcacctgctagtttccctagaccgttcgctacccctcccgcaactcctgggagccgtggatggccccctcaaccagtgcccaccttgagactcgagggggttgaaagcagcgagaaactgaactcctccttcccatctattcattgtgggtcatgggctgagactacccctgggggtgggggttcttccgcagctcgaagagtgcgacctgtttcactaatggtgccctctcaggctggagctcccggacgccagtttcatggcagcgctagctccctggttgaagcagtgctgatctccgaaggcttgggacagttcgcacaggatcctaaattcatcgaggtaacgacccaggaactggcagacgcttgcgacatgaccatcgaagagatggaaagcgcggctgataacatcctaagcgggggagctcctcaatctcccaacggcgctttactgccatttgtgaattgccgcgacgctggccaagatcgggcaggcggtgaagaggatgcgggatgcgttcgggcacgtggcagacccagcgaggaagagctgcaggatagcagagtgtacgtgtcttcactcta

SEQ ID NO: 216623 - DNA, 6417 bp, synthetic construct
  misc_feature 1..6417: note = Description of Artificial Sequence: Synthetic coding sequence
  source 1..6417: mol_type = other DNA
atggtgaacgagaataccaggatgtacattcccgaggagaaccaccaaggtagcaattatgggtccccgaggcccgctcatgccaacatgaatgccaatgctgccgcagggttagcccctgaacacatcccaacacctggagcagccttgtcatggcaagcggctatcgatgccgcacggcaggcaaagttaatggggtctgccggaaatgccaccattagcactgtgtcctccacccaacggaaaaggcaacagtacggcaagcccaaaaaacaggggagtactacagccacccgaccaccaagggcactgctatgtctgaccctgaagaaccctatccgaagagcttgcatcagtattgttgagtggaaacctttcgaaatcatcattctgctgacaatttttgctaactgcgtcgctttagcgatctacatcccgtttccagaggatgactctaatgctacaaattctaatctcgaacgcgtggaatatttgtttctgataatctttacagttgaggctttcctgaaggtgatagcctatggactgctgtttcacccaaatgcctaccttaggaatggttggaatttactggatttcattatcgtggtggtgggccttttcagcgctatcttggaacaggcgactaaagccgacggggcaaacgcgttgggcggtaagggtgccggtttcgacgtgaaggctcttagagccttcagggtgctgcgccctctcagactcgtgtccggagtgccctctttgcaggttgtcctgaatagcattattaaggccatggttccactgcttcacatagctctgctggtgttattcgtgatcataatctacgccatcatcggccttgagctctttatgggaaaaatgcataagacctgttataaccaggaggggatcgccgatgtgccagctgaggacgaccccagcccctgtgccctggagacaggccatggtcgccagtgccagaatggaactgtgtgtaaacccggatgggatggccctaagcacgggatcactaattttgacaatttcgcctttgctatgctgacagtcttccagtgtataaccatggagggctggacagatgtactgtactggatgcaagacgcgatgggctatgagctgccctgggtttacttcgtgagcctagtgatttttggctctttcttcgtgcttaatcttgttcttggagtacttagcggcgaattctctaaggaacgcgaaaaggccaaggccaggggtgattttcagaaactccgcgagaagcagcaactggaggaggatctgaagggctacctggattggattacacaggctgaggatatcgaccccgagaacgaagacgagggcatggatgaggagaagccgagaaacatgtccatgccaacctctgagaccgagagcgttaataccgaaaacgtggcagggggagacatcgagggcgagaactgcggagctcgactggctcaccgtattagcaaaagcaaattctcgagatattggcgacgctggaatagattctgcagaagaaaatgccgagccgctgtgaagtctaacgtgttttattggctcgtgattttcctcgtgtttctcaataccctgacaattgcctcagaacactataaccagccaaattggctcactgaagtgcaggacactgccaacaaggcactactcgccctcttcaccgctgaaatgctgctgaagatgtattcactgggcctgcaggcctattttgtttccctgtttaaccgctttgactgtttcgtggtttgtgggggtatcctcgagactattctggtagaaaccaaaatcatgtcacctctgggaatctccgtgctcaggtgcgtgaggcttctgcgaatcttcaagatcacacgctattggaatagcttatccaatctggttgcctcccttctgaattccgttcggagcattgcaagtctgttattgctcctgtttctgttcatcataatcttcagtctgctggggatgcagttattcggagggaagtttaatttcgacgagatgcaaactcgcaggtcaacattcgacaacttcccccagtcgctacttaccgtttttcagatactcactggtgaggattggaattctgtgatgtatgacggaattatggcctacggcggaccttcctttcccggaatgctggtttgcatctatttcatcattctgttcatttgcgggaattatattctgttgaacgtgtttctcgctatcgccgtcgacaacttggctgacgctgaatctctgacctccgcccaaaaggaggaagaggaagaaaaagagaggaagaaactggcacgcacagcatctcccgaaaagaagcaggaacttgtggagaaaccagctgtgggcgagtcaaaggaggaaaagattgagctaaagtctataaccgctgatggcgagtcgccaccggcaacgaaaatcaatatggacgacctgcagccaaacgagaacgaggacaaatctccataccctaacccagagaccactggcgaagaagacgaagaagagcccgagatgcctgtgggacctaggcctagaccgctgtcagagctccatctaaaagagaaggccgtgccaatgcccgaagcctccgctttttttatatttagttcaaacaaccgattccggcttcaatgtcacagaattgtgaatgacacaatctttactaatctgatcctcttttttatcctcctgtcttccatttccttggccgctgaggatcccgtgcagcacacatctttcagaaatcacattctggggaatgccgattatgtgttcaccagtattttcacattggaaataatcttgaagatgactgcctacggagcatttctgcacaaaggaagcttctgtcgaaactacttcaacattctcgacctgctggtggtgagtgtgagtttgatcagtttcggcattcagagtagtgccatcaacgtcgttaagatcttacgcgtccttagggtcctgagacctctgagggccattaaccgggctaaaggcttgaaacacgtggtccaatgcgtgtttgtagcaattagaacaatcgggaatatcgtcattgttactaccttactacagtttatgttcgcttgtatcggtgtgcagttgttcaagggcaagttgtatacttgctcagacagcagtaagcagaccgaggcagagtgtaagggcaactatatcacttacaaggacggtgaggtggatcatcccatcatacaacctagaagttgggagaattccaaattcgatttcgataatgttcttgccgctatgatggctctctttactgtgagcaccttcgaggggtggccagagctgctctaccgatccatagactcccatacagaggataagggcccaatttataactatagggtcgagatttctattttcttcatcatttatattattatcattgcctttttcatgatgaacatctttgtgggtttcgtgattgtgacgtttcaggaacagggggaacaggagtacaagaattgtgaacttgacaagaaccagcgtcaatgcgttgagtacgccctcaaggctcgccctctcagacgctatatccctaagaatcagcaccagtataaggtatggtacgtggtcaatagcacctatttcgagtatttgatgtttgtgctgattctgttaaacaccatctgcttggccatgcaacactatggacagagctgcctgtttaagattgcgatgaacatcctgaatatgctgttcaccgggctctttactgtggagatgatactgaagctcatcgcgttcaagccaaaacattacttctgcgatgcttggaatacctttgacgcattgatcgtggtgggctccattgtggatatcgctattacagaggtgaacccagctgagcacacacaatgttctccgtctatgaacgccgaagagaactccagaattagtattacatttttcagactgtttagagttatgaggctcgtgaagttactttcacggggagaggggattaggactctgctgtggacttttattaagtcatttcaagcccttccctacgtagcccttctgatagtgatgcttttctttatctacgcagtgattggtatgcaggtgtttgggaagattgccctgaacgacacgacggaaattaacaggaataacaatttccagactttcccccaagcggttctgttgctcttcagatgcgctacgggggaagcctggcaggacatcatgctcgcatgcatgcccggaaagaaatgtgctcctgagagcgagccatctaattctactgaaggtgagaccccttgcggatctagctttgccgtcttctattttataagcttttacatgttgtgcgctttcttgattatcaacctctttgtggctgtgatcatggacaactttgattacctgactcgagattggtcaatcctgggcccacaccatctggatgaattcaagagaatttgggcagaatatgatccggaagccaagggaagaataaaacatctcgacgtggttactctgctgcggagaatccaaccacctctgggtttcggcaagctgtgcccacatcgggtggcctgtaaaaggttagtttctatgaatatgccactcaatagcgacggaactgtcatgttcaacgccaccctttttgcactggtgagaaccgctttacgtataaagactgaaggaaacttggaacaggccaacgaggaattacgggcaatcatcaagaagatctggaagcgtacaagtatgaaattgctcgaccaggttgtcccccctgcaggggatgacgaggtgacagtcggcaagttctatgccacctttctgatccaggagtattttcggaagtttaagaaacggaaggagcagggattggttggtaaaccctctcagagaaacgctctctcacttcaggccggactccgtacactgcacgatattgggccagaaatccgaagagccatttccggcgatctgaccgcagaggaagagttagataaagctatgaaagaggctgtttcagctgccagtgaggatgacatctttaggcgggctggcggtctattcggtaaccatgtgtcgtactatcagtccgatggcaggtctgcttttccccagacattcaccacacagagaccactacacataaacaaagcgggtagttcccagggggacactgaatcaccgtcccatgaaaagcttgtggacagcaccttcactccatctagttactcgtccacaggcagtaatgcaaatatcaataatgcaaacaacactgcccttggtcgtctaccgaggcccgctgggtacccctccacagtctctactgtagagggacacgggcctcctctgtccccggcaattcgtgttcaggaagtcgcctggaaactttcttccaaccgatgccactcacgcgagagccaggcagctatggccggtcaagaggaaacatctcaggacgagacatacgaggtcaagatgaaccatgataccgaagcatgctccgaaccctctcttctgagcacggagatgctgtcctaccaggatgatgagaacaggcaactaaccctccctgaggaagacaagcgggacatcagacagagccccaagcgtggatttctgagatctgcctctcttggcaggcgggcatcctttcatctggaatgtcttaagaggcagaaggataggggcggagacatcagccaaaaaactgttctaccccttcacctcgtccatcatcaggccctcgcagtggctggcctgtcccctctattgcagaggtcacatagccccgcttctttcccacgaccatttgccacccccccagccacgcctgggtcacggggttggccaccacagccagtcccgactctacgactagaaggtgtcgaatcaagtgagaagttgaacagtagtttccccagcatccattgcggttcatgggctgaaactacccctggcggaggcggatcgtcggctgccagacgagtgcgaccagtgtcactgatggtgccatcacaggctggcgctcctggtaggcagttccacgggtccgctagttccttggtcgaagcagtgctgatttctgaagggctggggcagttcgcccaggatccaaaattcattgaagtgaccactcaagagctcgccgacgcgtgcgacatgaccatcgaggaaatggagtctgcggctgataacatcctgagcggtggagctccacaaagccctaatggggcactgctccccttcgttaactgcagggatgccggacaggacagggcaggaggcgaggaggacgcgggttgtgtgagagccagaggcaggccttccgaagaagaactccaggacagccgcgtgtatgtgtcttcattgtag

SEQ ID NO: 216624 - DNA, 6417 bp, synthetic construct
  misc_feature 1..6417: note = Description of Artificial Sequence: Synthetic coding sequence
  source 1..6417: mol_type = other DNA
atggtcaatgagaacacgcgtatgtatatacccgaggaaaatcatcaggggtctaactatgggtcaccaaggccagcgcacgctaatatgaatgccaatgcagccgcaggattggccccagaacatataccgaccccaggcgctgcactgtcctggcaagcagcaattgatgcggctagacaagccaaactcatggggtcggcaggtaatgccacaatttcgaccgtcagtagtacccagaggaagcgccaacagtacggtaaacctaaaaagcaggggagtactaccgctacccgccctccccgtgccctgctgtgtctgaccctcaaaaaccctattaggagggcctgtatctccatagtcgaatggaagccattcgagatcatcatactcctgaccatcttcgccaactgtgtcgcactcgctatatatattccttttccggaggatgacagtaacgcaacaaattcaaacctcgagcgtgtggagtaccttttcctgataatatttacagtggaggcttttttgaaggtgatcgcctatggactcttgttccacccgaatgcctacctgagaaatggctggaacttgctggactttatcatcgtggtagttggactgttctccgccatattagaacaggccactaaagccgatggcgctaacgccctgggcggaaagggagctgggtttgatgtgaaggccctgagggcttttagagtcctaagaccccttcgcttggtgtccggggtcccatcgctgcaagtggtgctgaactcaatcatcaaagctatggttccactgttacatattgcccttctggtgctctttgttattataatttatgctattatcggcttggaactttttatgggtaagatgcataaaacttgctacaatcaggaggggatcgctgacgttccagcagaagacgatcccagcccatgtgccctggagaccggtcatggaaggcaatgccaaaatggaaccgtatgtaagcccggatgggacggcccaaaacacggtatcacaaatttcgacaacttcgccttcgcaatgctgaccgtgtttcagtgcatcaccatggaaggttggaccgacgtgctgtactgggtcaatgacgccgtgggtcgggactggccttggatctacttcgtgactctgataatcatcggaagcttttttgtgctcaacctggtgctaggagtgttgtccggagagttctcaaaagagcgcgaaaaggctaaagccaggggcgatttccagaagctacgcgagaagcagcaactcgaggaagatctgaaggggtatttggactggataacccaggccgaagacattgacccggagaacgaggacgaggggatggacgaagagaaaccccgtaatatgtctatgccaactagcgaaaccgaatctgtcaacacagagaatgtggccggtggtgacattgaaggagagaattgcggcgcaagactggcccatcgcatctccaaatcaaagttctctcggtactggcgtcggtggaaccgtttctgtcgcaggaaatgtagagccgctgtgaagtcaaatgtgttttattggctggttatcttcctcgtctttctgaacactctgacaatagctagcgagcattacaaccaacctaactggctgactgaagtgcaggatactgccaacaaggctttactcgccctcttcacggcagagatgctgctaaaaatgtactcccttggcctgcaggcctatttcgtgtcgcttttcaatagatttgattgctttgtggtctgtgggggaattctggaaaccatcttggtggagactaaaataatgtcccctctgggcatatcagttctgagatgtgtacgcctgcttcgcatcttcaagatcacccggtattggaattcattaagcaatttggtggctagtttgctgaattcagtgcgatctattgcatcccttttgctgctgctgtttctattcattatcattttcagcttattaggtatgcagttgttcggtgggaagtttaacttcgatgagatgcagactagacggagtacctttgataacttcccgcaatcactcctgaccgtgttccagatcttgactggcgaggactggaattccgtcatgtacgatggcattatggcttatggcggaccgtctttcccgggtatgctggtgtgtatttattttatcatcctctttatctgtggaaattacatactcttgaatgtgtttctagcaatcgctgttgataatctggctgacgcagagtccctcactagtgcccaaaaggaggaggaagaagagaaggaacgcaagaagctcgcgcgtactgcctcccctgagaaaaaacaggaattagtggagaaacctgctgtgggagagtcaaaagaagagaaaattgaactaaagtctatcaccgctgacggagaaagtccaccggcaaccaagataaatatggatgatctccagcctaatgagaatgaggacaaatccccatatccgaaccccgagacaactggggaggaggacgaagaagaacctgagatgcccgtcgggcctagaccacggcctctcagtgagctgcacctgaaagagaaagccgtgccaatgccagaggcgagcgctttctttattttctctagcaataatcgatttcgtctgcagtgccataggattgtcaacgacaccatttttacaaatctgatcctgttcttcattctcctgtcatcgattagtctcgcagcagaggatccggtgcagcacacctccttccgcaaccacatcttaggcaacgctgattatgtgtttacatctatctttactctggagattatcttgaaaatgaccgcctacggagcgttcctacataaaggaagtttttgtcggaactactttaacattttggacctgttagtggtatctgtgtcgctgatctcttttggcattcagagttccgccattaacgtagtgaagatcctgagagtccttagagtcttgcgccctctgagagccatcaacagagctaagggtttaaaacatgtagtgcagtgcgtttttgtcgcgatcagaacgattggcaatattgtcattgtaacaaccttactgcagtttatgtttgcctgtatcggtgtgcagcttttcaagggaaagttgtatacctgtagcgatagttccaagcaaacagaggctgagtgtaagggcaattacattacatacaaagatggcgaggtggatcaccccatcatccagcctcgctcatgggaaaattcgaagtttgacttcgacaatgtgctcgccgcaatgatggcactgtttacagtgtccacctttgaggggtggcctgagctgctttatcgcagcatagactctcacaccgaggataaaggccctatctacaactaccgagtggagatctctatcttctttataatttatatcattatcatagcgtttttcatgatgaatatctttgtgggtttcgtgatagtgacttttcaggaacaaggagaacaggaatacaagaactgcgagctcgataaaaatcagcggcaatgcgtcgagtatgcgctgaaagctagaccactgagacggtacataccgaagaaccagcaccagtacaaggtgtggtacgtggtaaactctacttatttcgaataccttatgttcgtgctaattctgcttaatacaatctgtctcgctatgcagcattatgggcagtcatgcctattcaagatcgcaatgaatattctgaatatgctcttcactgggcttttcactgtggagatgattttgaagctaatcgcctttaaaccgaaaggttacttttctgatccatggaatgtgttcgattttctcatcgtgatcggctccataattgacgttattctgagcgagacgaatcctgccgagcacacccagtgtagtccgagtatgaacgcggaagagaactctcggatctctatcacgttttttcgtctgttcagggtcatgcgcctggtgaaactgctgagtagaggagagggcatccgcaccctgctctggacctttataaaaagttttcaagctctcccctatgtagctctactgattgttatgctgttcttcatctacgcagtgattgggatgcaggtcttcggcaaaattgcactgaatgacacaaccgagataaacagaaataacaacttccaaactttcccacaagccgtcctcctcctctttagatgcgcaaccggtgaagcatggcaagatattatgctggcatgcatgcccggaaagaagtgcgcacctgagtcagagccttctaactccacggagggcgaaacgccctgtggctcttcttttgccgtgttttattttatttccttttacatgctgtgcgctttcctgatcatcaacctctttgtagcggttattatggacaatttcgactacctgacacgggactggtctatacttgggcctcaccacttggacgagttcaaaagaatatgggccgagtatgacccagaagccaaggggagaatcaagcatttagatgttgtcaccctgctgaggcgaattcagccgccactgggatttggtaagctgtgtccacaccgggttgcttgcaaaagacttgtgagcatgaacatgccactcaactccgacggaactgtgatgttcaacgccactctgttcgccctggttcgaaccgcactgcggataaaaaccgaaggcaacctggaacaagcaaacgaagagcttcgagccatcattaagaagatatggaaacgcacctccatgaaacttttggatcaggtagttccaccagccggtgacgacgaagttacagttggtaagttttacgcaacattccttatccaggagtactttagaaagttcaagaaaagaaaggaacaaggcctagttgggaaacctagccagagaaatgccctgagcctgcaagcaggacttcgtacgttgcacgacattgggcctgaaatccgccgagccatctccggcgacctgactgccgaggaagagcttgacaaagctatgaaagaggctgttagcgcagcttcagaagacgacattttcaggagagccggtgggctgtttgggaaccacgtgtcctactaccagagtgacggcagatcagcatttccccagacgttcaccacacagaggccgctgcacataaacaaagccggaagcagccagggggacactgaatctccctcccacgagaagctggtggactcaacgttcactcccagctcctattcctccaccggatctaatgctaacatcaataacgccaacaacaccgcccttggcagactgccccgtcccgctggatacccttcaacagtatctaccgtggaaggacacgggccacctctaagcccagccatcagagtgcaggaggtggcctggaagctcagctccaacaggtgccatagccgagaatcacaggcagctatggcaggccaggaagagacttcacaggacgaaacctacgaagtgaagatgaatcacgatacagaagcctgtagtgagccttctcttctgtccactgaaatgctgagttatcaagacgatgagaaccgccaattgactctccctgaggaggataaaagggatatccggcagtcacccaagcggggattcctgcgctctgcttcgctagggcgacgcgcatctttccaccttgagtgtttgaaaaggcagaaagacagaggcggagatatctctcagaagaccgtcttacccctacacctcgttcatcaccaggcactagcagtggcagggctctcgcccctgctgcagcggagccatagtccagctagtttcccccgtccatttgccaccccccctgctacccctggaagtcgcggttggccccctcaacccgtgcctaccctgagattagaaggcgtcgaatccagtgaaaagttgaattccagctttcctagcattcactgcggctcctgggcagaaactaccccagggggtggcggttccagtgcagcccgtcgcgtccgccctgtgagtctgatggtcccctcgcaggcaggcgctccagggcgtcagtttcacggaagcgcctcctcacttgtggaagcagtgctgatcagcgaagggctggggcagttcgcacaggatcctaagttcattgaagtgacgacacaagagctcgcggatgcttgtgatatgacaatagaggagatggagtcggccgctgataacatcttatctggcggagctcctcagtccccaaacggcgctcttctgcctttcgtgaactgtagagatgctggccaagaccgggcagggggagaagaggacgccggatgcgtcagagcacgaggaagaccttctgaagaggagctgcaagacagccgtgtgtatgtctcctccctgtag

SEQ ID NO: 216625 - DNA, 6434 bp, synthetic construct
  misc_feature 1..6434: note = Description of Artificial Sequence: Synthetic coding sequence
  source 1..6434: mol_type = other DNA
atggtgaatgaaaatacacgcatgtatatcccagaggaaaatcatcagggaagtaattatggtagtcctcggccagcccacgctaatatgaatgccaatgccgctgctggtctagcccctgagcacattcctacccccggagctgccctcagctggcaggccgctattgatgccgctcgtcaagccaagctgatggggtccgcaggtaacgccacaatttccacagtcagcagtacacaacgaaaacgtcagcagtacggcaaacctaagaaacagggctcaaccacagccacccgccctcctcgcgctttattatgcctcactctgaagaaccccatccgaagagcctgcatttccatagtcgagtggaagccctttgagatcataattctacttacaattttcgctaattgcgttgccctcgctatctacattccatttccagaggatgattctaatgccactaatagcaatttggagcgggtggagtacctgttcctcatcatatttaccgtagaagccttccttaaggtcattgcctacggcctgctgtttcacccaaacgcctacctgcggaatggctggaacctgctcgactttataatagttgtggtgggattgtttagcgccatcctcgaacaggccaccaaggctgatggagcaaacgccctgggcggaaagggagccggttttgatgttaaggctttgagggcctttagagtgttgcggcctctcagactggtgagcggagtgccatccctgcaggtagtgttgaactccataatcaaggccatggtgcctctccttcacattgcactgttggtcctgtttgtcataataatctacgctatcattggtctggagttgtttatggggaaaatgcataaaacctgctacaaccaggaaggaatcgcagacgtgcccgctgaggacgacccaagcccgtgtgctctcgagacaggacatggtaggcaatgccagaacggcaccgtgtgtaaacctggttgggacggaccaaaacatgggattacaaacttcgataacttcgccttcgcaatgctgacggtattccaatgcatcactatggaggggtggaccgatgtgctttactgggtaaatgacgccgtgggtcgggattggccctggatttattttgtgacactgattattattgggtccttcttcgtactcaacttggtgcttggggtcctaagcggagagttctccaaggagagggaaaaagcgaaagctcgtggtgactttcaaaaactgagagagaagcagcagctcgaggaagatctgaaaggttatcttgattggatcacacaggcagaggatatagatcccgagaatgaagatgagggcatggatgaagaaaaaccgcgtaacatgtctatgccaacctccgaaaccgagtctgtgaacaccgaaaacgtggcgggaggagacatcgaaggagaaaattgcggcgcacgattggctcatcggattagtaagtctaagttttctcgatactggagacgctggaacaggttctgccgacgaaaatgccgggcagcggtgaagtcgaatgtgttctactggctggtaatattcctggtctttctaaacactctcacgattgcatcagaacattacaatcagcccaactggcttactgaggtgcaggatactgctaacaaagccctactcgcactattcactgcagagatgttgctgaaaatgtactctttggggctgcaagcatattttgtgtctctctttaaccggtttgactgctttgtggtgtgtggcggtatcttagaaacaattctcgtagagacaaagatcatgagcccgctgggaatctctgtgttacgatgcgtgcgcctcctccggattttcaaaataacaaggtactggaattcactgtctaacctggtggcctccctactcaactctgtccggtccattgcttccctcttactactgttatttctatttatcattatctttagtttgctggggatgcagctctttggcggtaagttcaattttgacgaaatgcaaacaagaagatccaccttcgacaactttccccagagcctgctgaccgtgttccagattctgactggtgaagactggaacagcgtgatgtacgatggcatcatggcatacggagggccttcgttcccaggaatgctggtttgtatctattttattatactgttcatatgtggcaactatattctcctgaacgtgtttttggcaatcgccgtcgataatctggccgacgcagagagcctgaccagtgcccagaaggaggaagaagaagagaaagaacgcaagaaactggctaggacagcaagcccagagaaaaagcaggagctcgtagaaaaacccgcagtaggtgagtcaaaggaggagaaaatcgagctgaagtctatcacggccgacggagagtctccaccagccactaaaatcaatatggatgaccttcagcccaatgaaaacgaagacaagagcccctatcctaaccctgagacaaccggcgaagaggacgaggaggagccggagatgcccgttggacctcgtcccagaccactgtctgagctacacttaaaggaaaaagctgttcccatgcccgaggcttccgctttttttatcttcagcagtaacaatcgtttccgtctccagtgtcatcgcattgttaatgatacaattttcaccaacctaatcctcttcttcattctgttgtcctctatttcactggcagctgaagatcctgtgcagcatacctcctttaggaaccacatcctgttctattttgacatcgtgttcactactatctttactattgaaatcgcccttaagatgaccgcgtatggagctttccttcataaggggagcttctgcaggaactatttcaatatcttggacctgttggtggtgagcgtgagtctaatcagctttggaatccagagctctgccatcaacgtggtcaagattctcagggttctgagggtactccgcccactcagggccatcaacagggctaaggggctgaaacacgtcgtccagtgtgtatttgtggccattcgcacaatcgggaatattgtgatcgttacaacacttctccagtttatgttcgcctgcataggcgtgcaactgtttaaaggcaagctgtacacttgctccgattcgtccaagcaaaccgaagccgaatgcaaaggtaattacattacatataaggatggggaagtcgaccatccaatcatccagccaagaagttgggagaattctaaatttgattttgacaacgtgttagccgctatgatggctttatttactgtgtcaaccttcgaggggtggcccgagctcctctacagaagcatcgacagtcacacggaggataagggcccaatttataactaccgcgtcgaaatctcaatcttcttcatcatctacattatcatcatcgcctttttcatgatgaatatcttcgttgggtttgtgatcgttacgttccaggagcagggcgaacaggaatacaagaattgcgagttggacaagaatcagagacaatgtgtcgagtacgcgctgaaggccagacctttgcggcgttacatcccgaaaaaccaacaccagtataaggtgtggtacgtggtcaattcaacctactttgagtatctcatgtttgtccttatactgttaaatactatatgcctcgcgatgcaacattacggccagtcttgtctgttcaaaatcgcaatgaacattctgaacatgttatttacaggactttttaccgtcgaaatgatactgaagttaattgccttcaagccgaagcattacttctgcgacgcctggaatacatttgatgctcttatagtggtcgggtcgatcgtggacatcgctattactgagaatgctgaagagaatagtagaatttcaatcaccttctttagattattccgcgtgatgagactcgtgaagttactaagccgcggagaggggatacgtaccttactatggacttttatcaagagttttcaggcgctaccatatgtagctctgctaattgtgatgcttttctttatatacgccgtgatcggcatgcaggttttcggcaaaatcgcccttaatgacaccacagaaattaacagaaacaataacttccagactttcccccaggccgtgcttttgctttttcgctgtgcaacaggcgaggcgtggcaggatattatgctcgcatgtatgccaggaaagaaatgcgccccagaatcggagccctcaaactccacggagggagaaaccccctgtggatctagcttcgccgtcttttattttatctcgttctacatgctgtgtgcatttttgatcatcaacctgttcgtggctgtcattatggacaattttgattatctcactagagattggtcgattctgggaccccaccaccttgacgagttcaagcgcatatgggccgagtacgacccggaggcaaagggtcgcattaagcaccttgatgtcgtgactctcctaagacgcattcaaccgccactcggttttggcaagctgtgtccacacagagttgcatgtaagcgtttggtgagcatgaatatgcctttaaactctgatggcacagttatgtttaacgccactttgtttgcactcgtgagaacggcgctgcggattaaaaccgaagaagggcctagtccctcagaagcacatcaaggagccgaagaccctttccggcctgcaggcaatctggaacaggccaacgaggaactcagggctattatcaagaagatatggaaaaggacatccatgaagctactggaccaggtggtgcctcctgcaggtgacgatgaagttacagtgggcaaattttacgcaaccttcctcatccaggaatatttccggaaattcaaaaagcgaaaggagcagggactggtgggcaagccaagccaaagaaacgctctgtcactgcaggccggattacgcacattgcatgatattggccctgagattcggagagctatctccggagacctgactgcagaggaggaactggacaaggccatgaaggaggccgtttcagccgctagcgaggatgatattttcagaagggcaggtggcctctttggcaatcatgtttcctactaccaaagcgacgggagatccgcgttcccacagacttttaccactcaaaggcccctccatatcaacaaggcagggagttcccagggggacactgaaagtccgagccatgaaaagctggttgacagcacgttcacaccttcctcctacagctccactgggagcaacgccaacattaacaatgcaaacaacacagccctggggagattgcctcgacctgctggctatccctctaccgttagcacagttgaggggcacggccctccgctctccccggcaattagggtccaggaggtcgcctggaagctctcctccaataggtgccactcccgagagagtcaggctgccatggcaggccaggaggagacctcccaggacgagacctacgaggtcaagatgaatcacgacacagaagcctgtagtgaaccctcccttctctctacagaaatgctcagctaccaggatgacgaaaataggcagctcaccctcccagaagaagataagagagacatcagacagtcccctaagcgcggttttctgaggtctgcttcactgggaaggcgagcgagcttccacctcgagtgtctgaagagacaaaaggataggggcggagatatctcccagaaaacagttttgcccttacacctcgtccatcatcaggctctggccgttgcaggcctgagtccgctgttgcaacgctcacactctcctgcaagcttcccaagaccttttgctaccccaccggctacacctggtagtagagggtggccaccacagcctgtaccaacattgaggctggaaggggtcgagtccagcgaaaaactaaattcatccttcccatccatccactgcggctcctgggccgagactacccccggtgggggtggctcctccgcggctaggcgcgtcagacctgtttcactgatggtgccctctcaagctggagctccgggacgccagttccatggctccgcttcttcccttgtcgaggccgttctgatttcagagggactgggtcagttcgcccaggatcctaaatttattgaagtcaccactcaggaactagccgacgcctgcgacatgaccatcgaagagatggagagtgcagcagacaatatactgagcggaggcgctccacagtcacctaatggcgcactgctgccattcgtgaattgtcgggatgccggacaagacagggcgggtggcgaggaggacgccggatgcgtgcgagctagaggtcgcccttcagaagaggagttgcaagactctagagtctatgtatctagcctgta

SEQ ID NO: 216626 - DNA, 6416 bp, synthetic construct
  misc_feature 1..6416: note = Description of Artificial Sequence: Synthetic coding sequence
  source 1..6416: mol_type = other DNA
atggtcaacgaaaacacgcggatgtacatacctgaggagaatcaccagggaagcaattacggtagccccagacctgcgcatgccaacatgaatgctaacgctgcggcaggactggcaccggagcatatccccacacccggtgccgcactgtcttggcaagctgccatcgatgcagcacggcaggctaagttaatgggatccgcagggaatgctaccatcagtaccgtcagtagcactcagagaaaacgtcagcagtacggtaagccaaagaagcagggctcaacaacagcaacacgaccgccacgcgcacttttatgcctcaccctcaaaaacccaatcaggcgggcttgtatcagcattgttgagtggaaacctttcgagattatcatcctcttgaccatcttcgctaactgtgttgctctggctatctatatcccatttcctgaagatgatagcaatgccaccaattccaacctggagagggttgagtatctatttctgatcatcttcacggtcgaggctttcctgaaagtaattgcttatggcctcctgtttcatcccaacgcctatctgaggaatggttggaatctgttggattttatcatcgtggtggtaggcctgtttagtgcaatcctggagcaagctactaaagctgacggggctaatgccctgggcggtaagggcgctggctttgacgtgaaggccttacgcgctttcagagtgctccggcctctgcgactggtgagcggtgtgccctctctccaggtagttctgaattcaatcattaaggccatggtgcccttgttgcatatagcactcctagtgctgttcgtgatcatcatttacgccatcatcggattggaactttttatggggaagatgcataagacgtgctataaccaagagggcatcgctgatgtgccggcagaagatgacccatccccttgcgctctggagacaggccacgggagacagtgtcagaatggcacagtctgcaaacccggttgggacggcccaaagcatggtatcacgaattttgacaatttcgcgttcgcaatgctcaccgtcttccagtgtataacaatggagggttggacagatgtcctttactgggtgaatgacgctgtgggtcgagactggccgtggatctatttcgtcacactgataatcattgggagctttttcgtactgaacctggtgctcggggtgctctctggggagttttcaaaagaaagggagaaggcaaaagcacgtggtgactttcagaaattaagggaaaaacagcagctcgaggaagacctcaagggatacttggattggatcactcaagcagaagatatagatccggagaacgaggatgaaggtatggatgaagaaaaacctcgcaacatgagtatgcctacaagtgaaactgagtcagtgaataccgaaaatgtcgccggaggagatattgagggcgaaaattgcggggcacgcctggctcatagaatttctaagtcaaagttttcccggtactggcgtagatggaataggttttgtcgcagaaagtgtagagcagcagtcaaatcaaacgtgttctattggctggttatcttcctggtcttcctgaatactctgaccattgcgtcagaacactacaaccaacctaattggctgactgaagtccaggacacggccaacaaggcactgctcgctctcttcactgcggaaatgttgctgaaaatgtatagcttggggctccaggcctattttgtgtccctcttcaaccgttttgattgctttgttgtgtgcgggggaattctcgagactatcctggtggagaccaaaattatgagccctctgggcatctcagtgttgagatgcgtacgtttgctgagaattttcaagatcacgagatattggaactccctctccaatctcgtagcctcactgcttaacagcgtgcgcagcatcgccagcttattgttgctcttattcctcttcataattatcttttccctgttgggcatgcaacttttcgggggaaaatttaacttcgacgaaatgcagaccagacggtccaccttcgacaactttccacagagtctgctgaccgtcttccagattctaactggggaagactggaatagcgtcatgtacgacggcattatggcctatggcggaccatcattcccaggtatgctggtgtgtatttactttatcattctttttatctgcggaaattacatcctcctgaatgttttccttgccatcgccgtggataatctggcggatgccgagtctttaaccagtgcccagaaagaagaagaggaggagaaggagcgcaaaaaactggcaagaaccgcctcaccagagaagaaacaggagctcgtggagaagcccgcagtaggggaatctaaggaggagaagatcgagctgaaaagtatcacagccgatggtgagagtcccccagcgaccaagatcaatatggatgatcttcaacccaacgaaaacgaggataagagcccttaccctaatccggagaccacgggcgaggaagacgaggaagagcccgaaatgcccgtgggcccaagaccacgtcctctctctgagcttcatctgaaggaaaaggccgtgccaatgcccgaagcttctgccttttttatattttcttcaaacaacagattccgcctacagtgtcaccgaattgtgaatgacaccatattcaccaatctgatcctcttttttatattgctgtcttccattagcctggccgcagaggaccccgtccagcacacctctttcagaaaccatattttgttttattttgacatagtattcacaaccatctttaccatcgagattgctttaaaaatgacagcctatggcgctttcctacataaagggtccttttgtcggaactacttcaacattctcgaccttttagtggtctccgtgagccttatcagcttcggtattcagagctccgccattaacgttgtaaagatactgcgcgtgttgcgtgtcctgagaccactgagggctattaacagagcaaagggccttaagcatgtggtacagtgcgtcttcgtggctatcagaaccattggcaatattgtcatcgtgaccacccttctgcagttcatgtttgcttgtattggcgtgcagctgtttaagggcaaactgtatacatgcagcgactctagcaaacaaaccgaggccgagtgcaaaggcaactatattacttataaagacggggaagttgaccacccgattatccagcctcgatcatgggaaaatagcaagtttgatttcgacaatgtcctggctgctatgatggctttgtttaccgtttcaactttcgaggggtggcccgagctgctctaccggtcaattgactctcataccgaagacaagggacctatttataactaccgtgtggaaatctctatcttttttattatctacatcatcatcatcgcttttttcatgatgaacattttcgtcggatttgtgatagttacctttcaggaacagggcgaacaagagtataaaaattgtgagctcgataaaaaccaacgccagtgtgtggagtatgctctgaaagcacgcccacttcgccgatatatcccaaagaatcaacatcaatataaggtttggtacgttgtcaattctacatacttcgagtacctgatgtttgttcttatcctgctgaacaccatctgtctcgccatgcagcattacggccaatcgtgcctcttcaagatcgccatgaacatcttgaatatgctcttcacagggctgttcacagtggagatgatcctgaaattgattgcgttcaagcccaagcactacttttgcgatgcatggaatacctttgacgccctgattgtggtaggcagcatcgtggacatcgctatcacggaggtgaatcctgcagagcacactcagtgctctccttcaatgaatgccgaggaaaactctaggatttctatcacattcttccgactgtttagggtgatgcgcctcgtcaagttgctctcacggggagaagggattagaaccctcctttggacgtttatcaaatcattccaggccctgccatacgtggccctgctaatagtcatgctattttttatctatgccgttattggaatgcaagtatttggaaaaattgcgctcaacgatacaactgaaattaaccggaataacaattttcagactttcccacaggccgtgctgttgcttttcagatgtgccaccggagaggcctggcaagacatcatgctggcctgcatgccaggcaagaagtgcgcccctgagtcggagcccagtaatagtacggagggcgagaccccctgtggctccagttttgccgttttttactttatcagcttctatatgctttgcgcgttcctgatcattaatctatttgtggcagtcataatggacaacttcgactacttaacccgcgactggtccatcctgggccctcaccacttggacgaatttaagaggatctgggcggagtatgaccccgaagcgaaaggaagaatcaagcaccttgacgttgtgaccctattgagacgcattcagccccctctcggcttcggaaaactatgcccgcatcgcgtggcatgtaagcgtttggtgtccatgaacatgccactaaattctgatggtacagtgatgttcaacgcaaccctgtttgctctggtccgaacagcccttcgaatcaagacagagggcaacctcgaacaggcgaatgaggagcttagggccattatcaaaaagatttggaagaggactagtatgaagctgctcgaccaggtggtgcctcccgctggggatgacgaagtgaccgttgggaagttctacgcaacattcctgattcaggaatacttcagaaagttcaagaagcgcaaggagcagggcctggtgggaaagccatcacagagaaatgcactgtccttgcaggcaggtctgagaacactacacgatatagggccagagatccggcgtgcaatcagtggggacctgactgccgaggaggagcttgacaaagctatgaaggaggccgtttcggctgcatccgaagatgatatctttcgacgggcaggcggattgttcgggaatcacgtcagctactaccaatctgatgggaggtcagccttcccacaaaccttcacaacacagagaccactccacattaacaaagccggaagctcacagggcgacacggagagtccatctcacgagaagctggtcgactccacctttaccccctcctcatatagtagcaccggatctaatgcgaacataaataacgccaataatactgctctgggacgactccctaggcccgctggttacccctctaccgtgtctactgtggagggccatggcccacctttgtctcccgctattcgagtacaggaggtggcatggaagcttagctcaaacagatgccacagtagagagtcacaggctgctatggccggacaggaggaaactagccaggacgagacgtacgaagtgaagatgaatcatgacacagaggcttgctccgaaccatcccttctctcgaccgaaatgctgtcctatcaggacgacgagaatcggcagctcacattgcccgaagaagataaacgtgacattcgtcaaagccccaagcggggtttcctccgttcggccagcttgggacggagagccagctttcatctcgaatgtctaaagagacaaaaagataggggtggagacatttctcagaaaacggttctgcctcttcatcttgtgcaccaccaggccctcgctgttgcaggcctgagtcctctcctccaaagaagccactctccggcttcattccccagacctttcgcaactccacctgcaacccctggttcgcggggttggcctccacaaccagtgccaaccttgagactggagggagtggagagcagcgagaagctgaattcatcctttccaagcatacactgcgggtcgtgggctgaaaccacacctggtggcggtggatcatcggcggctaggagggtccggccagtgtctctgatggtaccatctcaggccggagctccaggcagacagtttcacgggtcagcttccagcctcgtggaggccgtcctgatatccgagggattaggtcaatttgcccaggacccaaaattcattgaagtaactacccaggagctggccgacgcctgcgacatgacgattgaggagatggagtcggcagctgataacattctgagcggaggagcgcctcagtctcccaacggtgccctgctgccctttgtaaactgtcgagacgccggacaggacagagctggtggggaggaagacgccggatgcgttcgagccaggggcagaccttctgaagaagagttgcaagattcgagagtgtatgtaagcagtttata

SEQ ID NO: 216627 - DNA, 6473 bp, synthetic construct
  misc_feature 1..6473: note = Description of Artificial Sequence: Synthetic coding sequence
  source 1..6473: mol_type = other DNA
atggtgaatgagaacactcgcatgtatattccagaggagaaccatcagggcagtaactacggatcacccaggccagctcatgcaaacatgaacgcaaacgcagcggcaggccttgccccagagcatatacccacccccggagctgccctgagctggcaggcagcgattgacgctgccaggcaagctaaactcatggggagcgcagggaacgccactatatccaccgttagttccactcagcgcaaaaggcagcagtacggcaagcctaagaagcagggatctaccaccgcaactcggcctccccgtgcacttttgtgtttgacacttaaaaacccaattcggagggcctgcatctccatcgtcgaatggaaaccttttgaaatcatcatcttattaacgatctttgctaattgcgtggctctggctatctatatcccgtttcccgaggacgatagcaacgccaccaattctaacctggaacgcgtagaatacctctttctgataatctttactgtggaagccttcctgaaggttatcgcttatggtttactgtttcatcctaacgcgtatctcagaaatggatggaatttactggacttcattatcgtcgtcgtcggactcttctccgccatcttggaacaggcgaccaaagccgacggcgcaaatgctctgggaggcaagggcgctgggttcgatgtgaaggcactccgggcttttcgagtcctcagacccttgaggttggtctccggcgtaccctcgttgcaggtcgtgttaaattctataattaaggccatggtacccctcttgcacatcgcactgctcgtattatttgtgataatcatttacgctatcataggtttggagctgttcatgggcaagatgcataagacgtgttataaccaggagggaattgccgatgtgccagcagaggacgatccctccccatgcgcccttgagaccggccatggccgacagtgccagaacgggaccgtctgcaaacccggatgggacgggccaaagcacggcattactaacttcgacaatttcgccttcgccatgctcaccgtgttccaatgtatcaccatggaggggtggactgatgtactgtactgggtaaacgacgccgttggcagagactggccctggatatacttcgtcacactgatcatcattggctcattcttcgtactgaatttggtgttgggtgtactttcaggagagttctccaaagagcgggaaaaggctaaggcgagaggggatttccagaaattgcgcgagaagcagcagctcgaggaagatctgaaagggtacctcgactggataacacaggctgaagacatcgatcctgagaacgaggacgaaggaatggatgaggaaaaacccaggaatatgtcaatgccaacttccgagacggaatccgttaacaccgaaaatgtagcgggaggggacatcgaaggggaaaattgtggagctcgcttagcccacagaattagcaagtccaagttcagcagatattggcggagatggaaccgcttctgccgtcgcaaatgcagagctgccgtgaagagcaacgttttttactggttggttatctttctggtttttctaaatactttgactatcgcgagcgaacattacaatcagccgaattggctgactgaggtccaggatactgcaaataaagccctattggctttgttcacagcagagatgctcctgaagatgtactccctgggtctgcaggcctacttcgtgtcactgttcaatagattcgactgcttcgttgtgtgtggtggcatactcgagaccattcttgtggaaaccaaaatcatgtcacctttaggtatctctgtcctgcgctgcgttagattgctaaggatcttcaagataacccgctattggaactctctctcaaaccttgttgcctccctgcttaacagtgtgaggtctattgcatcgttgttgttgctattgtttctgtttatcatcattttttccctgcttggtatgcagctgtttgggggaaagttcaacttcgacgaaatgcaaactcggcgaagtacgtttgacaatttcccccagtcgctgttgacggtctttcagattctgacgggcgaggactggaacagcgtgatgtacgatggcatcatggcctatggaggaccgtcctttccgggaatgttggtctgcatctatttcatcatccttttcatctgcggcaactatattctgctaaacgtgtttctcgccatagctgttgataatttggccgatgctgagagtcttacgtctgctcaaaaggaggaggaagaagagaaggagagaaagaagctcgcaaggactgccagccctgagaagaagcaggagcttgttgaaaagcctgcggttggtgagtctaaagaggaaaaaatagaactgaagtcgatcaccgccgacggggagtcgccacccgctaccaagatcaatatggacgatctgcaacccaatgaaaatgaggacaagagcccttaccctaatcccgagactactggcgaggaggatgaggaagagcctgagatgccagttggtcctcgcccacggcctctttccgaattgcacctgaaggaaaaggctgtgcccatgcccgaggcaagtgccttctttatattttcctcaaataatcgttttagattgcagtgtcaccggatcgtgaacgacactatttttaccaacctgatcctgttttttatactcctgtccagcatcagtctggcggctgaggatccggtccagcacacctcctttaggaatcatattttgttctacttcgatatagtgttcaccactatctttaccatcgaaattgcccttaagatgacggcgtatggcgcatttctgcacaaaggtagcttctgcaggaattatttcaacatcttggatttattggttgtttctgtgagcctgatctccttcggcattcagagtagcgctataaacgtggtcaagattctgcgagtcctccgcgtattgcgcccacttagagctatcaacagggccaaaggtctgaaacacgtggtgcagtgtgtgttcgtggccatccggaccatcgggaacatcgttatcgtgacaacgctattacagtttatgttcgcatgcatcggcgtgcaactattcaagggtaagctatacacctgttctgactcaagtaaacagacagaggctgaatgcaagggaaattatatcacatataaggacggagaagtcgaccaccccattatccagccaagaagctgggagaattcaaaattcgatttcgacaatgtgctggcagctatgatggccttgttcaccgtaagcacatttgaaggttggcccgaattgctttatcgaagtattgattcacacactgaagacaaagggcctatttataattaccgagttgagattagcatattcttcatcatctacatcattattatcgcttttttcatgatgaatatcttcgtcggctttgttattgtgacattccaggaacagggagagcaggagtataaaaattgtgagctcgataaaaatcaaagacagtgcgtagagtacgctctcaaagcacgccctttgcggcgttatatacctaagaatcagcatcagtataaggtgtggtacgtggtcaatagcacctactttgaatatctgatgtttgtactcatccttctgaacacgatttgcctggccatgcaacactacggccagagctgtctgttcaaaattgctatgaatatcttgaacatgttgtttacgggcctgttcacagttgaaatgattctgaaattaatcgcatttaaacccaagggctacttctccgatccctggaacgtgtttgactttctgatcgtgatcggctctataattgatgtaatactctctgaaacgaaccccgctgagcatactcagtgctctccctccatgaatgccgaagagaactcacgaattagtataacattttttcgcctgttccgtgtcatgcggcttgtcaaactgctaagtcgcggtgagggcatccggacccttctttggactttcattaagagcttccaggctttgccgtatgtggccctcctgatagtgatgctgtttttcatctacgccgtcattgggatgcaggtctttggcaagatcgccctgaacgatacaacggagatcaatcggaacaataactttcagaccttccctcaggctgttctccttcttttccgttgcgctaccggggaagcctggcaggatattatgttggcctgtatgcctggtaaaaagtgcgctcccgaatccgaaccaagcaactctacagaaggcgaaacaccttgcgggtcttctttcgcagtgttctacttcattagcttttacatgctgtgtgcatttctgatcattaacctttttgtcgcagtaatcatggataattttgactatctaactcgagattggtctatcctggggcctcaccacctagacgagttcaaacggatttgggcagagtatgatccagaggctaagggaagaatcaagcacctggatgtagtgaccctgctgcgcagaatccagccccctctcggcttcggcaaactttgtccccaccgtgttgcttgtaagcggctagtgagcatgaacatgcccctgaactcagatgggacagttatgttcaacgctactttgttcgccctagtgcggaccgctctccgcataaaaactgaggagggccctagtccatctgaggcacaccaaggcgctgaagatccttttcggcctgcgggaaacctagagcaggctaatgaggagttgcgagctatcattaaaaagatttggaagagaacaagtatgaaactgctggatcaggtcgttccacccgctggcgatgatgaagtgaccgttggaaaattttatgcaacgtttttaatccaggaatacttccgaaagtttaagaagcgaaaggaacaaggactcgtcggcaaaccctcccagaggaatgcgttgtccctccaggccggtctacgaaccttacatgacattggaccggaaattcgcagggccattagtggggacctcaccgcagaggaagagctggacaaagcaatgaaggaagcggtgtccgccgcaagcgaggacgatatcttccggcgtgctggcggattgtttggcaatcatgtgagttattaccagagcgatggtcggagcgcatttccacagacatttactactcaacgtccattgcacataaataaggctggcagttcccagggcgatacagagtctcctagccatgaaaagttggtggattcgactttcacaccctcctcgtattcctcaaccggaagcaacgccaatattaacaacgctaataacaccgcgctgggacgcctccctcgccctgcaggctacccgagcaccgtcagcaccgtggaaggacacggaccccctctctctcctgcgattcgagttcaggaggtcgcctggaagcttagttcaaaccgctgtcattcccgggaatctcaggccgcaatggccggtcaagaagaaacttcacaagacgaaacgtatgaggtgaagatgaaccacgataccgaggcatgcagcgagccaagcttgctgtctactgaaatgctttcctatcaagacgacgaaaatagacagttaaccctgcctgaagaagacaagcgggacatccgtcagtctccaaaacggggttttctcagaagtgccagtctgggtcgcagagcctcttttcacctagagtgcttgaagcggcagaaggatagaggtggcgacatctcacagaaaacagtgctgccactgcaccttgtccaccatcaggctctcgccgtagctggcctctctcctctccttcagagaagccattccccggcatcatttcccagaccctttgctactccccctgctacccccggttctcgcggatggccaccccagcctgtgcctactttacgcttggaaggcgttgagtcaagcgaaaagttgaattcatctttcccctctatacactgcggctcttgggccgagacaaccccaggcggtggcggaagttccgcggcacggagggtgcgaccagttagccttatggtgccctcacaggcaggcgcacccggtaggcagttccacgggtccgcctctagtcttgtggaagcagttcttatttctgagggtttgggccagtttgcacaggacccaaaatttatcgaggtcacgacacaggagttggccgacgcctgcgacatgaccatcgaagagatggaatccgccgcagacaacatactttccggcggtgctccacagtcaccgaacggcgcactgctgccgtttgtgaattgccgggatgcagggcaggacagggcaggaggagaggaagatgctggatgcgtgcgagcgagagggcgaccctctgaggaggaactgcaggattcccgggtctacgtatcttcacttta

SEQ ID NO: 216628 - DNA, 6629 bp, synthetic construct
  misc_feature 1..6629: note = Description of Artificial Sequence: Synthetic coding sequence
  source 1..6629: mol_type = other DNA
atggtaaacgagaatacccggatgtatataccggaagagaaccatcaggggtcgaactatggaagtcccaggcccgctcacgccaatatgaatgcaaacgctgccgctgggttggccccagagcacatccccactcccggagcagcgctctcctggcaggccgcaatagatgctgccagacaggcaaaacttatggggtctgctggaaatgcaacaattagcacagtctcgagcacccagcggaaacgacagcaatacgggaagcccaaaaagcagggatccacaactgccactcgacctcctcgggcactactgtgcttgacactcaagaatcctattcggcgagcctgcatttcgattgtggagtggaaaccgtttgagatcattattcttttgacgatatttgcaaactgtgtggccttggctatttatattcctttcccagaggatgatagcaatgcaaccaactctaatctcgagcgcgtagaatacctattcctgatcatttttacagtggaggccttccttaaagtaatcgcttatggcctgttgtttcacccaaatgcatatctgcgcaacgggtggaacctcctcgatttcattatcgtagtcgtcgggctcttttctgctatcttggagcaggccaccaaggccgacggggcaaatgccctcgggggaaaaggggctggctttgatgttaaggccctcagagctttcagggtgctgcgcccactgcgactagtctccggcgtcccatccctgcaggtagtccttaatagtattataaaagctatggtgccgctgctccacattgcgcttctcgtgctctttgtgatcattatatacgcaataatcggtctggagctgtttatggggaaaatgcacaaaacctgctacaatcaggaaggtatcgcagatgttcccgcagaggacgacccatctccgtgtgctctggagactggacacggaagacaatgccagaatgggaccgtgtgcaagccgggatgggacgggcctaagcatgggataacaaactttgacaacttcgctttcgctatgttgaccgtgtttcaatgcatcaccatggaggggtggactgatgtgctgtattggatgcaggatgccatgggctacgaactgccctgggtgtattttgtatctctggtgatcttcggctcgttctttgtcttgaacctagtgctgggcgtgctttcaggggaattcagtaaggaaagagagaaggccaaggccagaggtgactttcagaaactccgggagaagcagcagctggaggaagatttgaagggttacctagattggatcacccaagcagaggacattgaccctgaaaatgaggatgaaggaatggatgaggaaaaacccaggaacatgagcatgcccaccagtgagactgaatctgttaatactgaaaacgttgccggaggtgacattgagggtgagaactgtggagcacggttagcccacagaatctctaagtccaaattttcaagatattggagaagatggaaccggttctgcaggaggaagtgccgggcagcagtgaagtcaaacgtgttctattggttggtcatcttcctcgtatttcttaatactctgacaattgcctccgagcactataatcaaccgaactggcttaccgaagtacaagacaccgccaataaggccttacttgctctttttacagcggaaatgcttttgaaaatgtacagcctaggtctgcaggcatattttgtctcgctattcaataggtttgactgctttgtggtgtgtggagggattctagagacaatcctagtcgagacgaagattatgtcacctctcggaattagcgtgttgcggtgcgtcagactcctgcggatcttcaagattacaagatattggaactctttgagcaatctcgtggcttccctgctcaacagtgttaggtccatcgcgtccttgttattgctgctgtttctgttcattatcatcttctcactacttggcatgcagcttttcggaggcaaatttaacttcgacgaaatgcagactcgcaggagtacctttgacaacttcccccagtcattgctcacggtcttccagatactgaccggcgaggactggaacagcgtgatgtacgacggaattatggcttacggcggaccaagcttccccggaatgcttgtgtgtatatattttatcatcctattcatctgtgggaactatatcctcttaaatgtgttcctcgccatcgccgtggacaacctcgccgacgcggaatctttaaccagtgcccagaaggaagaagaggaagagaaggaaaggaaaaagctcgcccgaaccgcttctccagagaagaaacaagaattggtcgagaaacctgccgtaggtgagagcaaagaggagaagattgagctcaagagcatcacagccgacggagaatccccacccgcaactaagatcaacatggacgacctgcagcccaacgaaaacgaagacaaatctccatacccgaacccggagaccaccggcgaggaggacgaggaggagcccgaaatgcccgtcggccctcgacccaggcctttgagtgaactccacctcaaagagaaagctgtgcccatgccagaggctagcgcgtttttcatctttagctctaataatcggttcaggctacagtgccatcgaattgtgaatgataccatattcacgaatcttattctgttttttatattactcagttcaatctccttggctgcagaggacccagtgcaacatacttcttttcggaaccacatcctgttctactttgatattgtttttacaactatttttacaatcgaaatcgcgttgaagatgactgcatacggcgcttttctgcataaaggatctttttgtcggaactatttcaatattctggacttgttggttgtgagtgtatccctgatcagcttcggaattcagtccagcgcaatcaatgtcgtaaagattctgagagtactgagagtcctgcgtcccctgagagcaatcaaccgagccaaaggcctgaagcacgttgtccagtgcgtctttgtcgcaatcagaacaatcgggaatattgtgatcgttacgacgctcctgcagttcatgttcgcatgtatcggagtccagctctttaaaggtaaactctacacatgtagcgattcaagcaagcagacagaggctgagtgcaaaggtaattacataacttataaggacggggaggtggatcatccaataattcagcccagatcttgggaaaactccaaattcgactttgataatgtgttggccgctatgatggcactgttcacggtcagcactttcgaaggctggccggagcttctctataggtctattgattcccataccgaagacaaaggacccatctacaactatcgagtggagatcagtattttttttatcatctacatcatcatcatcgctttctttatgatgaacatatttgtcgggtttgtgatcgtgaccttccaggaacaaggtgagcaggagtataaaaattgtgaactggacaaaaaccagcgacaatgcgtcgaatatgctttgaaggctaggccgcttcggaggtatatacccaagaaccagcatcagtataaagtgtggtatgtggtcaattccacctatttcgaatacctgatgtttgtgctgatcctgttgaataccatctgcctggctatgcagcactatggtcagtcgtgtttattcaagatcgcaatgaatatcctaaacatgctgttcactggtctgtttaccgtcgagatgatcctgaaactgattgcatttaagcctaagggatacttttccgacccatggaatgtgttcgactttctcatcgtgattggctcgattatcgacgtcattttatcagagactaaccccgctgagcatacccagtgtagtccgagtatgaacgccgaagagaactcaagaatatcaatcaccttcttcaggctattcagggtgatgcgactggtgaaactgttgtcccgcggtgagggcattcgtacccttctctggactttcatcaaatctttccaggcactgccgtacgtcgctctgctcatcgttatgctctttttcatctacgcggttatcgggatgcaagtgtttgggaagatcgccctgaacgacacaaccgagattaatagaaacaataattttcagaccttccctcaggctgtgttgctcctcttcaggtgcgcaacaggtgaagcctggcaggacattatgcttgcctgtatgcctggcaagaaatgcgcccctgaaagtgagccttcaaacagcaccgagggagagactccttgcggatcgtccttcgccgtcttctattttatttccttctacatgctatgcgcttttctcatcattaatctgtttgttgcagttataatggacaactttgattacttgacaagagactggtcaatcctcggaccacatcacctcgacgagtttaagcggatatgggccgaatacgaccccgaggctaaaggacgcatcaaacatctggatgttgtcacactactgagacggatccaacctcctctgggcttcggtaaattatgtccccatcgggtcgcctgtaaacggcttgtgagtatgaacatgccattaaattcagacggcaccgtgatgtttaatgccacgctgtttgccctcgtgcggaccgctctcaggattaaaactgaggggaatttggaacaggccaatgaggaattgcgcgctattattaagaaaatctggaagcggacaagcatgaagctccttgaccaggtggttccgccagctggcgatgacgaggtgactgtcgggaagttttacgccacttttttgatccaggagtatttcaggaaattcaaaaaacggaaagaacagggcctggtcgggaagccatcccagcggaatgccctgtcactccaggctggcctgagaactctgcatgacattggacctgagatccgcagggctatctccggtgatttaacagccgaagaggagcttgataaggctatgaaggaagctgtgtctgctgcaagtgaagacgacatcttcaggagggcgggtggacttttcggcaaccatgtgagctattatcaaagcgacggtagaagtgccttcccccagacttttacaacacaaaggccattgcatataaacaaggctggctcgtcccaaggcgacaccgagtctcccagccatgaaaaactggttgactctacctttaccccatcaagctattcgtccaccggttctaacgccaacatcaacaatgcaaacaacaccgcccttgggaggctcccgaggccagcgggatacccctctactgtttcaaccgttgagggtcatggacctccgctttcccccgctattcgcgtgcaagaggtggcatggaagctttcatccaaccgtatgcattgctgcgacatgcttgatggcggaaccttccctccggctctaggtccaaggagagcccctccttgccttcatcagcagttgcagggtagcctggcgggactaagagaggatacgccctgtatagtgcccggtcacgccagtctttgctgttcatccagggtgggcgaatggctgcccgcaggctgtaccgcaccccaacacgcgagatgccacagcagagaatcacaagcagccatggcaggacaagaggagacgtcgcaagatgagacctatgaggtgaaaatgaatcacgatacagaagcctgtagcgagcctagcttgctgtccacagagatgctatcttaccaggatgacgagaaccgacaattaaccttgccggaggaggacaagagagacatacggcagagccctaagcgtggcttcctgaggagcgcttcacttggtagacgcgctagctttcacttggagtgcctcaaacgccaaaaggatcggggaggcgacataagccaaaagactgttttacctcttcacctggtgcaccaccaggctctggcagttgcgggattatcgccacttctgcagcggagccattcgcctgcctctttccccaggccttttgcgacccctccagccactcctggctctcgcggttggccgccacagcctgtccccacccttcgcttggagggggtcgaaagttctgagaaattgaatagcagcttcccaagcattcactgtggatcctgggccgaaacaacacctggcggtggaggatccagcgccgctcgccgtgtgaggcccgtcagcctcatggtgcctagccaggccggagcgcctggacgccagtttcacggttccgcctccagcttggtggaggcagtgctcatctctgagggtttgggccaatttgcgcaggacccgaaatttattgaggtgacaacccaagaacttgcggatgcctgcgatatgaccattgaggaaatggagtctgctgctgataatatactgagtggaggggctccacagagccctaatggagccctcttaccattcgttaattgccgtgatgccggtcaggatagagctgggggagaagaggacgcaggatgcgtgagagccaggggaagaccctctgaggaggaactgcaggacagccgggtgtacgtgtcgagcctcta

SEQ ID NO: 216629 - DNA, 3840 bp, synthetic construct
  misc_feature 1..3840: note = Description of Artificial Sequence: Synthetic coding sequence
  source 1..3840: mol_type = other DNA
atggtgaatgagaacacccgtatgtacattcccgaggaaaaccaccaagggagcaactatggcagtccaagaccagcacacgccaatatgaacgctaacgccgcagctggcctcgcaccagaacatatccctactcctggtgcagcccttagctggcaagccgctatcgatgcggctcgccaggcgaagctgatggggagtgctggtaatgccacaatcagtaccgtgtcctctactcagcggaagagacagcagtatggtaagccaaaaaaacaggggtctaccaccgcgacccgcccaccacgggcactgctttgtctaactctgaaaaaccctattaggagggcttgcatctctattgtcgaatggaaaccattcgaaatcatcattctgttaaccattttcgctaattgcgtggccctggctatatacatcccttttcccgaggacgatagtaacgctactaactctaatctggagagggtggagtaccttttcttaattatattcacagtcgaagcatttctcaaggttattgcgtacggcctgctattccatccgaacgcctatctgaggaacggttggaatttgctggatttcatcattgtcgtggtcggccttttcagtgccattctcgagcaggctactaaagcagatggagcaaacgctctggggggaaagggtgccggattcgacgtcaaagccctgcgcgcattccgagttctgcgcccactccggctggtttccggtgtgccatccctccaagtggtccttaactcaattattaaggcaatggtgccactacttcatatcgcccttctcgttctgttcgtgatcatcatctatgctatcatcgggttggagctgtttatgggtaaaatgcacaagacctgttataaccaagaggggatcgctgatgtgccagccgaggacgacccctctccatgtgctttggaaacgggtcatggacggcagtgccagaatggcacagtgtgtaaaccagggtgggatggtccaaagcacggaatcactaacttcgacaattttgctttcgccatgctgaccgttttccagtgtatcaccatggaggggtggaccgacgtgctatattgggtgaatgatgccgtcggcagggattggccttggatctatttcgtgactctgatcatcatcggaagctttttcgtcctcaatctggtgttgggagtgctctcaggggaattctccaaggaaagggagaaagccaaggctcgcggagacttccaaaaactccgagaaaagcaacagttagaggaggacttaaaaggatatctggactggatcacacaagctgaagatatagaccccgaaaacgaagatgaggggatggacgaagagaagcctcggaacatgtctatgcccacatccgaaaccgaatccgtgaataccgaaaatgtggccggaggagacatcgagggcgagaattgcggtgctcgattagctcatcgcatttctaagagtaagttcagccggtactggaggcgatggaataggttttgtaggaggaaatgccgagccgcagtgaagtctaacgttttctactggctggtgatctttctggtttttttgaacactctgacgattgcatctgagcactacaaccagcctaattggctcacagaggtccaggacacagcaaacaaggccctcctcgctttgttcacagccgaaatgctgctgaagatgtactcgttgggtctgcaggcgtattttgtttctctgtttaatagattcgactgttttgttgtttgcgggggaattctcgaaaccatcctcgttgagaccaaaatcatgtccccactggggataagcgttctgcgctgcgtgcgtctgctgcgtattttcaaaattactaggtactggaattctctaagtaatctcgttgcctctctgctaaatagtgtaaggagtatagcctctctgctgctactactctttctttttattataatttttagtctcctcggaatgcaactgtttggcggtaagtttaacttcgacgagatgcaaactaggcggagcacattcgacaatttcccacagagtctgcttacagtgttccagatcttgacaggtgaagactggaatagtgtgatgtacgatgggatcatggcgtacgggggtccgtcatttcccggtatgctggtttgcatttactttatcatcctgttcatatgcggaaattatattcttctgaatgtgttccttgctatcgccgtagataaccttgcggatgcagaaagcctgacaagcgcacagaaagaagaagaagaagagaaagaaaggaagaaattggcacgcactgcatcccctgaaaagaagcaagagctggtcgagaaaccggcagtgggagagtccaaggaagagaaaatcgaactgaaatccattaccgctgacggtgagagcccgcctgccaccaagatcaacatggatgatttacagcccaatgagaacgaggataagagcccgtaccctaaccctgagaccaccggggaagaagacgaggaggaaccagaaatgccagtcggccctcgacctagacccctgagtgagttacatttaaaagaaaaagcggttcctatgccggaggcgtctgcatttttcatctttagttccaacaatcgattcagactgcagtgtcaccggattgtcaacgatacaatcttcactaatctaatactgttctttatcttactctcctccatctcactggcagctgaggacccggttcagcataccagttttagaaatcacattctgggcaatgccgattacgtctttacttccatttttaccctggagatcatactgaaaatgacagcttatggcgcttttctgcacaaaggatccttttgccggaactactttaacattttagacctcctggtagtgtccgtgtcactcatctcattcggcatccagagtagcgcgatcaacgtggttaagatcctccgggtcctgcgcgtactccgcccactcagagcgattaaccgtgctaagggcctaaagcacgtggttcagtgtgtatttgtggcgatccggacaatcggaaatatcgtaatcgttactactcttctccagttcatgttcgcctgtatcggagtgcagcttttcaaagggaagctttacacatgctccgacagtagtaagcagacagaggcggaatgcaaaggcaattatatcacgtataaggatggagaagtcgaccatcccattatccagcccagatcttgggaaaactctaaatttgatttcgataatgtgctggccgctatgatggctcttttcaccgtcagcacttttgaagggtggccggagctgctgtacagatcaattgacagtcacaccgaagacaagggtcccatttacaactaccgggtcgagatctcgattttcttcattatttacataatcatcatcgccttcttcatgatgaacattttcgtagggtttgtcattgtcacattccaggaacaaggggaacaggagtacaagaattgcgaacttgacaaaaaccagcggcagtgcgtggagtacgccctgaaggcaaggccactccgcagatacatacccaagaaccagcaccagtacaaagtctggtacgtggtgaactctacatactttgagtacctcatgttcgttttgattctgctgaacaccatttgtctcgctatgcagcactacggccagtcctgcctcttcaagattgcaatgaatatcctcaatatgctgtttactggcttattcactgtggagatgatcctgaagcttattgcctttaagccgaaagtgggactttag

SEQ ID NO: 216630 - DNA, 6546 bp, synthetic construct
  misc_feature 1..6546: note = Description of Artificial Sequence: Synthetic coding sequence
  source 1..6546: mol_type = other DNA
atgatgatgatgatgatgatgaagaaaatgcagcatcagcgtcagcagcaagcagaccacgcgaacgaagccaactatgcgaggggtaccaggttgcccttgtcaggcgaaggacccacgtcacagcctaattcatcaaagcagactgtgctttcctggcaggccgcaatagacgcagccagacaggcaaaggcagcacaaaccatgtccacctccgcgccaccgcctgtcggcagcctgtcccagcggaaacgacagcagtatgctaaatcaaaaaagcaggggaatagcagcaatagcagacctgccagggccttgttttgtctgtccctcaataatcctatcagacgggcatgtatcagcatcgtggagtggaagcccttcgatattttcatcctattagccatttttgccaattgtgtggccctggcaatctacatccccttccccgaagacgactcaaattccacaaatcacaatctggaaaaagtggagtatgcatttctgatcatctttaccgtggagaccttcctgaagatcatcgcatatggcctcttgctgcatcctaatgcgtacgttagaaacggctggaatctgttagacttcgtgattgtgatagtcgggctcttcagcgtgatacttgaacagctgaccaaggagaccgaggggggaaatcacagttctggtaaatccggcggatttgatgtgaaggctcttcgagcctttcgcgtgctacgccctttgagacttgtcagcggtgtcccaagtttgcaggtcgtcttgaactctattatcaaggccatggtgccattgctccacatagccctgctggtgctttttgtcatcattatttacgccattataggcctagaattgttcatcggcaagatgcacaagacctgcttctttgctgactctgacattgtggccgaagaggaccccgctccttgtgctttttctgggaatggtcggcaatgtaccgctaacggaaccgagtgcaggagcggctgggtgggtcctaatgggggaattaccaactttgataattttgccttcgcaatgctgactgtcttccagtgtattaccatggaaggctggaccgatgtcttgtactgggtgaatgacgccattggttgggaatggccatgggtgtacttcgtgagcctgattatcctggggtccttcttcgtactgaatctcgtgctgggagttctgagcggagaattttcaaaagaacgggaaaaggcaaaggcaaggggagactttcaaaagctgagagaaaagcagcagttggaggaagacttgaaaggctacctagactggattacacaagctgaggacattgaccccgagaatgaagaagagggaggggaggaaggaaaaaggaatactagcatgcctacatctgagacagaaagcgtaaacacggaaaacgtaagcggggaaggagagaaccggggttgctgcggatccctgtggtgctggtggcgacgccgtggagccgcaaaggccggaccctccggttgccgcagatggggacaggctattagcaaatcaaaattgtccaggaggtggaggcgatggaacaggttcaaccgacgccgttgtagggcagctgtcaagtctgtcacgttctactggctggtcattgtgctggttttcctcaataccctcacaattagtagcgaacactacaatcagcccgattggcttacacagattcaggacatcgctaacaaggtgctgctggctctgttcacctgcgaaatgctggtcaagatgtacagcctgggcctgcaggcttatttcgtgagcttgttcaatcgattcgattgctttgtagtttgtggaggtattacagagaccatcttggtggagctggaaattatgagtccgttgggaatatctgtgttcagatgcgtaagactgttgcgcatcttcaaggtgactcgtcactggacgtcactctcgaacctggtcgcaagcttattgaactccatgaagtccattgcgtcattgctactgctgctcttcttgttcattatcatcttctcactcttaggcatgcaactgtttgggggaaagtttaattttgatgaaacccagacaaagaggtctacatttgacaactttcctcaagccttgttaactgtgttccaaattctgacaggcgaggattggaatgccgtgatgtacgatggtatcatggcatatgggggaccatcctcgagcggcatgatagtgtgcatatacttcattatcctcttcatttgtgggaactacattctcctgaatgtgtttctagcaatcgccgtcgataacctagcagacgcggaaagtttgaacacggctcaaaaggaggaggccgaagaaaaagaacggaaaaagatcgcccgaaaagagagcctggaaaataagaagaataataagcccgaggtcaaccaaattgccaactcagacaacaaggtcacaatcgatgactatagggaggaagacgaggacaaggacccttatccgccttgtgacgtgcctgtgggtgaggaggaagaggaagaagaggaagatgagcctgaagtgccagcagggcctaggccccgacggatctctgagctgaacatgaaggagaagatcgccccaatccctgaagggagcgccttttttattctcagtaaaacaaaccctatcagagtgggctgtcacaagcttatcaatcaccacattttcaccaacctgattttggtatttatcatgctgtccagcgctgcgctcgctgccgaagatcctatcaggtctcatagctttcggaacacgatccttggctatttcgactacgccttcaccgctattttcacagtggaaattctgttgaagatgaccacattcggggcattcctgcataagggggctttttgccggaactacttcaacctactcgacatgctggttgttggggtgtctctggtgtcgtttggcattcagtctagcgccattagcgtggtgaaaattctgagagtgcttcgggtcctgagacctctgcgggctattaatagggccaagggtctgaagcacgtggttcagtgcgttttcgtggccattcggacaatcggaaacataatgattgtaaccacgctgctccagttcatgttcgcctgcatcggagtgcaactgtttaaaggtaaattttataggtgcaccgacgaagcgaagtccaacccggaggaatgtaggggcctgtttattctgtataaagatggcgacgtcgattctcctgtcgtccgcgaacgtatatggcagaattcagattttaactttgacaatgttctgtcggccatgatggccctgttcaccgtgtcaacttttgaggggtggccggctctgttatataaggcaattgattccaatggtgaaaacattgggcctatatacaaccatcgggtcgaaatctcaatctttttcattatatacatcattatcgtcgctttttttatgatgaacatcttcgtgggtttcgtgatcgttaccttccaggagcaaggagagaaagagtacaagaactgtgaactcgacaaaaaccaacgccagtgtgttgagtatgccctgaaggcgagacctcttaggagatacattcctaagaatccgtatcagtacaaattctggtatgtggtcaatagcagtccatttgaatatatgatgtttgtgcttattatgctgaacacattatgtctagctatgcagcactacgaacagtctaagatgttcaatgacgctatggacatcctcaatatggttttcaccggcgtgtttacagtcgaaatggtcctgaaggttatcgcttttaagcctaaggggtacttcagtgacgcctggaacactttcgacagcctgatagtaatcggatcaattattgatgtcgctctgtcagaggcggatccaactgaatcagagaatgtgccagtccctacggcaactcccggtaactctgaagaatcgaaccggatttctatcacatttttccgcctgtttagggttatgaggctcgttaagctgttgagcagaggcgaggggatcaggactctgctctggaccttcatcaagtcatttcaggcgctgccgtacgtggcgctgctgatcgccatgctcttttttatctacgcggtgattggcatgcagatgttcggcaaggtcgctatgagggacaacaaccagataaatcggaataataatttccagacgttcccgcaggccgtgctgctgttgttccggtgcgccacaggtgaagcatggcaggagatcatgttggcatgtctccctggcaagctctgcgatccagaatccgattacaatcccggtgaagaatatacatgtggatctaacttcgccatagtgtacttcatatctttctacatgctctgtgcattcctcatcattaatttgtttgtagccgtgatcatggacaactttgactacctgaccagagactggtcaattctgggccctcatcacctcgacgagtttaaacgcatatggtccgaatatgacccagaagctaaaggcaggatcaagcacttagatgttgtcacccttctgagaagaatccagccaccattggggtttggaaaactttgcccacatagggtggcttgcaaaagactggtagcaatgaacatgcccctgaatagcgatggtacagttatgttcaacgcaacactatttgctctcgtgcggacagccctgaaaatcaaaacagagggcaatctcgagcaagccaatgaggagctccgagccgttattaaaaagatttggaagaagacctctatgaagctcctggatcaggtggtcccgcctgccggagacgatgaagtcacggtcggaaagttttatgctacttttcttatccaggactattttcggaaatttaaaaagaggaaagagcagggtctggtgggcaagtatccagcaaaaaacacaacaattgccctgcaggccggactgcgcactctgcatgacattggtccagagatccgcagagccatcagctgcgacctgcaggatgatgagcccgaagaaacgaagcgggaagaagaagatgacgtgttcaaaagaaatggcgcactcttggggaaccacgtaaaccacgtcaactcggaccggagagattcgctgcagcaaacaaacactacgcacaggccacttcacgtacagagacctagcatacctcctgccagcgacactgaaaaacctttgttcccacctgctggcaacagtgtgtgccacaatcaccataaccacaacagtataggcaagcaggtgccgaccagcaccaatgcgaacttgaacaatgcaaacatgtctaaggccgctcatggtaagcggccatccattggaaatctggaacacgtttctgagaacggccatcactccagccacaagcacgaccgagagccccaaaggcgttcaagtgtgaaaagaacacgctattacgaaacatatattagatccgattcgggcgatgaacaactaccaaccatatgccgcgaggaccccgaaatccatgggtacttccgcgacccacactgtctgggcgaacaggagtacttcagtagcgaggagtgctacgaggatgatagttccccaacttggtcccggcagaattatggctactacagcagatacccaggtcgcaacatcgacagcgagagacctcggggatatcatcatccacaaggatttctggaggacgatgattcccccgtttgttatgattctaggcgctcacctcggcgaagactcctgccccctacccctgcttcgcaccgccgatccagttttaactttgagtgcctacgtcgtcagtctagtcaggaagaagtgccatcttcccccatttttccacatagaactgccctgccacttcacttaatgcagcaacagatcatggccgtggcgggtcttgatagcagcaaggcccagaaatattccccctcacatagtaccaggagctgggccaccccccctgcaacacccccataccgcgactggaccccctgttacactccacttatccaggtggagcaaagcgaagcgctggatcaggtgaatggatccctccctagtctgcacagaagttcctggtacactgacgagcccgacatatcatatcgtactttcacacctgcttccctaacagtgccctcctctttcagaaataaaaatagcgataaacagcggtcagccgactccctggtggaggccgttttgatcagcgagggcctcggcagatacgcgagagatccaaagttcgtcagcgccacaaaacacgagatagctgacgcctgtgacctgaccatcgatgaaatggagagcgcagcctccactctcttaaatggtaacgtgagacctcgtgccaacggcgacgtgggccctctgagccatcgccaggattatgagctgcaggacttcggaccaggttattccgatgaggagcctgaccctggtagggacgaggaggacctggctgacgagatgatatgtattacaaccttgtac

SEQ ID NO: 216631 - DNA, 6485 bp, synthetic construct
  misc_feature 1..6485: note = Description of Artificial Sequence: Synthetic coding sequence
  source 1..6485: mol_type = other DNA
atgatgatgatgatgatgatgaagaagatgcagcaccagcgccaacaacaggcggatcatgcgaatgaggccaactacgcacgcggaactcgtctcccactgagcggcgaaggacccacttcacagccaaattctagcaaacagactgtgctctcctggcaggccgctattgacgctgccagacaagccaaggccgcacagaccatgagcaccagtgctcctccccctgtaggttctctctcgcaaagaaagcggcaacagtacgccaaatcaaaaaagcaaggtaatagctcaaattctcggccagcaagagccctgttttgtctttcactgaataatcctattcggagagcttgcatttcaattgtcgaatggaaaccatttgatatctttatcctgcttgccatctttgccaactgcgtggccttagcaatctatatcccattcccagaagatgacagcaatagcactaaccacaatctcgagaaagtcgagtatgctttccttattatttttacagttgagacctttctcaagatcatagcctatggcctgctgctgcaccccaatgcttacgtgcgcaacggctggaacctgttagattttgtcatcgttatcgtgggactgttttccgtgatactggagcagctgaccaaggagaccgaagggggtaatcattccagtggcaagtccgggggattcgatgtcaaagccctgcgcgctttccgggtgctccggcctcttaggctggtcagcggcgtcccatctctgcaggtggtcctgaatagtatcatcaaagcaatggtgcctctgttgcacatcgcactgttagttctcttcgtgattatcatttatgccataatcgggttggagcttttcatcggaaaaatgcacaagacttgtttctttgcggacagtgatatcgtggcagaggaagaccccgctccctgtgcattctccgggaatggcagacagtgcacagccaacggcactgagtgccgaagcggctgggttgggccaaacgggggaattacaaacttcgataacttcgccttcgcaatgttaacagttttccagtgtatcacaatggagggctggaccgatgttctgtactggatgaacgatgcgatgggctttgagttgccctgggtttacttcgtgtctttggtgattttcgggagtttcttcgtgcttaacttggtgctgggggtgttatctggggaatttagcaaagagcgcgagaaggctaaggccaggggtgatttccagaaattgcgcgaaaaacagcagctcgaagaagacctcaagggttatctagattggataacccaggctgaggatattgacccagaaaacgaagaggagggcggagaagaagggaagcgcaacacctcgatgcctacctccgagactgaaagtgtcaataccgagaatgtctctggggaaggagaaaataggggctgttgcggaagcctgtgccaggctattagtaagtccaagctttccagaaggtggagacgttggaacaggtttaacagacgcaggtgcagagccgcagtgaaatccgtgaccttttactggctcgtaatagtgctcgttttcctgaacactctgacgatctcatctgagcattataatcagccagattggctcacccagattcaggatattgccaacaaagtcctgctggccctttttacctgcgagatgttggtgaagatgtattcgctcggcttgcaggcatactttgtgtccctgtttaatagatttgactgttttgtagtctgtggaggaataaccgagacgattctggtagagctcgaaataatgagcccgctcgggatttctgtgttccggtgtgtcaggctgctgcgaatctttaaggtaacaagacactggaccagcttgtctaacctcgtggcatcactgctcaactctatgaagtctatagcctccctgctgctcttactcttcttgttcatcattatcttttcactcctgggtatgcagctgtttgggggaaagtttaacttcgacgagacccaaaccaagagatctacattcgacaactttccccaggctcttctgaccgtttttcagatcttaaccggagaggactggaacgccgtcatgtacgacggaatcatggcttatggaggtccgtcctccagcggtatgattgtctgcatttacttcatcatactgtttatttgtgggaactatattcttctgaatgtgttcttagccattgcggtcgacaacctggctgacgcggaatcacttaacacagcccagaaggaagaagccgaggaaaaggagaggaagaaaatcgcacgcaaagagtcacttgaaaataagaagaacaataagcctgaggtcaaccagattgctaactcagacaacaaagtgacaatcgacgactatagagaggaggacgaggacaaggatccctatcctccctgtgacgtgcctgtgggggaggaggaggaggaggaggaggaggacgagcctgaagtgcctgcaggtccccgacccagacgaatcagcgaattaaatatgaaagaaaaaatcgctccgattcctgaaggaagcgcctttttcatcttatctaaaactaatcccatccgcgttggatgccataagcttataaaccatcatatttttacgaacctcatactggttttcattatgctttcctctgcagccttagctgctgaagaccccattcgcagtcattctttccgtaacaccatcctgggatattttgattatgccttcaccgctattttcactgtcgaaatcctactgaaaatgaccacttttggcgcattcttacacaaaggcgcattttgcaggaactacttcaaccttctggacatgctggtcgtaggggtctctctagtgtcctttggcatccaatccagtgcaatttctgtggtgaagatccttcgcgtgctgcgagtactgcggccactgagagcgattaatagggcaaaggggctgaagcatgtcgtgcagtgcgtgttcgtggctatcagaaccattggtaatattatgatagtaacaactctgctgcagttcatgttcgcatgtatcggtgttcagctcttcaaaggcaaattttacagatgcactgatgaggcaaaatcaaatccagaggagtgccgcggactgtttatcttgtataaggacggtgacgttgacagtcctgtagtccgcgaacgaatctggcagaatagcgacttcaacttcgataacgtcctgagcgcgatgatggccctgtttactgtttccacctttgaaggttggcctgccctgctgtacaaagcgattgactccaacggggaaaatatcggtcctatttacaatcaccgtgttgagattagtattttcttcataatctacattatcattgtggcgttcttcatgatgaatatttttgtcggttttgtgatcgtgacgttccaggagcagggagagaaagaatacaagaactgcgagttggacaagaaccagaggcagtgcgtggaatatgccctgaaggctaggcctctgcgtcgctatatccccaaaaatccctaccagtacaaattctggtatgtcgtgaactccagccctttcgaatatatgatgtttgtgcttatcatgctgaacactctatgtttggcgatgcagcactacgaacagtcaaaaatgtttaatgatgcaatggatattttgaatatggtgttcactggcgtgttcaccgtagaaatggtgcttaaggtgatcgcattcaagcctaagggatacttctcagacgcctggaacacatttgactcactcatcgtgattggctcgataatcgacgtggctctcagcgaagccgaccctactgaaagtgaaaacgtgcccgtcccaactgcaaccccagggaactctgaggagtcaaatcggatttctatcaccttttttcgtctctttcgcgtcatgaggcttgttaagttgctgtcacgaggcgagggaatccgtacattattatggaccttcattaagtcttttcaagcgctcccatacgtggccctccttatagcgatgctttttttcatttacgccgttatcggaatgcagatgtttggcaaggttgctatgagggacaataatcagataaataggaacaataacttccagacatttccccaggcagtgttgctcctatttagatgtgccaccggcgaagcatggcaggaaatcatgctggcgtgccttcctgggaagctgtgtgaccctgaatctgattacaacccaggggaagagtatacttgcggaagcaacttcgctattgtttactttattagtttttacatgctctgcgcattcctgatcatcaacctcttcgttgctgtcataatggataatttcgattacctgacccgggattggagcatcctcgggccacatcatctagatgaatttaagcgaatttggagtgaatatgacccagaggccaaggggagaatcaagcatctggatgtcgttaccttgttgagacgcattcaaccacccctgggatttggtaagctttgccctcatcgggtggcatgcaaacgcttggtcgcaatgaatatgcccctcaacagcgacggcaccgttatgtttaatgcaaccctgtttgctctggtcagaactgcactgaaaattaagaccgaaggcaatctcgaacaggccaacgaagagctaagagcagttattaagaagatatggaaaaaaacgagcatgaagttgcttgatcaggtcgtgccacctgccggtgacgatgaagtcacggtcggaaagttctacgctaccttcctcatccaggactactttcggaagttcaagaaacggaaagaacagggtctggtcggaaaatatccagccaaaaacaccactattgctttacaagctggcctgcgcacgctacatgacataggccctgagattagacgggcaattagctgtgacctgcaagatgacgaacctgaggagaccaaacgtgaggaggaggatgacgtcttcaaacgcaacggcgctctcctgggcaatcatgtaaatcacgtgaactccgatagacgtgatagtttacagcaaaccaatacaacccaccggccacttcacgtccaaaggccttcgatccctccagcttctgatactgaaaagcctttgtttccaccagccggtaactctgtgtgccacaaccatcacaatcacaattccattggaaagcaggtgccaacctcgactaacgctaatcttaataacgcaaatatgtctaaggccgctcatgggaagcgcccttctataggtaacttggagcacgtctctgagaatgggcatcatagttctcataaacacgaccgcgaaccccaacggcgaagtagtgtcaaaagaacacggtattacgagacgtacatccgctctgacagcggcgacgaacaattgcccactatatgcagggaagaccctgaaatccacgggtacttccgggacccccattgcctaggagaacaagagtattttagcagtgaagagtgttatgaggacgactcatctcccacctggtctcgacagaattacggttattattctcgctacccaggcaggaacattgactccgaaagacctcggggttaccatcacccacaggggttcctggaggatgatgattcccctgtgtgctacgattcccgccgatcccccagaagacggctgctccccccaacacctgccagccaccgtcggtcgagtttcaacttcgagtgtctcagaagacaatccagtcaggaggaggtgccttcttcaccaattttcccacaccggacagcgctgcctctccatttaatgcaacagcagattatggcagtggccggtctggatagcagtaaagcccaaaaatattctccgtcacacagcactcggagttgggccacccccccagctacccctccatacagggactggacaccatgctacactcccctcatccaagttgaacaatcagaggccttggaccaggtcaacggttcactccctagcttacaccgaagttcctggtatacggacgagcccgatatcagctaccgtaccttcactcccgcttcccttacggtcccctcgtctttcagaaataaaaattccgacaagcagcggagcgccgacagcctggtggaagccgtgttgatttctgagggtctgggtaggtatgccagggatccaaagttcgtgtcagctacgaagcacgaaatcgctgacgcttgcgatctgaccatagacgagatggagtccgccgcaagtactctcctgaatgggaacgtccggccacgcgcaaatggcgatgtgggacccctgtcccaccggcaggactacgagttgcaggatttcgggcctggttattctgatgaggagcctgatccaggacgggacgaggaggacctggctgatgagatgatttgtattaccaccctata

SEQ ID NO: 216632 - DNA, 6413 bp, synthetic construct
  misc_feature 1..6413: note = Description of Artificial Sequence: Synthetic coding sequence
  source 1..6413: mol_type = other DNA
atgatgatgatgatgatgatgaaaaaaatgcagcatcagcggcaacagcaggccgaccacgccaatgaggcaaactacgctagaggaacccgattgcccttgtccggggagggccctaccagtcaacccaattccagcaagcagactgtgctgtcttggcaagcagcaattgatgctgctaggcaggccaaagccgctcaaactatgagtaccagcgcaccaccacccgtgggcagcctctcgcaacgcaagaggcagcagtacgcgaaaagtaaaaaacaggggaactccagtaattccaggcccgcacgtgccctattttgcttaagccttaataatcccatccgaagggcctgtattagcatagtggagtggaaaccttttgacatcttcatcttgcttgcaatattcgcaaattgtgtcgctctcgcaatctatataccattccccgaggatgactcaaactctaccaatcataacctcgagaaggttgagtacgcattcctaattatcttcaccgttgagacatttctgaagataattgcatatggactgttgctccaccccaacgcttacgtgcgcaacgggtggaacctcctggactttgtcattgtcatcgtgggccttttttcggtaatattggaacagcttacaaaagagacggaagggggaaaccattcgtcgggcaaaagcggcggatttgatgtcaaggcgctgcgcgcttttagagtgctgcgacccttacgattagtgagtggtgtaccatccctgcaggtggtcctgaactccatcattaaggctatggtccccctccttcacattgccctcctggtgctctttgtgatcattatctatgctattatcggcctcgagctattcataggaaaaatgcataagacgtgcttctttgccgactcagatatcgtggcggaggaggacccagccccatgcgcctttagcggaaacggcagacagtgcactgcaaatgggacggaatgcaggtcgggctgggttggccctaatgggggtatcaccaacttcgataacttcgcatttgccatgctcactgtcttccagtgtatcaccatggaaggttggaccgatgttctgtattggatgaatgacgccatggggtttgagctgccgtgggtgtatttcgtcagcctggtgatatttggctccttttttgtgctcaacctggtcctgggggtgctgtcaggggagttcagcaaagaacgagagaaggcgaaagccaggggagattttcaaaaactgcgggagaagcagcagctggaagaggatctgaagggctatctagactggataacccaggccgaagatattgacccagagaacgaagaagagggaggagaagaaggaaagcggaatacaagtatgccaacgagtgaaacggagtccgtcaacactgagaatgtgagcggagagggagaaaatagaggttgttgcgggagcttgtgccaggccatctccaagtccaagctgagcaggaggtggagaagatggaacaggtttaaccgcagacgctgccgggctgccgttaagtcggtgacattttactggttagttattgtcctcgtgtttctcaacactcttaccatctcatctgaacactacaaccaaccagattggctaactcagattcaggacattgctaataaggtcctcctggcactgttcacttgtgagatgttggtgaagatgtacagtttggggctgcaggcctattttgtctccttgtttaatagatttgactgttttgtggtctgtggcggaatcactgaaaccatactcgttgaactggagataatgagccccttgggcatatccgtatttcggtgtgtgcggcttctacgcatcttcaaagtgacaaggcattggaccagcctgagtaaccttgtggcttcacttttaaactctatgaagtctatcgcttcactgctgctgttactgttccttttcatcataattttctccctactgggtatgcaactgtttggcggaaagtttaattttgatgagactcaaaccaagcgcagcacatttgataatttcccacaggctttgctgacagtgtttcagatcctaactggagaggattggaacgctgtcatgtacgatggcataatggcttacgggggtccttctagctccggcatgatcgtctgcatatatttcattatcctgttcatctgtgggaactatatcctgttgaacgtctttctggctatagccgtagacaacttggccgatgctgagagcctcaatactgcccagaaggaggaagctgaggagaaggagagaaaaaagattgctcgtaaggagtccttggaaaacaagaaaaacaataaacctgaagtgaaccagattgcgaactcagataacaaggtgacaattgacgattatagggaagaggacgaagacaaagatccctatcccccttgcgacgttccagttggagaggaggaagaggaggaagaggaggatgagcctgaggttcccgctgggcctaggccccgaaggatcagcgaacttaacatgaaagagaagattgcaccaatcccagaaggatcagctttttttattttaagcaagacaaacccaatcagggtgggatgtcacaagctgatcaatcaccatatctttaccaaccttattctagtatttatcatgctctcatcagctgccctcgcagcggaggaccctatccgatctcattccttcagaaatactatcttgggttattttgactacgctttcactgctatatttactgttgagatactactgaaaatgactacattcggcgctttcctgcacaagggtgccttctgcaggaactattttaacttgcttgacatgttagttgtgggtgtaagtcttgtgagtttcggtatccagagcagtgcaatctcggtggtcaaaatcctccgcgtcctgagagtcctccgtcccctgcgcgctatcaatcgggctaaaggtctgaaacacgtggtccaatgcgtattcgtggccattcgcacaatcggtaacatcatgattgtcacaaccctcctacagtttatgtttgcctgcatcggggttcaattgttcaagggtaagttttaccgctgcactgatgaggctaaatctaaccctgaggagtgccgaggcttgtttatcttatacaaggatggcgacgtcgactccccagtggtccgcgagagaatttggcagaactcggattttaacttcgacaacgtattaagcgcaatgatggcattattcacagttagcactttcgagggatggcccgcactgttatataaggcgattgacagcaatggagaaaatatcggtcccatttacaaccatagggtagaaattagcattttttttataatctacatcatcattgtcgcatttttcatgatgaatatcttcgttgggttcgtgatcgtgacgtttcaggagcagggcgagaaggaatacaaaaattgtgaactcgacaaaaaccagcggcagtgtgttgaatacgcgctgaaggcaagaccactccgtcgttacatccccaaaaatccttaccagtacaaattctggtacgtagttaactcatctcctttcgagtatatgatgtttgtcctgatcatgctgaacaccctgtgcctggcgatgcagcactatgagcagagcaaaatgtttaatgatgctatggacatcttgaatatggtgtttacgggtgtctttactgtcgagatggtgctcaaagtgattgcttttaaacctaaaggatacttctccgatgcctggaatacgtttgatagcctgatagtgatcgggtctatcatagacgtcgccctgtctgaggcagacaatagtgaagagagtaaccgaatttccattacgtttttcaggctgttcagggtgatgaggctggtgaaactactctcaaggggggagggcattcggacattgttgtggacctttattaagagcttccaagcgctgccctacgtagctttgttgattgccatgctcttctttatctacgcagtgattggtatgcagatgtttggcaaagttgctatgcgcgacaacaaccagatcaaccgcaacaataacttccagacgttccctcaggccgtacttctgctgtttcggtgcgctaccggggaagcatggcaggagattatgctggcatgtctgcccggaaaactctgcgatcccgaatcagattacaatccaggggaggagtatacctgtggctcaaactttgccattgtctacttcataagtttttacatgttatgcgcctttctgattatcaatctgttcgtggccgtcatcatggataacttcgattatctgacccgggactggagcattctgggtccccaccacctggacgagtttaagcggatttggagcgaatatgatccagaagcaaagggtcgcatcaaacacttagacgtggtcacattactgcgaagaattcaacctcccctgggttttggcaagctgtgcccccatcgcgtagcctgcaaacgcctcgtagccatgaatatgccactgaacagcgatggaaccgtcatgtttaatgctacgctctttgctcttgtgagaacggccctgaagataaagacagaaggtaacttagagcaggctaatgaggagctgcgggctgttattaagaagatttggaagaagacaagtatgaagctcctcgatcaggtggtaccaccagcaggggacgacgaggttaccgtgggaaaattctatgcaacttttctcatccaagactatttccgcaaattcaagaaaaggaaagagcaaggactcgtggggaagtaccctgccaaaaataccaccatagccttgcaggctggactcagaacactccacgatatcggccctgaaataagacgggcaatttcctgtgatctccaggacgatgaacccgaggagaccaagagggaagaagaagacgatgtcttcaagcgtaacggggctttgctcggcaatcatgtgaatcatgttaattcagacagacgggacagtctgcagcagacaaacacaacacacagacctcttcatgtgcagaggccctctatcccgcctgccagcgataccgagaaacccctgttcccaccagccggaaactccgtgtgccataatcaccacaaccataactccatcggtaagcaggtgccgacatctaccaatgcaaatctcaacaatgcaaatatgtcaaaggcagcccatggaaagcgccctagcatcggtaatctagaacacgtgtctgagaacggccatcacagcagtcataagcacgacagggagccccagaggaggagttctgtcaaacggtcagattctggcgacgagcaactgccgacaatctgccgcgaagacccagagattcacgggtacttcagggacccacactgcctgggtgaacaggagtacttctcttccgaagaatgctatgaggacgacagctctccaacatggagtcgccaaaactatggctattacagccgatatccaggcaggaatatcgattcagagcggcctagaggctatcatcacccccaggggttcctcgaagacgatgacagtccagtgtgctatgacagccgtcggtcacccagacggagactgttacccccaacccctgcttcccaccgcagatcgtcgtttaacttcgagtgtctgcgcaggcagtcttctcaggaggaagttccatcttcccccatatttccacatcgaacagcacttcctctacacttgatgcagcagcagatcatggcagtcgcgggactggactcttcaaaggctcagaaatattccccctctcattcaacacgttcctgggccacgccacctgcaacaccaccctaccgagactggaccccatgctacactccactgatccaggtggagcagagcgaggcacttgatcaggtaaatgggtctctgccaagtctgcaccggagcagctggtataccgatgaacccgatatctcatatagaacctttaccccggctagcctcacggtgccctccagctttcgtaataagaatagtgataagcagcggagcgctgacagcctcgtcgaagcagttctcatttccgagggcctggggaggtacgcccgtgaccctaagtttgtgagcgcaactaagcacgagatcgcggacgcatgcgacctgacgatcgatgagatggaatcagcagccagcaccttactgaatggcaatgttcggcctcgggctaacggggacgttgggcctctatcccaccgacaggattacgaactccaggattttggacccggatactcagacgaagaacctgaccctgggagagatgaagaggatcttgctgacgagatgatttgtatcactaccctata

SEQ ID NO: 216633 - DNA, 5564 bp, synthetic construct
  misc_feature 1..5564: note = Description of Artificial Sequence: Synthetic coding sequence
  source 1..5564: mol_type = other DNA
gccaacggcaccgaatgtcggagcggctgggttggacctaatgggggaatcactaacttcgacaactttgcctttgcaatgctgaccgtgtttcaatgcattacaatggaggggtggaccgacgtgctttactggatgaacgatgcgatggggttcgaactcccttgggtctactttgtctcgctggtgatttttggctcatttttcgtgctgaacctcgtgcttggcgtcctgtcaggcgagtttagcaaagagcgggaaaaggccaaagctagaggtgatttccagaagttaagggagaagcagcagttagaagaggacttgaagggctatttagactggatcacgcaggccgaggacatcgaccccgagaatgaggaggagggcggagaagaggggaaaaggaacacctcaatgccaacaagcgagaccgagtccgtgaacacagagaacgtgtccggggaaggggagaaccggggatgctgtgggagcctctggtgttggtggcggaggagaggagctgcgaaggctggccctagcggatgtcgaaggtggggccaagccatctccaaatcaaaactatcgcgcagatggcgaaggtggaatcggttcaaccgtcgaagatgccgggcagcagtgaaatccgttacattttactggttagtgatcgtgcttgtgttcctgaatactcttactatctcaagcgaacactataatcagccagattggcttacccaaattcaggacatcgctaacaaggtattgcttgcactcttcacctgtgaaatgctggttaaaatgtatagtctcggattacaggcctatttcgtgtcactgtttaatcgcttcgattgcttcgtcgtatgcggtggaatcacagagacaattctagttgagcttgagattatgtcccccctgggcataagcgtattcagatgtgtcaggctgttgcggatttttaaggtgacacgccactggactagcctatccaaccttgtggcctctcttctgaactccatgaagtcgatcgctagcctgctacttctgctcttcttattcatcatcatttttagtttgctgggcatgcaactgttcgggggtaagtttaatttcgatgagacccaaaccaaacgctccaccttcgataatttcccccaggctctactgacagtgttccagattttaactggcgaggattggaacgctgttatgtatgacggtattatggcttacggcggacctagcagtagcggcatgatcgtgtgcatctacttcattattctcttcatctgcggtaactatatattgctgaatgtgttcctggcaattgctgtcgacaacctggccgatgctgagagcctgaatactgcccaaaaggaagaagcagaagagaaagagcgaaagaaaattgcccgtaaggaatccttggagaacaagaagaacaataagccagaagtcaaccagatcgccaattctgacaacaaagtcactatcgatgattatcgcgaagaggacgaggacaaggacccatatccaccttgcgacgttcccgtgggagaggaagaagaggaagaagaggaagatgagcccgaagtgcccgcaggccctaggcctaggcgcattagtgaactcaacatgaaggaaaagatcgctcccattcctgagggcagtgccttcttcattctctccaagactaacccaattagggtgggatgtcataagcttatcaatcatcacatattcactaacctaattctcgtgttcattatgctgagtagcgctgcactggcggcagaagacccgattaggtcacatagctttaggaataccattctgggctacttcgattacgcctttacagccatttttaccgtggagatcctgctgaagatgaccacatttggcgcatttttgcataaaggcgcattctgccggaattattttaacctgctggatatgctggtcgttggagtttcactggtgtctttcggcattcaatccagcgcgatttccgtagtgaagatcttaagggtcctcagggtcctgagacctctcagagccatcaaccgcgctaaggggctgaaacatgtcgtgcagtgtgtgttcgtggccataagaactataggcaacatcatgatcgtaactactctgctgcagttcatgtttgcatgtatcggggttcagttatttaagggaaagttttaccgctgcacagatgaggccaaatcaaaccccgaggagtgcaggggactctttatcctctacaaagatggggatgtggactcaccagtcgtgagagagcgcatttggcagaatagcgacttcaacttcgataatgtcttgagcgcaatgatggctctgttcactgtgagtactttcgagggttggcccgctctcctttataaggccatcgacagtaacggcgagaacattggacccatctacaatcacagggtggagatcagcattttcttcatcatatatattattattgttgcgtttttcatgatgaatatctttgtgggcttcgttatcgtcacattccaggagcagggcgagaaggagtataagaattgcgaactggacaagaatcagcgccagtgcgttgaatacgcccttaaagctcggccactgagacgctacattcctaagaatccctatcaatataaattctggtatgtggttaactccagtcccttcgagtatatgatgtttgtgttgatcatgctgaataccttgtgtcttgccatgcaacattatgaacagagcaaaatgttcaatgacgccatggatatactcaatatggtgtttaccggcgtgtttacggtcgaaatggtgctgaaggtcattgcttttaaaccaaaacattattttactgacgcttggaatacgtttgatgcccttatagtggtaggatctgtggtagacatcgcgattacggaggtaaaccctaccgagagtgaaaatgtgcctgtgccaacggcgacccctggaaacagtgaagagagtaacaggatcagtatcaccttcttcaggctctttcgggttatgcgtctggttaaacttctcagtcgtggcgaaggcataaggacgctgctgtggacgttcatcaaaagttttcaggcactgccgtacgtagccttgctgattgccatgctcttttttatctatgccgtcattggaatgcagatgttcgggaaagtggcaatgcgcgacaacaatcaaatcaaccgtaacaacaactttcagacttttccgcaggccgttctcctgctattccggtgtgccacgggcgaggcctggcaagaaattatgcttgcatgcctcccaggcaagctgtgtgacccagaatcagactataaccccggagaagagtacacctgcggttcgaatttcgcgattgtctatttcatttcattttacatgctgtgtgcctttctaatcattaatcttttcgttgccgtcattatggacaacttcgactacctcacacgtgattggagtattctgggcccacaccatctggacgagttcaaaagaatttggtccgaatacgatccagaggcaaaaggccgaatcaaacacctggatgttgtgacacttctgcggaggatccagccgcctctcggctttgggaagctctgtccacacagagtagcgtgtaaacgtcttgttgccatgaatatgcctctcaactcagacggtacagtgatgttcaacgccacgctctttgcactggtcagaactgcgctgaagatcaaaacagaaggaaaccttgagcaggctaatgaagagttacgagctgtgatcaaaaagatttggaagaagaccagtatgaagctactggaccaagtcgttccccctgctggggatgatgaagttacagtcggcaagttttatgcaacattcctgatccaggactatttccggaagtttaaaaaaaggaaggaacaagggctggtagggaaatacccagccaagaacactactatcgcgctgcaagccggtcttcgcactctgcatgacattgggcctgagatcaggagagccataagttgcgacttacaagacgatgaacctgaggagactaagcgggaagaagaagatgacgttttcaagcggaatggtgctctgctgggaaaccacgtaaatcacgtaaactccgacaggcgggactcactgcagcagacgaacaccacacacaggcctctgcatgtacagagaccgtccatcccaccagccagtgacacagaaaagcctctgtttcctccagccggtaatagcgtgtgtcacaaccatcacaaccacaacagtatcggtaagcaggtgcctacctcgaccaacgccaacctcaataacgctaatatgtctaaggccgctcacgggaagcgaccctcaattggaaaccttgagcatgtgtctgaaaatggtcatcactcttcacataagcacgatcgggaacctcagagacgaagctcagtcaagcggacccgctattatgaaacttacataaggagcgacagtggagacgagcagctgcctactatttgtcgcgaggatcccgagattcatggctatttccgagaccctcattgcctgggagaacaggagtatttctcgtccgaagagtgctacgaggatgattcctcgcccacatggagccggcagaattatggctactacagtcggtacccagggaggaacattgattccgagcggccacggggataccaccatcctcaggggttcctggaggacgatgattctccagtgtgttatgacagtcgtagaagtccccgaagacgacttctgcctcccactccagcatctcaccgtcgctcgagtttcaatttcgagtgtcttagaaggcagtcctcccaggaagaagtcccatcaagccccatttttccccaccgcaccgcactgcctctgcacctgatgcagcagcaaatcatggccgtggccggtcttgactcgtctaaggcgcagaagtactctccctcgcattccacccggagttgggctactccacccgcaacccctccctatagggactggactccttgttacacacctctgattcaggtggaacagtcagaggctctggatcaagtaaatggatctctccccagtcttcaccggagctcttggtacactgacgaacctgatatatcgtatcgcaccttcactcctgcatcccttacagtgccctcgtctttcagaaataaaaattctgacaaacagaggagtgcagactctctggtcgaagcagtccttatatcagagggcttgggcagatatgctcgggaccccaaatttgtaagcgccactaaacatgagattgctgatgcctgcgacctgacgattgacgaaatggaatccgctgcatctactcttttgaatggaaatgtgcgccctcgggcaaatggagacgtaggacctttgagccaccgtcaagactacgaacttcaggactttggtcccggttacagtgatgaggaaccagaccccggacgtgacgaggaggatctcgctgacgaaatgatttgtattaccacacttta

SEQ ID NO: 216634 - DNA, 1620 bp, synthetic construct
  misc_feature 1..1620: note = Description of Artificial Sequence: Synthetic coding sequence
  source 1..1620: mol_type = other DNA
atgggggaaacctggttgtgtccggcagctctgggactgctctataaagcaattgattcaaacggagagaatattggccctatttacaatcacagagtggagataagcatcttttttatcatttacataatcatagtggcgttcttcatgatgaacatctttgtgggctttgtcatcgtgacgttccaagagcagggtgaaaaagagtacaaaaattgcgagctcgacaagaaccagcgacagtgtgtcgagtatgcacttaaggccaggccgctcaggcgttacattcccaagaacccatatcagtacaaattctggtatgtggtaaattcatccccatttgaatacatgatgtttgtcctcattatgctgaacactttgtgcctcgctatgcagcactacgagcagtctaagatgttcaacgatgcaatggacattttaaatatggtttttaccggtgtgtttactgttgagatggtgttgaaggtcatagcctttaaacctaaggggtacttctccgacgcctggaataccttcgactcactgattgttataggctccattatcgatgtcgccctgagtgaagcagacaactccgaagagagcaacagaatctcaataacctttttccggctctttcgcgttatgaggttggtgaagctgttgtccagaggcgagggcattcgtaccctgctctggacattcataaagagctttcaagccctgccatatgtggccttacttatagctatgttattcttcatttacgctgtgataggcatgcaaatgtttgggaaagtggccatgagggacaacaatcagataaaccggaacaacaactttcagaccttcccccaggcagtgttactgctttttagatgcgcaaccggcgaggcctggcaggagatcatgttggcgtgtctcccgggaaaactgtgtgacccggagtcggactataatccaggggaggagtacacgtgtgggtcaaattttgcaatcgtatacttcatatcattctatatgctgtgcgctttcctgattataaacctgtttgtagccgttatcatggacaactttgattaccttacccgtgattggagtattctgggccctcatcacctcgacgaattcaagcggatttggagtgagtacgatcccgaagcgaagggacggattaaacacctcgatgtagtcacactgctcaggcgcatccagccgccattgggctttggcaaattatgcccgcatagggtcgcttgtaagagactggtggcgatgaatatgcctctgaattccgatggaaccgtaatgtttaatgctaccctgttcgcgttagtaaggactgctctaaagatcaaaacagagggtaatctggagcaggccaatgaagaactgcgcgcagtgatcaaaaaaatctggaaaaagacatccatgaagttgctcgaccaagtggtcccaccagccggtgacgacgaggtgacagtggggaagttttatgctacctttctcatacaggattattttcggaaattcaagaaacggaaggagcaaggcctggttggaaagtacccagctaagaatacaactattgcattgcagatgctggagcggatgttgtag

SEQ ID NO: 216635 - DNA, 1056 bp, synthetic construct
  misc_feature 1..1056: note = Description of Artificial Sequence: Synthetic coding sequence
  source 1..1056: mol_type = other DNA
atgaacgggcttgctcagtctagattagagacttgcatctcatacctgcactgttactctgccggactgcggactctgcacgatatcggacccgaaatccgtagagctatctcttgcgacttacaggatgatgaacccgaggaaactaagagagaggaagaggacgatgtattcaagcggaacggcgctctgctgggtaatcacgtcaatcatgtaaactctgaccgccgtgactctctgcaacagaccaatactacacatagacctttgcacgtgcaaaggccctccatccctcccgctagcgacaccgagaagcccctattccctcccgctggcaactcagtgtgccacaaccaccacaaccataactccattgggaagcaggtgcccaccagcacgaacgctaatctcaacaatgcgaacatgtctaaagctgcccacggaaagcgcccatccataggcaatctcgagcacgtgtccgaaaacgggcatcattcctctcacaagcatgatcgtgagcctcagagacggagctccgttaaaagaactaggtattatgaaacctacattcgctcagattccggggatgagcaactgcctacaatatgcagggaagacccagagatccacggctactttcgggatccccactgtctcggcgagcaggaatatttttcctccgaagaatgctacgaggacgactcctcccccacctggagtcggcagaactatggttactactccagatacccagggaggaacattgacagtgagcgtccaagaggatatcaccaccctcaaggcttcctggaagacgatgactcccccgtttgttacgacagtaggaggagcccccgtagaagactgctgcctccaacaccagcttctcatagacgttccagctttaactttgagtgtcttcgtcgtcagtcttcccaagaggaggtgccgtcctcccccatcttcccacacaggacagcgctgccgctgcatctgatgcaacagcagtcaccactgtctagtgatcatggtagttgtcgccctcgtttcaaatag

SEQ ID NO: 216636 - DNA, 5900 bp, synthetic construct
  misc_feature 1..5900: note = Description of Artificial Sequence: Synthetic coding sequence
  source 1..5900: mol_type = other DNA
atgagtgaatccgaggggggtaaagatacgacgcctgagccttctcctgcaaatggtgcgggtcctggcccagagtggggtctctgccccggaccacctgctgttgaaggcgaatcgtccggggcatcaggacttggcacgccgaagcggagaaatcagcattccaagcataagacagtagcggtcgcatctgcacagagaagcccaagagctctgttctgcctgacgttagccaatcctctccgaagatcttgtatctctattgttgaatggaagccctttgacatcctgattctgcttaccattttcgccaattgcgttgctctgggcgtgtacattcccttccccgaagatgacagcaatacggcaaatcataacttagagcaggtcgaatacgtttttctggttattttcacggtcgagacagtcctgaaaattgtcgcgtatgggcttgtgcttcatccatcagcatatattcgcaacggatggaatctgctggattttattatcgtggtggtggggctcttctcagtcctgctggagcagggacctggaaggccgggtgacgcacctcatacaggcggaaaacccggagggtttgacgttaaagccctgcgagcatttcgcgtgctccggcctctccgcctggtgagcggtgtgccctctttacatatcgtcttgaactcaataatgaaggccttggtgccgttacttcacatcgcactgctcgtcctattcgtcatcataatctacgccattattggacttgagctctttctgggtaggatgcacaagacttgttatttcctggggagcgacatggaagctgaagaggacccgagtccctgtgcctcaagcggaagtggcagagcatgcaccctcaaccaaacagaatgccggggtagatggccgggtccaaacggtgggatcaccaactttgacaatttctttttcgccatgctcaccgtatttcagtgcgttaccatggaagggtggactgatgtgctgtactggatgcaggatgccatgggctacgaactcccctgggtgtatttcgtgtccttggtgatttttggcagctttttcgtcttgaacctggtgctgggagttctgtcaggggagtttagcaaagagcgggaaaaggccaaagccaggggtgattttcagaagcagagggagaagcagcagatggaagaggacctcagaggctacctggattggatcacccaggcggaggaacttgatatggaggacccttccgctgatgacaatctgggaccacagctggcagagctcactaacagaaggcgcggtcgccttagatggttctctcactctacacgctccacgcatagcacctcatctcacgccagtctgcccgcatcagacaccggcagtatgacagagactcaaggagacgaggacgaagaggaaggggctctggcctcttgcacaagatgcctgaacaagatcatgaaaacccgcgtgtgccgcaggctgcgccgagcaaaccgtgtgctcagagcaagatgccgacgtgccgtgaagagtaacgcatgttactgggccgtgctgctgctggtgttcctcaacactcttacaattgcttccgaacaccacggccagccggtctggcttacccagatccaggaatatgccaacaaagtcttgctgtgcttattcaccgttgaaatgctgctgaaactctacggcttaggcccttccgcgtacgtgtcgtccttttttaacagattcgactgtttcgtagtgtgtggagggatcctagagacgactttagtggaagtgggcgcaatgcagcccttaggaatcagcgtgctgaggtgcgttagactgctgcgaatctttaaagtgacgcggcactgggcaagtctcagtaatctcgtcgctagcctgctgaactctatgaaaagcatagctagcttgcttctgttgctgttcctctttataattatattcagtctactggggatgcagctttttggagggaagttcaatttcgaccagacgcacacaaaaagaagtacttttgacacttttccgcaagctctgctaacggtgtttcagatcttgaccggtgaagattggaatgtggtgatgtatgacggaattatggcttacgggggtcctttctttcccggtatgcttgtgtgcatttacttcatcatccttttcatttgtgggaactacatcctgctcaacgtatttctggccattgccgtggacaacctggcgagcggggatgccggaaccgctaaggacaaaggaggtgaaaagagtaacgaaaaggacctgcctcaggagaacgagggacttgtcccgggagtggagaaggaggaagaggagggagccaggagagagggggcagacatggaagaggaagaagaagaggaggaggaggaggaggaggaagaggaggaggaaggcgctgggggagtggagctcttgcaggaggtggtgccaaaggaaaaagttgtgccaatccccgaagggtccgccttcttttgtctgtcacagaccaatcccctgcggaaaggatgtcatactctcattcaccaccatgtgttcaccaatctcatccttgtgttcattattcttagtagcgtcagcctggccgctgaagaccccatacgcgctcacagctttcgtaatcacatcctggggtatttcgattacgcctttacatccattttcaccgttgaaattctgctgaaaatgaccgtattcggcgcattcctgcatcgaggttcattctgtagaagctggttcaatatgcttgacctgctagtcgtatccgtaagcctcatttcatttggcatacacagttcagcaatcagtgtcgtcaaaatacttcgggtgctgcgcgtactgaggcccctgcgcgctattaatagagccaaaggcctcaagcatgtcgtgcagtgcgttttcgtggccatcaggacgataggcaacataatgatcgtgaccaccctgctccaattcatgtttgcatgtattggcgtgcagctcttcaaaggaaaattttacacatgcaccgacgaagccaagcatacaccgcaggagtgtaagggaagtttcctggtctatcccgacggtgatgtctctaggccactggtccgagaaagattatgggttaatagtgattttaacttcgataacgtcctgagcgctatgatggccctatttaccgtttctaccttcgaaggctggccagccttgttgtataaggccatcgacgcttatgcagaggaccacgggcctatctataattatagagtcgagatttccgtgttcttcatagtctacataatcatcatcgctttctttatgatgaacattttcgtcggatttgtgattattacatttagggctcaaggcgagcaagaatatcagaactgtgagctggataagaatcagagacagtgcgtggagtatgccctcaaggcccagccattgcgcaggtacatccctaaaaatccacatcagtacagagtgtgggcaacagtgaactctgctgccttcgagtacctgatgttcctgctgatcctcctgaataccgtggcccttgcaatgcagcattacgagcagaccgccccttttaactacgctatggacatcctgaacatggtgttcacaggtctttttaccatagagatggtcctgaaaatcatcgcctttaaaccaaagcattattttacagatgcctggaacacctttgacgccctgattgtggttggcagtattgttgacatcgctgtgaccgaggtcaataacggtggtcatttgggcgagtcttccgaggattcctcgaggatatcaatcacctttttcaggctgtttcgtgttatgaggttggtcaagctgctgtcaaagggcgaaggcataaggaccctcctctggacatttattaagtcctttcaggctctgccttacgtggctctgttgatcgccatgattttctttatttatgcagtgattggcatgcagatgttcggcaaggtcgccctgcaggatggaacgcagatcaaccggaataataacttccagaccttcccacaggccgtgttgttgctgtttaggtgcgccactggagaagcatggcaagaaatcatgcttgctagtctcccaggaaatagatgtgaccccgaaagcgactttgggcctggcgaagagttcacgtgtggttctaacttcgctatcgcatacttcatcagctttttcatgttgtgcgccttcctcatcataaatctgttcgtggccgttatcatggataacttcgactacctgacgagggactggtcaattctgggtccacaccaccttgacgaattcaaaagaatatggtctgagtatgatcccggagcaaaaggcagaatcaagcatttagacgtggtggcccttttgcggaggatccaaccacctttgggctttggaaagctgtgcccacatagagtggcatgcaagaggcttgtcgccatgaacatgcccctgaatagcgatggaaccgtgacgtttaacgcaaccctctttgctctcgtgcgcactagcctgaagatcaaaacggaggggaatctggaacaggcgaaccaggaacttcgaatcgtcatcaagaagatctggaagcgcatgaaacagaagcttctcgacgaggtgatccctccacccgacgaagaagaggtgacagttggtaaattttatgccacctttctgatccaggattattttcggaaattcagaagacggaaagagaaaggcctcttggggaacgacgccgctccaagtacttctagtgctcttcaggctggtctccgctcactgcaagacctcggccctgagatgcgccaagcactcacctgcgacaccgaggaagaggaagaggaaggccaagaaggagttgaggaagaggacgaaaaagatctggaaaccaataaagccaccatggtctcccagccatccgcacgcagagggtccgggatcagtgtatcactccccgttggtgaccggctgcctgactccctcagttttgggccttctgatgacgatcgcggtacccctacctcgagccaaccgagcgtccctcaggccggttccaacacccataggcgcggaagcggggcactgatattcaccatccctgaggagggtaattcccagcccaagggcacaaaagggcagaataaacaggatgaggacgaggaagttcctgataggctaagctatttggacgagcaggccggaactcctccctgctccgtcctgctgcctccacaccgggcacaaagatatatggatggacatttagtccccagaaggcggctgctgcccccaactcctgccggtagaaagcctagttttactattcaatgcctccagcgccagggttcctgtgaagatctgcctattccaggcacctatcatcggggacggaactctggcccaaatagggctcaggggtcatgggcaactccgcctcaacgcggtcgcttgctttatgctccattattgttggtggaggagggtgcagctggcgaagggtacctcggacgtagttcaggcccacttcggacttttacatgtcttcatgtaccagggacacactcagacccaagtcacggtaagagagggtcggctgactccctggtggaagccgtgctcatcagtgagggcctaggtctcttcgccagagatcctcgcttcgtggcccttgcaaaacaggaaattgcagacgcctgtagattaaccctcgacgagatggataatgctgcaagtgacctgctggcccagggcacctcctccttgtattctgatgaagaaagcattttatctaggttcgacgaggaggacttgggcgatgaaatggcatgtgtgcacgctttgta

SEQ ID NO: 216637 - DNA, 5738 bp, synthetic construct
  misc_feature 1..5738: note = Description of Artificial Sequence: Synthetic coding sequence
  source 1..5738: mol_type = other DNA
atgtccgaatccgagggcggtaagggtgaacgtatcctcccctccctccagactctcggggcttctattgttgaatggaagccatttgacattctcatcctgctaacaatcttcgcgaactgcgtcgccctcggcgtatacattccatttccagaagacgactccaacaccgcgaaccacaatctcgagcaggttgaatatgtcttccttgtaatttttaccgtggagaccgtgctgaaaatcgttgcctacggcttggtgcttcacccctccgcttatatcagaaacggatggaatctgttagattttatcatcgttgtagtgggtctcttctcagttctgcttgagcagggaccgggacggcctggagatgcaccccacactggtggtaaaccagggggttttgacgtgaaagcgctccgggcattcagagtgttgcgccctttacgtctggtttctggcgtgccaagtctgcatatcgtgctgaactccattatgaaagctctcgtgcctcttctgcatatcgcccttctggtgctgttcgtgatcattatttacgcaatcattgggttggaactcttccttggtaggatgcacaaaacttgctactttctcggctcggatatggaagcggaagaagatccgtcaccatgcgcctcatccggaagcggcagggcgtgtaccttgaaccagacagaatgtcgagggaggtggcccggacctaatggcggaattaccaactttgataatttcttttttgccatgttaacagtgttccaatgtgtgacaatggagggatggaccgacgtcctctactggatgcaagacgccatggggtacgagctgccctgggtgtactttgtgagccttgttattttcgggagctttttcgtgctaaacctagtgctcggtgtgctttctggggagtttagtaaagagagggagaaagcaaaagccagaggcgactttcagaagcagcgagaaaagcaacagatggaggaagacctgcggggttatctagactggatcactcaggcagaggagcttgatatggaggatccatcggcagatgataacttgggatctatggcagaagagggccgagctggacatagaccacagctggctgaactcaccaacagacggagaggcaggctgaggtggttttctcattctactagatcaactcactctacgtcctctcacgcatctttgccagcctctgataccggttctatgaccgagacccaaggcgatgaggatgaagaggagggggctttggcatcatgcacccggtgtctgaataaaataatgaaaactagggtttgtcgcagactgagacgggcaaaccgcgtgctgcgagctcggtgccgacgcgctgttaaaagcaacgcatgttactgggccgttctgctgctagtgtttctgaataccctgactattgctagcgagcatcacgggcagcctgtttggcttacacagattcaggaatacgccaacaaagttctactttgtctgtttactgtggagatgttgctcaaactgtacggcctcggaccatctgcttacgtgtcttcattttttaaccgtttcgactgtttcgtggtctgcggtgggatacttgagactaccctcgtagaagtcggagcaatgcagccccttggaatttccgtgctgaggtgcgttagactcctgaggatctttaaggtcacaagacattgggcatccctcagtaatctcgtggcctctctattgaacagcatgaagtctattgccagcctcctgttgctgctgtttctcttcatcatcatcttcagcctgctgggtatgcagctgtttggaggcaagttcaattttgaccaaacccacaccaaaagatctaccttcgacaccttcccacaggcgctactgacggtgttccagatcctgacaggtgaagattggaatgtggtaatgtatgatggaattatggcttacggcggaccctttttcccgggtatgctggtatgtatctacttcatcatactttttatctgcggtaactatattctgctgaacgtgttccttgccatcgcagtggacaacttggccagcggtgacgcagggacagcaaaagataagggaggcgaaaagtccaacgaaaaagatctaccgcaggagaatgagggactcgtacctggcgttgagaaagaggaggaagaaggggctcggagggagggtgccgacatggaagaagaagaggaggaggaggaggaagaggaggaggaagaggaagaagagggtgccggtggtgtagagctgctgcaggaggtagtccccaaggagaaggtagttccgatccctgagggttccgcattcttctgcctgagtcaaacaaatcctctgcggaaaggatgtcatacactaattcatcaccacgtctttaccaacctgattttagtgttcattatcctgtcatcagtgtctttggctgctgaggatcctatcagggcccactctttccgcaaccatatccttggctatttcgactatgcctttacctcaatcttcactgttgagatcctccttaaaatgaccgttttcggggcattcctgcatagaggatccttttgtcggagctggttcaatatgctggacttgcttgtcgttagtgtgtccctcatatctttcgggatccactcctctgctatttcagtggttaagatccttcgggtcctgcgcgtgctgcggcctttacgcgcaataaatcgcgcaaaaggcctgaagcacgtcgtgcagtgcgtatttgttgctattcgtacaatcgggaatatcatgatcgtgacaactctgttgcagtttatgttcgcatgcatcggtgtgcaactgttcaaagggaaattttatacttgcacagacgaagcgaagcatacgccacaggagtgtaaggggagctttctcgtgtatccggatggggacgtaagcagaccactggtcagagagaggctgtgggtgaacagcgattttaactttgataacgtgttgagcgcgatgatggccttattcacagtgtccacattcgaaggctggcctgctctgctgtataaggctatcgacgcctatgcagaggaccacggacccatttacaactaccgcgtagagatcagtgtcttttttattgtttatatcattataattgcattcttcatgatgaacattttcgtgggattcgtgataattacgttccgggcacagggggagcaagagtatcagaattgtgagttagacaaaaaccagagacaatgcgtggaatacgcattgaaggcccagcctcttagaagatacatcccaaaaaaccctcatcagtaccgagtgtgggctacagttaattccgccgctttcgaatacttgatgtttctcttgatcctcctaaacacagtagctctggctatgcaacactacgagcagactgcacctttcaactacgccatggatatcctgaatatggtgttcaccggcttatttaccattgagatggtactaaagattattgcattcaagcccaagcactactttacagatgcgtggaatactttcgatgcccttatcgtggtgggcagtatagtcgatattgcagttaccgaggtcaacaatggcggacatctcggcgagtcatctgaagattccagccgcatttcaatcacatttttccgtctttttagagttatgaggttggtaaaacttctcagtaaaggcgagggaatcagaacgcttctttggacttttatcaagagcttccaggcgttgccctacgtcgccttactgattgccatgatcttcttcatttatgcagtgattggaatgcagatgttcggaaaggtagctttacaggatggcacgcagatcaaccggaacaataacttccagacttttccacaagctgtgctattgctattccgctgcgcgaccggtgaggcctggcaggagatcatgctagcatctctccccggtaatcggtgcgatcctgagagcgattttggcccaggcgaggagtttacttgtggtagcaattttgccattgcgtattttataagtttctttatgttgtgtgctttcctcataataaacctgttcgtggccgtgatcatggacaactttgattacctgacacgagattggtccattctgggacctcaccatctagacgagttcaagagaatctggtctgaatacgaccctggggcaaaaggaaggattaaacacctcgacgtcgtggcactgctccgtcgtattcaaccgccattgggatttggtaaactctgcccccacagagtggcttgcaaacggctggtcgccatgaatatgcccctgaattccgacggaactgtaaccttcaacgcaacgctgttcgcccttgtgcgtacatcactcaaaattaaaaccgaaggcaatctggagcaggctaatcaggagctgcgaatcgtgattaaaaagatttggaagcggatgaaacaaaagttgttagatgaggtgattcccccaccggatgaggaggaggtgactgtgggcaagttctacgcaacattcctcatccaagactactttagaaaattccgacgtcgtaaggagaagggtctgcttggcaatgacgccgctcccagtacgagcagcgccctgcaggccggactgagaagcttgcaggacctaggacccgaaatgcgtcaagccttgacatgtgacacagaggaagaggaggaggagggtcaggaaggagtagaagaggaggatgaaaaagacctagaaaccaacaaagccaccatggtcagccaacctagtgccaggagaggatctggaataagcgtaagtttgcccgttggagataggctccccgacagtctctcatttggcccttccgatgacgacaggggaacacctacatcttcacagccttctgtgccacaggctggttccaatactcaccggcgaggaagcggggcactgatctttacaataccggaggagggcaatagccagccaaaagggacgaaggggcagaacaagcaggacgaggatgaagaagtacccgataggctcagttatctagacgagcaggccggaacccctccatgtagcgttctcctccccccacatcgagcgcagcgctacatggacgggcacctggttcctcgcaggaggcttctgcctcctacccccgctggtcgaaagccctccttcaccatccaatgcctccagcgtcagggctcttgcgaagatctgccgattcctggaacttaccacagaggacggaattcaggcccaaatcgggcacagggatcatgggcgacccctccccagcgtggaagactcctctacgctccgctcttactggtggaagagggagccgctggcgagggttacctcggccgttctagcggaccacttaggaccttcacctgtctccacgtccctggtacccactcagatccctctcatgggaagcgcggaagcgctgatagtctggtagaggcggtgctcatatccgaaggtttggggctgtttgccagggaccctcgatttgtcgcattggctaagcaggaaattgcagacgcttgccggctcacccttgacgagatggataacgcagccagcgatctcttggctcaagggacatccagtttatactctgatgaggagtctatcctgtcccggtttgacgaagaagatctcggtgacgagatggcatgtgtacacgctctgta

SEQ ID NO: 216638 - DNA, 5933 bp, synthetic construct
  misc_feature 1..5933: note = Description of Artificial Sequence: Synthetic coding sequence
  source 1..5933: mol_type = other DNA
atgtcagaaagcgaaggtggtaaagatacaacacctgagccttctcctgctaatggagccggaccaggccctgagtggggtctgtgccctgggcctcctgctgtggaaggtgagtctagcggtgctagtggtcttggtacacccaagcgccgaaaccagcactctaaacacaaaacagttgctgtggcctcagcccagagatccccaagagccctcttctgcctgacattagcaaaccccctgcggcgatcctgtatttcaattgttgagtggaaacctttcgatattctgatcctgcttactatttttgccaactgcgttgctcttggcgtctatattcccttccccgaagacgactcaaacacagccaatcataatctggagcaggtggaatatgtgttcctggtcatcttcacggtcgagacagtgctaaaaatagtggcttacggtctggtgctgcatccctcggcttatatccggaacggatggaatctgctggacttcataatcgtggtcgtcggtctattttccgtactccttgagcaaggccctggtcgtccgggtgacgcgcctcataccggcggaaaaccgggaggttttgatgtaaaagcccttagagccttcagggtgctgagaccgctgaggttggtgagtggggtgccctctctgcatattgtcctgaattccattatgaaagctctggtacccttgcttcacattgcactattggtcctgttcgtcataattatttacgccattatcggattggagctttttctgggtcgcatgcacaaaacttgttacttcctcggttccgacatggaagcggaagaggacccatcaccctgtgcgtcctctgggtcaggtagagcctgcaccctaaaccaaaccgaatgtcggggtcggtggccaggtccaaatggtggaatcaccaactttgacaatttttttttcgccatgctgaccgtcttccagtgtgttaccatggagggttggacagatgtgctctactggatgcaggatgcgatggggtacgagttgccatgggtgtacttcgtgtcgctagtgatctttggcagctttttcgttcttaacctagttttgggtgttctgtctggggagttttcaaaggaaagggagaaggccaaagcacgcggtgatttccagaaacaacgcgaaaaacagcagatggaagaagatctgcggggttatctggactggattacacaggcagaggagctggatatggaggacccatcagctgatgataatctgggcagcatggctgaagaggggcgtgccggacacagaccacaattggctgagttgaccaatcgaaggcggggaaggctcaggtggttctcccattccacgaggtcaacccattctacatcatctcacgccagtcttccggctagtgatactgggtccatgacagagacacagggggatgaggacgaagaggaaggcgctcttgcttcctgcaccagatgcctgaataaaatcatgaagacaagggtatgtagacgtctccgcagggcaaatcgcgtcctgcgcgcaaggtgccggagggccgtgaagtcaaatgcatgttattgggcagttctgctgctggttttcttaaatacattaaccatcgcgtcagaacaccacgggcaaccagtgtggctgacgcagatacaggagtatgccaataaggtgctgttgtgcctattcaccgtcgagatgctgcttaagctatacggtctggggccaagtgcctacgttagctccttcttcaaccggttcgattgctttgtcgtatgtggaggaatcctggaaacaacactggtagaagtcggcgctatgcagccgttgggcatctcagtgctgcgctgtgtgagacttttgagaatatttaaggtcacacgccattgggctagcctctcaaatcttgtcgcctcgctgctcaatagcatgaaatccattgcctccctactgcttctcctcttcttattcatcatcatcttcagcctgctggggatgcaattatttgggggtaaattcaatttcgaccagactcacaccaagcgaagcacattcgacaccttccctcaagccctgctgaccgtgttccagattctgacgggtgaggactggaacgttgtgatgtatgatggtattatggcatacgggggtccattctttccgggaatgttggtgtgtatttatttcattattttgtttatttgcgggaactacatcctgcttaatgtatttctggccatcgcagtggacaacctggccagcggagatgccggaaccgcaaaagataaggggggagagaaatctaacgagaaagaccttccccaggagaacgagggactggtcccgggagtggaaaaggaagaggaggagggggctcgcagggaaggggctgacatggaagaagaggaagaggaagaggaagaggaagaagaggaagaagaggaggagggcgcaggaggagttgaactgctgcaagaggtcgtccccaaggagaaggtggtacctatccctgaggggtcggcgttcttttgcctctcacagactaatccattgagaaaaggatgccacactcttattcatcaccacgtcttcacaaacctgatactggtcttcattatcttgtcgtcggtctcgctggcagctgaggaccctattcgagcgcactcctttaggaaccacatcctgggctattttgactatgccttcacgtctatcttcactgtcgagattttgcttaagatgaccgtgtttggagcttttctgcacagggggagcttctgccgaagttggtttaacatgctagatctcctggtggtaagcgtgagcctaatatcttttgggatacacagctcggccattagtgtcgtcaaaatcctccgcgtgctacgggttctcagaccccttagggccatcaaccgagccaaggggctcaagcacgttgtgcagtgtgtatttgtggctatcagaacaatcggaaacataatgattgtgactacacttctgcagtttatgtttgcttgcattggggtgcagctgtttaaaggtaagttctacacatgcacagacgaagctaagcataccccgcaggaatgcaagggaagtttcctggtgtaccccgatggtgatgtgagcagaccgctggtgcgagaacggctctgggtgaactcagatttcaattttgacaatgtcttgtcagccatgatggctctgttcaccgtgtcaacattcgaaggatggcccgcactgctgtacaaagccatcgacgcttatgcagaggaccacggaccaatctataactacagggtggagatctctgtgttcttcatcgtttacatcattatcatcgcctttttcatgatgaacattttcgtggggtttgttataatcaccttccgcgctcagggagaacaggagtaccaaaattgtgaactcgacaagaatcagcggcagtgcgtggaatacgcactgaaagcacagccgttgaggaggtatatcccaaagaatcctcatcagtatagagtgtgggcaaccgtaaatagcgccgcatttgaatacctcatgtttttactgatcctcctgaacaccgtcgcccttgcgatgcagcactatgaacagactgccccatttaactacgccatggacattcttaatatggtgttcactgggctgtttaccattgaaatggtgctgaaaatcatcgccttcaaaccaaagcactactttaccgatgcttggaacacctttgatgccctgatagtggtgggcagcatcgtggacatcgccgtgacagaggtgaacaatggaggacacctcggcgagagttcagaggactcctcccgcattagcattaccttctttagactgttccgagtgatgcgcttggtgaagctgctctcgaagggggaaggtattcgcacactgctctggacctttataaaaagctttcaggcgcttccctatgtcgctcttctgattgccatgatcttttttatttacgcagtgatcggcatgcagatgttcgggaaggttgctctgcaggacgggacccagatcaatcggaataacaatttccagaccttccctcaggccgtgttacttctgttcaggtgcgctactggggaggcctggcaggagataatgctggcaagcctcccaggaaatagatgtgatcctgagtctgatttcggccctggcgaagagttcacctgtggttctaacttcgccatagcctacttcatatcctttttcatgttatgtgcattcctgattatcaacttattcgttgcggtcatcatggataacttcgactacctcactagggattggtccattctgggcccacaccacctagatgaattcaaacgtatctggtccgagtacgacccaggggcaaaaggtcgaataaagcatctcgacgtcgtggcactactgcgccgaattcaacctccactcggcttcggaaaattgtgccctcacagagtcgcctgtaagcgcctcgttgcgatgaatatgcccctcaatagcgatggaacagttaccttcaacgctacactgttcgcccttgtgaggacgtcccttaagatcaaaactgaaggtaacctggagcaggcaaatcaggaactgcgaatagtgataaagaagatttggaagaggatgaaacaaaagctccttgatgaagtgatcccaccacctgatgaagaagaggtgacagtggggaaattttacgccaccttcctgatccaggattacttccggaaattccgccgtagaaaggaaaagggcctgctcggcaacgacgctgcacccagcaccagtagcgccctacaggccggactcagatctttgcaggacctgggtcctgagatgaggcaggccctcacttgtgacactgaggaagaggaagaggagggacaagagggcgtcgaggaagaagatgaaaaagacctggaaactaacaaggctactatggtcagccagccatcagctcgtaggggctctggcatttccgtgtcacttcctgttggggaccgcctacccgacagcctttcttttgggcctagcgacgacgacagaggcactcccacttccagtcagcccagcgtaccacaagccggttcaaacacacacagacggggttctggtgcattaatttttacaattccagaggagggcaattcccagcctaaaggaaccaaggggcagaacaagcaggacgaagatgaagaggtgcccgacagacttagctacttggatgagcaggccggaaccccgccatgttctgtgctgctgccaccacacagagcgcaacgttatatggatggccatctcgtgcccagaaggcgattgctcccaccgactccggctggccgaaagccctcattcactattcaatgtctccagcgtcagggttcttgcgaagatctgcccattcctggcacttaccacagggggagaaattccggcccaaaccgcgctcaagggtcctgggccacccctccgcagaggggccgattgctgtatgcgcctctgcttctcgtagaagaaggagccgcaggagagggttacctaggtagatcctctggcccattgaggaccttcacttgtctccatgtccccggtacacacagtgatccatcccacggaaagcgaggttccgccgactccttagtggaggcagtgctcatcagtgagggcctggggctatttgcacgggatcccagattcgtggcactagctaagcaggaaatcgcggatgcctgcaggctgacactcgacgagatggacaacgcagcaagtgatctactggcgcagggaacatcctccctgtattccgatgaagaatcgatcctcagtagattcgatgaagaggacctcggcgatgaaatggcttgcgtccatgccctcta

SEQ ID NO: 216639 - DNA, 5621 bp, synthetic construct
  misc_feature 1..5621: note = Description of Artificial Sequence: Synthetic coding sequence
  source 1..5621: mol_type = other DNA
atggagccaagctctcctcaagatgaggggctgcgtaaaaagcagccgaagaagccagtgcctgagatattgccgaggccaccccgagccctgttctgcctgaccttagagaaccctcttagaaaggcctgtattagcattgtggagtggaagcccttcgaaaccatcatcctgctaacgatctttgcaaattgcgtcgctctcgcggtttatctgcctatgcctgaggatgacaacaacagcctgaatctcggcctggagaaactcgaatactttttcctcattgtcttttcaatcgaggccgctatgaagatcattgcctacggcttcctattccaccaggatgcatacctgcgatccggttggaacgtgcttgattttacgattgtatttctgggcgtattcaccgtaattctcgagcaggtgaacgtgattcagagccacactgcccctatgtcatcaaagggggctgggttggacgttaaagctctgagagcatttagggtgctacggcctctgaggctagtctctggcgtgccttcattgcaggtggtgcttaactctatattcaaggcgatgctgcccttatttcacatcgcactactagtcctgtttatggtcattatttacgccattattgggctggagctgttcaaaggcaagatgcataaaacatgctattttatcggcacagacatagttgccaccgtggagaacgaggagccatctccctgtgccagaactgggtccggaagacggtgcacaattaatggctccgagtgccgcggtggttggccgggtcccaatcacggcatcacccacttcgacaattttggtttctccatgctcacagtgtatcagtgtattactatggaggggtggacagacgtcctttactgggtaaatgacgccattgggaatgagtggccttggatttacttcgtcactcttattctgttgggctccttctttattttgaatctcgtgctgggtgtactctctggtgaattcacaaaagagcgcgaaaaggcaaagagtaggggaactttccagaagctcagagaaaagcagcagcttgatgaggatttgagagggtatatgtcttggatcactcagggcgaagtcatggacgtggaggactttcgtgaagggaaactctctctcgatgaaggtggttccgacacagaaagtctttatgagatcgccggactaaataaaataatccagttcatccgtcactggaggcagtggaataggatttttcgatggaaatgtcacgatatagtcaagtcaaaggtgttttactggctcgtgatcctcatcgttgccttaaatacactgtctatcgccagtgagcaccacaaccaacccctgtggctaacccgtctacaagatatcgccaaccgcgtgcttctttctctttttactaccgaaatgctgatgaagatgtacggtcttgggctgagacagtacttcatgtctatctttaaccgttttgactgctttgtggtttgctcagggattctcgagatattgttggtggagtccggagctatgacacctctgggaatctctgtcctacggtgtatcaggttgcttagaatctttaaaatcaccaaatattggacctctctcagcaatctagtcgcatcactgctgaattctatcagatctatagcgtctcttttattgctcttattcttatttatcgtgatcttcgccctcctgggcatgcagctgttcgggggacgatacgacttcgaggacactgaagtgcggaggtctaatttcgataattttcctcaggcacttatttctgtttttcaggtgctgacgggagaagattggacttcaatgatgtataacgggatcatggcttatggcggaccctcttatcctggaatgctggtatgcatttacttcattattctgtttgtgtgcgggaattatattttgctgaatgtgttcctggctatcgcggttgataacctggctgaagcagaatccctgacatccgctcagaaagctaaagccgaagaaaaaaaacgcagaaaaatgagcaaaggactgccagacaaatcagaagaggagaagtcaacgatggccaagaaactcgagcagaaacccaagggcgagggtatcccaactacagcaaaactaaagatcgatgagtttgagagcaacgtgaatgaggtgaaggatccctatccgagtgccgattttcccggagacgatgaggaggatgagcctgagattcctctgagccctcgccctcggcctctggctgagttgcaattaaaggaaaaagccgtgccgataccagaggccagctcattttttattttcagccctaccaacaagattagggtactgtgccaccgcatcgttaacgccacttggttcacgaatttcattttgctgttcatcctgctgtcgagtgccgctctggccgctgaggaccccatcagagccgactcaatgagaaaccagattctgaaacattttgacatcgggtttacaagcgtattcaccgtggaaattgttttgaaaatgactacatatggagcctttctgcacaaaggctcgttctgtagaaactacttcaacatgctggatctcctcgtggtagccgtgtccctaatatctatgggcctggagtcctctgcgatatccgtggtaaagattctaagagttctaagggtattgcggcctctaagggccattaatcgagcaaaaggcctcaagcacgtggtgcagtgcatgttcgtcgccataagtactatcgggaacatagtgttagtcacaaccctattacaattcatgttcgcttgcattggtgtgcagttgtttaaaggcaaattcttccgctgtactgatctttcaaagatgacggaagaggaatgccgcggatactactacgtttataaggatggagatcccatgcagatcgagctgcgacatagggaatgggttcattcagacttccacttcgataacgtgctctcagccatgatgtccctgtttacagtcagcaccttcgaaggctggccgcagcttctttataaggctattgattctaatgctgaagatgttggccctatctacaataatagggtcgagatggccatcttcttcattatctatattatcctcatcgccttcttcatgatgaacatattcgtggggttcgttattgtgacctttcaagaacagggcgagaccgaatataaaaactgtgagttagataaaaaccagaggcaatgcgttcagtacgccctcaaagcacgcccactccggtgctacataccgaagaacccttatcaataccaggtatggtacatcgtcacaagctcttatttcgagtacctgatgttcgccctgatcatgttgaatacaatatgtttgggtatgcaacactataaccagtctgagcagatgaaccacatctcagatatccttaacgttgcctttacaataatcttcacacttgagatgatcctgaagctgatggctttcaaggcccgagggtattttggcgatccatggaatgtattcgacttcctgatcgtgattgggtctattatcgacgtcatcctgagcgaaatcgacactttcttggcttctagcgggggtctttactgcctgggtggcggatgcggcaatgtagatccagatgaatcagcaagaatatcctctgctttctttcgactgtttagagtgatgaggctcatcaaacttctaagtcgggctgagggcgtgcgtacattgctgtggacatttatcaaatcattccaggctctcccatatgtggctctactgatcgtgatgctcttctttatatacgccgttatcggtatgcagatgtttggaaagatagcactggttgatggtacacagattaatcgaaataataattttcagaccttcccacaggctgtgctattgttgttccgctgtgcaaccggagaggcgtggcaggagattctgctggcctgctcatatgggaagctttgtgatcccgaatcagattacgctccgggtgaagagtacacttgcggcactaactttgcatattactattttatctcattttacatgttgtgtgccttcctggtcatcaacctcttcgtcgccgtcatcatggacaactttgactacctcaccagagactggagcattcttggcccacaccatctagacgaatttaaggcgatatgggcagaatacgaccccgaggcaaagggtcgtattaaacacctggacgtggtgactctcctgaggcgtatccagcctcccctgggcttcggcaagttttgcccccaccgtgtcgcctgcaaaaggctggttggaatgaatatgccactaaactctgatggtactgtgaccttcaacgccactctgtttgccttggtacggacagctctaaaaatcaagacagaaggcaatttcgaacaggccaacgaggagttgcgagctatcattaaaaaaatctggaaacggacatctatgaagttgctggaccaggtcatacccccaataggagacgacgaggtgacagtgggcaagttttacgccaccttcctgatacaggaacattttaggaagtttatgaaaagacaggaggagtattacggatatagaccgaaaaaggacatcgtgcagattcaggccggactcagaacgatagaagaggaggcagcgccagaaatctgtcgtaccgtaagcggggatctggccgcagaggaggaactggagagggcaatggtcgaagccgctatggaagagggtatcttccggaggacaggagggctgtttggacaggtggataattttttagagcgcaccaactcgcttcctcctgttatggcaaatcagcgtccattgcaatttgccgaaattgagatggaggagatggagtcacccgtgtttctggaagactttccccaggacccccgtacaaatccattggcgagagctaacacaaacaacgccaatgctaatgtggcctatgggaatagcaatcactcaaacagtcacgtgttttcctctgtgcattatgagagagagttccctgaggaaaccgaaacccccgcaacacggggacgtgcgctgggccagccatgccgggttcttggtccccacagtaaaccctgcgtagagatgctaaagggactcctgactcagagggctatgcctcggggacaagcccctcccgcaccgtgtcagtgcccgagagtcgaatccagcatgcctgaggatagaaaatcatctaccccaggttccctccatgaggaaacccctcattcaagatccacgcgggagaataccagtagatgctctgctcccgcaactgccctgttaattcagaaagctctggtgcggggaggtctcggaacccttgcagccgacgcaaattttattatggccaccggtcaagccctcgccgatgcttgccagatggaaccggaagaagttgagatcatggcaactgaacttctgaaaggtagagaagctccggaaggtatggccagctctctgggctgcctgaatctaggaagtagcctgggaagtctggatcaacaccagggctcccaagaaaccctcatacctccgaggctgta

SEQ ID NO: 216640 - DNA, 5564 bp, synthetic construct
  misc_feature 1..5564: note = Description of Artificial Sequence: Synthetic coding sequence
  source 1..5564: mol_type = other DNA
atggagccatcatccccccaggatgaagggctgagaaagaagcagcccaaaaagcctgtgcctgaaatcctaccaaggccacctcgcgctctgttctgtctcaccctggagaatccactgaggaaggcgtgcataagcatcgttgagtggaagccctttgagacgatcattctgcttacaatattcgccaattgtgtcgctctggctgtgtatttgcccatgcccgaagatgacaacaattctttgaatctgggtcttgagaagctcgaatacttcttcctaatcgtgttctccattgaagctgcaatgaagataatcgcgtatgggttcctctttcatcaggacgcctatctgcggtcgggctggaatgtactcgactttaccatcgtgttcctgggagtgttcaccgtgattctcgaacaggtaaacgtcatccagagtcacaccgcacccatgagcagcaaaggagccggtttggacgtaaaggcgttgagagctttccgggtcctgcgccctctgagactagtgagtggggtgccctccctgcaagtggtactgaactcaatcttcaaagccatgcttcccctgtttcacattgccctgctcgtcctgttcatggtgatcatttacgctatcatcggactggagctgttcaaaggaaagatgcacaagacctgctatttcatcggtacggacatcgtggccacagtggaaaatgaagagcctagcccttgtgctcgcacaggtagcgggagacgttgcaccataaatggcagtgagtgtcgcggagggtggcctggaccaaaccatggaatcacacatttcgacaacttcggattctcgatgcttaccgtctaccagtgtatcaccatggaggggtggacagatgtgctctactgggttaatgacgcaattggcaatgagtggccctggatatacttcgtaacattgattcttcttgggagtttctttatattgaacctagtgcttggggtactcagtggcgagttcactaaggagagggagaaagcgaaaagcagggggacattccagaagctgagggaaaaacagcagctagatgaagacctcagaggttatatgtcctggattactcagggcgaagtcatggatgtggaggacttccgcgagggcaaattgtctctggacgagggtggctccgacacggagtcattgtatgagatcgctggtctaaacaagataatccagttcattcgccattggcgccagtggaatcgcatctttcggtggaagtgtcacgatatcgtcaagtccaaagtgttttactggttggtaatcctgattgtcgccctgaacaccctgtcaatcgcctccgagcaccataaccagcctctgtggctcacgcgcttacaagacatagccaacagggtgctgctgagcttgttcactacggagatgcttatgaagatgtatggtttagggctcagacagtacttcatgagtatttttaatcgattcgactgtttcgtggtgtgcagtggaatccttgaaatcttgctcgtggaatcaggtgcaatgactcccctgggcataagcgtgctccgctgcataaggcttctgcgtatcttcaaaatcactaagtactggacaagtctttctaatctggttgcttccttattgaacagtatacgttccatcgcgagtctcctcctgctgctattccttttcattgtcatctttgccctccttgggatgcagctgtttggaggtagatatgattttgaggataccgaggtgcggcgaagcaacttcgacaattttccacaagccctcattagtgtgttccaggtcctgaccggtgaggattggaccagtatgatgtataacggtatcatggcctacggaggaccatcctaccccggaatgctggtctgcatttatttcatcatcctcttcgtttgcggaaactatattttgctaaacgtatttttggccattgctgtcgataatctagccgaagctgaaagtttgacctcagcacagaaggctaaagctgaagagaaaaagcggcgaaaaatgtcaaaaggattacccgacaaaagcgaggaggaaaaaagcacgatggccaaaaagctggaacagaaacccaagggggaagggattcctaccactgctaaactcaaaatcgatgagttcgagagcaacgtgaacgaggtgaaagatccatatcctagcgcagacttcccaggtgacgacgaagaggacgaacctgaaattcccctgagccctcgccctcgccctcttgccgagctgcagctgaaggaaaaagccgtgccaatccccgaggcctctagtttcttcatcttctcccccactaacaagatcagggtcctctgtcatcgcattgttaacgccacatggttcaccaacttcatcctgctgtttattctgctgagctctgctgctttggcggctgaggacccaataagggccgactctatgaggaaccagatcctcaaacactttgacatcggctttacctctgtatttacagtggaaatcgtgctgaagatgaccacatatggtgcatttcttcataaagggtccttttgccgaaattatttcaacatgctggatttgctagttgtcgccgtttccctgatttctatgggccttgagtcatcagcaatatctgtggttaagatcctcagggtcctcagagtactgcgacccctgagagccatcaaccgggctaagggactcaagcacgtggtgcaatgtatgtttgtcgcaataagcaccattgggaacatcgtgctggtgactaccctccttcaattcatgttcgcctgcatcggtgttcaactgtttaaagggaagttcttccgatgcacagacttatcaaaaatgaccgaagaggagtgtagggggtactactacgtctacaaagatggcgatcccatgcagatcgaactgagacaccgagagtgggtgcacagcgattttcattttgataatgtgctgtccgcaatgatgtcattgtttaccgtgtcaactttcgagggctggccccagctactgtataaggcaatagactcgaatgctgaagatgtcggcccaatctacaataacagggtcgaaatggccattttttttatcatctacatcatattgatcgcattttttatgatgaatatattcgtgggcttcgtaattgttacttttcaggagcaaggagagactgaatataaaaattgcgagctggacaaaaaccaaaggcagtgtgttcagtacgccttgaaagccaggcccctgaggtgctatattcctaagaacccataccagtaccaggtgtggtacatagtgacatccagttattttgagtacctcatgttcgcgctgatcatgcttaacaccatttgtcttggcatgcaacattacaatcagagtgagcagatgaaccacatatccgacatcctcaacgtggcgtttaccatcatcttcacccttgagatgattctgaagttgatggcattcaaggcaagagggtactttggagacccttggaatgtgttcgacttcttaatcgtgatcgggtccataatagacgtgattctgagcgaaattgacgatccagatgagagcgcccgaataagctcggcattcttccggcttttcagagtcatgcgtctgattaaattactgtctcgcgcagagggggttagaacccttttgtggacttttattaagtcatttcaggctctcccatatgtcgcgctgctcatcgttatgctgttcttcatctacgccgttatcgggatgcagatgtttggaaagatagcactggtggacgggacacaaatcaataggaacaacaattttcagacctttccacaggccgtgctcctgctgttcaggtgtgcgactggagaggcttggcaagagatcttattggcttgctcctatgggaaattgtgtgacccggagtcggactacgcacccggagaagaatatacatgcggtactaatttcgcctactattatttcatctcattttacatgttatgcgcatttctcgttatcaatctgttcgtcgccgtcattatggacaacttcgattaccttacacgggattggagtatactgggtccccaccacctggatgaattcaaggccatttgggctgagtatgacccagaagcaaagggcagaatcaaacacctggacgtggtgacgttgctgcggaggattcaacccccactggggtttggtaaattttgtccacacagggtggcttgtaaaagactagtaggcatgaatatgccgcttaactctgacgggaccgtcacctttaacgcaacactgtttgctcttgttagaaccgccctgaagatcaagacagaaggaaacttcgaacaggcaaacgaggaattgcgggcaatcataaagaaaatctggaagcgaacatccatgaagctcctggaccaggtgattcccccaattggggacgatgaggtcactgttggaaagttctatgcaaccttcctgatccaggaacatttccgtaagtttatgaagcggcaggaggaatattatgggtatcggccaaaaaaggacattgtacagatccaggcaggtctgcggaccattgaagaggaggcggcacccgagatttgtagaactgtttccggagaccttgcggctgaggaagagctggagcgcgctatggttgaagccgctatggaagaaggaattttccggcgtaccgggggtctctttggccaggtagacaatttcctagagagaactaactctctgccacctgtcatggcaaaccagaggcctcttcagttcgcagagattgaaatggaggaaatggaatcaccagtcttcttggaagacttcccccaagaccctcgcaccaaccctctagcacgggcaaataccaacaacgctaacgctaacgtcgcatatggaaactccaatcattctaatagtcacgtttttagctctgttcactacgagcgggagttcccggaagagaccgagacgcccgcaactcgcggaagggcgttagggcagccatgtagggtcctgggcccacattcaaagccatgcgttgagatgttgaaaggcctgctcacccagcgcgctatgcctagaggacaggctccgccagccccatgtcagtgccctagagttgagagctccatgccggaggaccggaagagctcaactccgggtagcctacacgaggaaacgccccactcaagatctactcgcgaaaacacatcacgatgctccgccccagcgactgcactcctcatccagaaagcactagtccgcggaggcctcggcactctggccgctgacgccaactttataatggctacgggccaggcccttgcggatgcgtgtcagatggagcctgaagaggtcgaaatcatggctactgagctcctcaagggaagagaggccccagagggtatggcttcaagcttggggtgtttgaacctggggagttcgctcggaagcctggatcagcatcaggggagccaggagacactgattcccccaaggctgta

SEQ ID NO: 216641 - DNA, 4602 bp, synthetic construct
  misc_feature 1..4602: note = Description of Artificial Sequence: Synthetic coding sequence
  source 1..4602: mol_type = other DNA
atgaaaactcacctggaccgaccactggtggtcgagctaggcagggatggcgcacggggtcctgtgggcggaaaagcacgtcctgaggctgccgaagctccagagggagtcgatcctcccaggcgccaccatcgacatagagacaaagacaaaaccccggctgctggggaccaagatcgggctgaggccccaaaggcagaatcaggtgagcccggagccagagaggaaaggccaaggccccaccgctcacactccaaagaagcagccggaccgcctgaagcgcgttcagaaagggggagaggcccaggaccagagggcggtcgaagacaccatcgacgaggctcccccgaggaagcggctgagagagaacctaggcggcaccgggcacacagacaccaagatccttctaaggagtgtgcaggagccaaaggcgagcgaagggctagacatagaggcggacccagagctggaccacgggaggccgagtctggcgaggaacccgctaggagacatagggccaggcacaaggctcagccggctcacgaggctgtggaaaaggagacaacagagaaggaggccacagaaaaggaagccgaaatcgtcgaagcagataaagagaaggagcttcggaatcatcagccgcgtgagccccactgcgatttggagaccagtggaaccgtcacagtggggcctatgcataccttacccagcacatgcctccagaaagttgaggaacagcctgaggatgctgataatcagagaaatgtcacccgtatgggaagtcagcctccggatcctaacactattgtccacattcccgtgatgctgacaggaccactaggagaagctaccgtcgtgccatctggcaatgtggatctggagtcacaggccgaggggaaaaaggaggtagaggcagacgacgtgatgcgcagtggccctaggccaatcgtgccctactcctctatgttctgtctgtctcctacaaatctcctgcgtcgcttctgccactatattgtaactatgcggtattttgaggttgtgatcttggtagtaatcgctttaagctccattgctctcgcagctgaagatcccgtgcgaacagatagccctcggaataatgcactgaaatacctcgactatatctttacgggtgtgttcaccttcgagatggtgattaaaatgattgacctcggtctgcttctgcatcccggtgcttactttcgcgatttgtggaatattcttgatttcatagtggttagcggtgcgcttgtggccttcgcatttagcagcttcgtaggcggatctaagggtaaagatatcaatacaattaagtcacttagggtgctgcgcgtactgcgaccgctcaaaactatcaagcgtttacctaaacttaaggccgtgtttgattgtgtggtgaatagcctcaagaatgtgctcaatatcctgattgtatacatgctctttatgtttatatttgccgtcatcgccgtgcagctgttcaagggaaaatttttctactgcaccgacgagtcgaaagagctcgagcgcgactgtcgcggtcagtatctggactacgaaaaggaggaggtggaagcccagcccaggcagtggaagaagtatgactttcattacgacaatgtgctgtgggcactgctgacactgttcacagtgtctacaggagagggttggcctatggtgctcaaacattcagtcgatgccacttatgaagagcagggacccagtcccggatatcgcatggagcttagcattttctatgtggtatactttgtggttttccccttcttctttgtaaatatttttgtggcgctgataatcatcacattccaggagcagggagacaaggtcatgtctgaatgctcactagaaaaaaatgaacgcgcttgcatagatttcgcaattagtgcaaagcccttgactagatacatgccacagaaccggcagagcttccaatacaagacatggacgttcgttgtttccccgcctttcgagtatttcattatggcaatgatagcactgaacactgtcgtgcttatgatgaaattttacgacgccccatacgaatatgaactcatgctgaagtgtctgaatatcgtattcaccagtatgttttctatggagtgtgttctcaagattatcgcctttggcgtcctgaactatttccgggacgcctggaatgttttcgattttgtaactgtgctgggaagcatcacagacatactggtgactgagatagccaataatttcattaacctctcttttttacggttgtttagagcggcaaggcttatcaagcttctgcggcaaggatatactatccgaatcctcttgtggacattcgtccagagttttaaagccctgccctatgtttgcctgctcatcgctatgttgttcttcatctacgcaataattggcatgcaggtgttcggtaatatcgctctggacgatgatacgagcatcaacaggcacaataactttcgaacatttcttcaagccttaatgctcttgttcagatctgctacgggggaggcctggcatgaaatcatgctctcctgtctaagcaaccaggcatgtgatgaacaggccaacgccacagagtgcggatccgacttcgcgtacttctacttcgtgtcgttcatcttcctctgcagcttcctcatgctaaatctcttcgtggctgtgatcatggacaacttcgaatacctcaccagggattcatctatactcggcccacatcatttggatgagttcatacgagtgtgggccgaatatgaccctgcggcttgtggcaggatcagctataatgacatgtttgaaatgttaaagcatatgtctcctcccttaggactcggaaagaaatgtcccgcacgtgtcgcgtataaacgtctggtgcggatgaacatgccgattagcaatgaggatatgacggtccactttacctcaaccctcatggcactgattagaaccgctttggagatcaagctcgctcccgctggaactaagcagcaccagtgcgatgcagagctgaggaaagagatttcagtggtgtgggccaacttgcctcagaagactctggacctgctcgtaccgcctcataagccagacgaaatgacggtgggcaaggtctacgccgcacttatgatcttcgatttttacaagcagaataaaaccaccagggaccagatgcagcaggctccgggaggactttcacagatggggcctgtgagcctcttccaccccctgaaagccacactggagcaaactcagcctgcggtcttacgcggtgctagggtgttcttgcgtcagaagtcctcgacctcactaagcaacgggggagctatacagaaccaagaaagtggtattaaggaatccgtgtcatgggggacacagagaacacaggacgcccctcacgaggcgagacctcccctagaaagaggtcacagtacggagattcctgtcggacgctccggagccttagcggtagatgtgcaaatgcaatcgatcacgcgaagaggcccagatggggagccacagccaggcctcgagtcccagggcagagctgcctctatgccccgactcgctgctgagacacagcccgtgacggatgccagtccaatgaagcgatcaatatcaaccctggcacaacggcctagagggacacacctgtgtagcaccaccccggaccgacccccaccaagtcaggcctctagtcaccatcaccaccaccggtgtcaccgaaggcgtgataggaagcagagaagcctggagaaaggcccatctcttagtgcagacatggacggtgctccaagcagtgcagttggcccaggactgccccctggagaagggccaactggttgtcggagagaaagagaacgtcgacaggagcgcggacgatctcaggagcgcaggcaacctagctcttcttcttctgagaagcagaggttctattcctgcgatcggtttggaggcagagagccgccaaaacctaagccaagcttgtcctctcaccccacatcccccacggccggtcaggagcccggtccgcacccacaaggaagcggatccgtgaacgggtctccactgctctcgactagcggagcctccacgcccggacgcggtggaagacgccagttaccacagacaccactcactcctaggccaagtattacgtacaaaacagctaacagctcacctatccacttcgcaggtgcccagacctcattaccagcgttcagtcccggacggttgtccagggggctgagcgaacataatgcccttttgcaaagagaccctctgtctcagccactggcccctggatcgcgtatcggaagcgacccatatctaggacagcgcctggacagcgaggcatcagtgcacgcattaccagaggataccttaacgttcgaagaggccgtggcaactaacagtggcagaagcagccgaacatcttacgtgtcctcgttaactagccagagtcacccattgcggagggtgcctaacgggtatcactgtaccctgggcctgtcctccgggggtcgtgcccgtcactcataccaccatccagatcaagaccattggtgttat

SEQ ID NO: 216642 - DNA, 306 bp, synthetic construct
  misc_feature 1..306: note = Description of Artificial Sequence: Synthetic coding sequence
  source 1..306: mol_type = other DNA
gacaatttagctaacgcccaggaattaactaaagatgaggaagaaatggaagaggccgcaaatcagaaactggctctgcagaaagccaaagaggtggctgaggtgtcaccaatgagcgcggcaaatataagcatagccgcttttgtgaagcaggctcgtggcacagtcagccggagtagttccgtttcctcggtgaacagccctcgacagcagaattccgcgaaagcaagatccgtttgggagcaacgcgcttcacagttaaggctgcagaacttgagggctagctgtgaagcattgtactcctag

SEQ ID NO: 216643 - DNA, 6714 bp, synthetic construct
  misc_feature 1..6714: note = Description of Artificial Sequence: Synthetic coding sequence
  source 1..6714: mol_type = other DNA
atggtgcgctttggagatgagctgggaggcaggtacggtggcccaggtgggggtgagagggctcgtggcggtggggctggcggagccggtggcccaggccctggcggactgcagcctggccagagagttctgtacaagcagtctattgcgcagcgcgcaaggactatggccctgtacaacccaattcccgtgaagcagaactgcttcactgtgaatcggagtctgttcgtcttttcagaggataacgtcgtacgcaagtatgcaaagcgtatcaccgagtggccgccatttgaatacatgatcctggccacaattatagcaaattgtattgtgctagccctcgagcagcatctgcccgacggcgacaaaactcctatgtcggagaggctggatgataccgaaccttactttatcggcatattttgttttgaagctgggattaagattatcgctttaggattcgtgttccacaagggctcctatctccgcaatggatggaacgtgatggactttgtggtggtactcacaggcattttggcgaccgccggaacagacttcgacctgaggacccttcgagcagttcgagtgctgaggccactgaaactggtttccggaataccaagcttacaggttgtgctcaaaagtattatgaaagccatggtccctctcctgcaaatcgggctgttgctcttctttgccattcttatgtttgccatcataggactcgaattttatatgggcaaatttcataaagcctgtttccccaatagcactgacgcagagccagtgggagatttcccctgcggtaaggaggctcccgcaaggttgtgtgagggagacactgaatgtagggagtactggcctggacctaattttggcataacaaattttgataatattctctttgcaatactcaccgtctttcaatgtattactatggagggatggacggacatattatacaacacaaatgatgctgcgggaaacacttggaactggctgtactttatcccgcttattataatcggatccttttttatgcttaacctggtactcggcgtcctgtcaggagaattcgctaaggaaagagagagagtggaaaaccgcagggcgtttctgaaacttaggaggcagcaacagatcgagcgggagctgaatggatacctggagtggatctttaaagcagaagaggtgatgctggctgaagaggatcgtaacgcggaagaaaagagtcctctcgacgttctgaaaagagcagccacgaagaagtcacgcaacgatttaattcacgccgaggaaggagaggaccgctttgctgatctgtgtgcggtgggctcgccatttgccagagcgtctttgaagtccggcaagactgagtctagcagttattttcgcaggaaggagaaaatgttcagattttttattaggcgaatggtcaaggcacagtccttctactgggtagtgctctgcgttgtcgccttaaataccctctgcgtggctatggttcactataaccaacctcggagactcacaacaactttgtactttgcggagttcgtgttcctggggctatttcttactgagatgagtctaaagatgtatggactgggcccacgatcttactttcgcagttctttcaattgtttcgatttcggtgtgatcgttggaagcgtgtttgaggtagtctgggccgctattaagccgggttcttcattcggaatctcagtgctgcgggcactccgcctccttaggatctttaaggttactaagtactggagcagcttaagaaatttagtggtcagtctgctgaactcaatgaagagtattatttcacttctgtttctgttatttctcttcatcgtggtctttgctctgctgggcatgcagctgtttgggggtcaattcaacttccaggacgaaacaccgacaacgaatttcgatacttttcctgcagcaatactcaccgtatttcagatcctgaccggcgaggattggaacgcagtgatgtatcacggaatcgaatctcaaggcggtgtgagtaagggtatgttttccagcttctacttcatcgtgttgacactgttcggaaactacacgctgctgaatgtcttcctcgctatcgccgtggataacctggccaacgctcaagaactaaccaaggacgaagaggaaatggaggaggccgctaatcagaaactggcactgcagaaggccaaggaagtcgctgaggtctctcccatgtccgctgcgaacatatcgatcgccgctcgccaacagaacagcgcaaaggccaggtccgtgtgggagcagcgggcaagtcagctgcgactgcagaacttgcgtgcttcctgtgaggcactgtattcggaaatggatcctgaagagagattacggtttgctactacccgccacctacgacctgatatgaagacacacctagatcgtcccctcgtggtggaattggggagagacggagcccgtggccctgtggggggaaaggccaggcccgaagctgccgaggcccctgaaggagtggatccacccaggagacaccaccgccacagggataaggataagacccccgcagccggtgaccaggatagggccgaagcacctaaggccgaatcaggagagccgggagccagagaggaacggcctagaccacaccggtctcactccaaggaggctgccggaccccctgaagccaggtctgagaggggcaggggccctgggcctgaagggggaagaagacatcaccgcagaggctcccccgaagaggcggctgagagggagcccaggaggcatcgcgctcatagacatcaggacccttcaaaggagtgtgccggagctaagggtgagaggcgcgcacgccaccgtggcggacccagggcaggcccaagggaggccgagtccggcgaagagccggctcgtcggcacagggccaggcataaggctcagcctgcccacgaagcggtggaaaaggagaccaccgaaaaagaggccactgaaaaggaggcagaaattgtggaagctgataaggagaaagaacttcggaatcaccaaccgagggaaccgcactgcgatcttgagaccagcggaaccgtgacagtcggaccaatgcatacccttccttctacttgcctacagaaggtcgaagaacagcccgaggacgctgacaaccagaggaatgtgacccgcatgggtagccaaccgccagatcctaataccattgtgcatatccctgtgatgctgaccgggcctctgggtgaggccaccgttgtgccttctggcaacgtcgacctggagagccaggcagaggggaagaaggaagttgaggctgatgacgttatgagaagtggaccccgacccatcgtaccgtattcatccatgttctgtttgagcccaaccaacctcctgcgcaggttctgtcattacattgtgactatgaggtatttcgaggtcgttatcttagtggttatcgccctcagtagcattgctcttgccgctgaagatcctgtgaggacagactctcccaggaataacgcactcaaatatctggactatatttttactggagtgtttaccttcgaaatggttatcaagatgatcgacttgggtttgctgctgcatccaggcgcatacttcagagatttgtggaacatattggacttcattgtagtgagtggtgccctagtggcattcgccttctccggcagtaaggggaaggatatcaacactatcaagtccctgcgagtacttcgcgtgttgaggcctctgaaaacaatcaagaggctgcctaagcttaaagcagtgtttgattgcgtcgtgaactctctaaagaatgtattaaatatcctcattgtgtacatgctgtttatgttcatttttgctgtgatagcggtccaactctttaagggaaaatttttttactgtactgatgagtcaaaggagcttgagagagactgtaggggtcaatacctcgactacgaaaaggaggaggtcgaggcccaacccaggcagtggaaaaagtacgacttccattacgataacgtgctatgggccttactcacactatttaccgtttccacaggtgagggctggcctatggtgttaaagcactccgtagacgcgacttatgaggaacagggtcctagcccaggatacagaatggagctgtctattttttacgtcgtttattttgttgtgttccccttctttttcgtcaacatcttcgtggccctgattatcattacgttccaggaacagggggacaaggtgatgtcagaatgctccctagagaaaaatgagagagcttgtattgactttgccataagcgccaagcctctcacacggtatatgccacaaaatagacagtccttccagtataaaacgtggactttcgtggtttctcccccatttgagtacttcatcatggctatgattgccttaaatacggtggtactgatgatgaagttttacgatgccccatatgaatatgagctgatgctcaagtgtctgaatattgtgttcacctcaatgttcagcatggaatgtgtgttgaagataatcgcctttggtgtcttgaactattttcgcgatgcttggaacgtcttcgattttgtcaccgtgttgggtagcatcacagacatcctcgtgactgaaatcgccgaaactaacaattttatcaacctcagcttcctgaggctgtttagagctgccaggctcattaagctactgagacaaggatatacaataaggatactgctgtggacgttcgtgcaatcgttcaaggccctgccttacgtgtgcttgctcattgccatgctgtttttcatctatgcaataatcggaatgcaggtgttcggcaatatcgccctggatgacgacacctcaatcaaccgacacaacaacttccgaaccttcttgcaagcgcttatgctgctgtttcgctcagcaactggagaagcctggcacgaaatcatgctatcatgtctcagtaatcaggcctgcgacgagcaggccaacgccaccgaatgcggtagcgacttcgcgtatttttactttgtatctttcatttttctatgctcctttttgatgctcaacctgttcgtggctgtgattatggataatttcgaatacctcacacgggattcctccatactgggacctcaccatctggatgagtttatcagggtctgggccgaatatgatccagctgcatgcggaagaatttcttataatgacatgtttgaaatgctgaaacacatgagcccgccactggggttaggtaaaaagtgtccagccagggtcgcttataaaaggttggtgagaatgaatatgccaatatccaatgaagacatgacagtgcattttacttcaacacttatggctcttattcgcacggccctcgagatcaagttagctcctgccggaaccaaacaacaccagtgcgacgccgaactgcgtaaagagatcagcgtcgtctgggctaatttgccccagaaaactctcgacttgttggtgcctcctcataagcctgatgagatgaccgtgggaaaggtttatgccgctctcatgatatttgacttttataagcagaacaagacgacgcgggaccagatgcagcaagcgccaggagggctgtctcagatggggcctgtttctctgttccacccgctgaaggctaccctcgaacaaactcagcccgctgtcttgcgtggcgctagggttttcctccgccagaagagctcaacatcgctcagcaacggtggagcgatccagaaccaggaatcagggattaaggagagcgtgagttggggcacgcaaaggacccaggacgcaccccacgaggcacgtccacctctggaacggggtcacagcacggagatacccgtaggaagaagtggcgctcttgcagtggatgtgcagatgcagtctatcactagaagagggccagacggagaaccacagccgggactagagagtcagggcagagccgctagcatgccccgattagcggctgagactcaaccagtcacagatgcctcacctatgaagcgctcaatctctaccctggctcagaggccaagggggacccacctgtgcagtactacgcccgaccggccacctccgtcacaagcctcatctcaccaccatcatcatagatgtcataggcgccgtgatcggaagcaacgatccctcgaaaaaggacctagcctgagtgccgacatggatggggctcctagtagcgccgttggacctgggttgccacctggcgaggggcctactggatgtcggagggagagagaaagacgccaggagcggggaaggagtcaggaacggaggcaacctagctcgagctctagcgagaaacagcgcttctactcgtgtgaccggttcggcggaagggaacctccaaagcctaaacccagcttgagctctcaccccacctctccaacagcaggccaagaacctggtccgcatcctcaggcaggctcggcagtgggcttccccaacactactccctgttgccgcgaaaccccctcagcctctccttggcctctggcactggagttggcactaactctgacttgggggtctgtgtggaccgtgcgaccactcagcactccttgtctgcgcaccctcagcctctctcgtcggttgtggcctccaacacgagctgccccaccagggctgcccacctgtcctccataa

SEQ ID NO: 216644 - DNA, 7022 bp, synthetic construct
  misc_feature 1..7022: note = Description of Artificial Sequence: Synthetic coding sequence
  source 1..7022: mol_type = other DNA
atggtccgattcggcgacgagctgggaggacgctatgggggaccagggggtggcgagagggccaggggagggggtgccggtggggcagggggacccggacctgggggtctgcaacccggacagagagtgctgtataaacagtccatcgcccagcgcgctagaacaatggctctctacaatcctattcccgtgaaacagaattgtttcactgtcaatcgatccctcttcgtgttttccgaggacaacgttgttcgaaagtatgccaagcgtataaccgaatggccaccatttgaatatatgatactggctaccatcattgccaattgtatagttttagctctggagcagcacctgcccgacggagataaaaccccaatgtccgagcgtttagacgacaccgaaccatactttatcggcatcttctgctttgaggcaggcatcaaaatcattgcactcggattcgtgttccacaagggttcttacctccggaacggctggaatgtgatggacttcgtggtagtcctgaccggaatccttgccaccgctggaacagatttcgatctgcgaacccttagagcagtccgggttctcaggccactcaaacttgtttccggaatcccctctctccaggtggtattgaagtctattatgaaagccatggtacctctattgcagatcggcctgctcctgttttttgctatcctgatgtttgccataattggccttgagttttatatggggaaattccacaaggcctgcttcccaaattccactgatgccgagcctgtgggggactttccatgcgggaaggaagcaccagcccgtctgtgtgagggcgatactgagtgccgcgagtactggcccggacctaattttggtatcacaaattttgataatatcctcttcgccatcctgactgtgttccaatgtatcaccatggaaggctggactgacattttgtacaatacaaatgatgccgcaggaaatacatggaactggctatattttatccctcttatcattattggctcctttttcatgctgaatctggtcttgggagtgttatccggtgagttcgctaaggaacgggagagagtcgaaaacagacgggcatttctgaagctgcggcgacagcagcagatagaacgcgaactgaatggataccttgaatggatatttaaggctgaggaagtcatgctcgcagaagaggatcgaaatgccgaagagaaatccccacttgacgctgtactgaagagggccgcaactaagaaaagtcgcaatgatttaatccatgccgaggagggagaggatcggtttgctgatctgtgtgccgtgggatcgcctttcgctcgagcatctctaaagtccggaaagacagaaagcagcagctacttccggaggaaagagaagatgttcagattcttcattcgcagaatggttaaggcgcagagcttttactgggtggttctgtgcgtggttgctctgaataccctctgtgtagccatggttcactataatcagccacggaggttgacaactacactctacttcgccgagttcgtgttcctcgggctctttctgactgaaatgtctctgaaaatgtacggcctgggacctcgatcgtatttccgcagcagctttaactgttttgactttggcgtgatcgtgggtagtgtgttcgaggtggtctgggcagccatcaaacccggaagctctttcggcatttccgtacttcgggctctcaggctgcttcggatctttaaagtgacgaagtactggtcgtctttgagaaaccttgtcgttagtttgctcaattccatgaagagcatcatcagtctgctgtttctcctgtttcttttcatcgtggtgtttgccctcctggggatgcagttgtttggaggtcaatttaactttcaggacgagacgcctacgaccaactttgatacattcccggcagccatcctgacggttttccagattctaaccggagaggattggaacgccgtcatgtaccacggaattgaatcccagggtggtgtgtccaaaggcatgttttctagcttctatttcatagtgctgacactcttcgggaattacaccctgctgaatgtattccttgccatcgcagttgataacctggccaacgctcaggagcttacgaaagacgaggaagaaatggaagaggcagctaaccaaaagctggcattgcagaaagctaaagaagtggcagaggtaagtccaatgagtgcggctaacatcagcattgctgccagacagcagaatagtgccaaggcacgctccgtttgggagcaacgcgctagccagcttcgtctacaaaatctgcgcgcaagctgtgaggctctttactccgagatggaccctgaagaaaggcttagatttgctaccacacgccatctgagacctgatatgaaaacacaccttgaccggcctttagtggtcgagctagggagggatggtgcacgcggtccagttggcggtaaggctcggcctgaggccgcagaggcccctgaaggtgtcgacccccctcgcagacaccaccgccaccgggataaggataagactcccgctgctggagaccaagaccgtgcagaagctccgaaggcagagtcgggcgaacctggggcaagagaagagcgaccccgaccgcaccggagtcactctaaggaagcagccggtccgccagaagcgcgttcggaacgcggacggggaccgggacccgagggtggtaggcggcatcaccgcagagggagccccgaggaagctgcagagcgagagcccagaaggcaccgtgcccacaggcaccaggacccctccaaggagtgtgctggagccaagggggaaaggcgggcacggcaccgaggtgggcctcgtgccggacctagggaagcggagtcgggcgaggagccagcccgaaggcaccgggcacgccacaaggcacaaccagcgcatgaagctgttgagaaggaaacgactgaaaaagaagccaccgaaaaagaggcagagatcgttgaggcagataaggaaaaagagctgagaaatcatcagcccagggaaccacactgcgatctcgaaacttccggtaccgtgacagttgggccaatgcacactcttccaagcacttgcctccaaaaggtagaggagcaacctgaagacgcagataaccagcgaaacgtaacgcgcatggggagccagccacccgacccaaacacaatcgtgcacatccctgtgatgctcacgggcccactcggtgaagctaccgtcgttccaagcggaaacgtcgacctagaatctcaggcagaaggaaagaaggaagtggaagccgatgatgtcatgagaagtgggccaagacctatagtcccctattcaagcatgttctgcttgtcccccaccaaccttctgcgacggttttgccattacatcgtcaccatgcgatactttgaggtggtcatccttgtcgtcatcgccctttcatccatagctctggccgctgaggatcccgtaagaacagattccccacggaataacgccttgaagtatctggactatatctttaccggagtgttcacatttgaaatggtaatcaagatgattgatcttggactcctcttacacccgggagcctacttcagggatctctggaatatcctggactttatcgttgttagcggcgcactggttgccttcgctttctcagggtccaagggaaaggacattaacacaattaagagtctacgggttctgcgggttctgcggccactgaaaaccataaaacggttgcccaagctgaaagccgtcttcgattgtgtcgtcaatagcctgaaaaacgtcttaaatattctgatcgtgtatatgctctttatgttcatcttcgcagtcatagccgtgcagctgtttaagggtaagtttttctattgcacagatgagtccaaggagctggaaagagactgccggggacagtatttagattacgaaaaggaagaggtggaggcccaacctcgccagtggaagaaatacgatttccactacgataacgtgctgtgggccttgctaactcttttcaccgtctcgacaggagagggttggccgatggtcctgaaacactccgttgatgcaacctacgaagaacaggggccatcccctgggtatcgtatggaactctcaatcttttatgtcgtctactttgttgtattcccttttttctttgtcaacattttcgtggcgctaatcattattacgttccaagagcagggcgacaaggtaatgagcgaatgctccctcgagaagaacgagagagcctgcatcgactttgcgatttccgcaaagcctttaactaggtacatgcctcagaatcgccagtcttttcagtacaagacttggaccttcgtggtgagtcctccatttgaatactttatcatggctatgattgctttaaacaccgttgtgctcatgatgaagttttacgacgctccatacgagtatgaactgatgctcaagtgtctgaacattgttttcacctcgatgttcagcatggagtgcgtcttgaagattatagcttttggggtgctgaactattttcgcgatgcatggaacgtcttcgactttgtgacggtcctgggctctattactgacatacttgtcacggaaatcgccgaaactaacaacttcatcaatttgtcttttctgcggctctttagggccgcaagactgattaagctccttaggcagggctataccatcagaatcctcctgtggaccttcgtgcaatcattcaaggctctgccttacgtctgcctgcttattgctatgttatttttcatctacgccattataggaatgcaggtcttcggtaacatcgcactagatgatgacacatctatcaatagacacaacaactttcggacattccttcaggcacttatgctgctgttcagaagcgccacaggtgaggcttggcacgagatcatgctgagctgcctgagtaatcaagcctgcgacgaacaggcaaatgctaccgagtgcggctcagactttgcctacttctacttcgtatcttttatattcctctgttccttcctaatgctcaatctgttcgtcgccgttattatggacaattttgagtaccttacacgagactcttccattcttggccctcaccatctcgatgagttcataagggtttgggctgaatacgatcccgctgcttgcggacgaattagttataatgacatgttcgaaatgttgaaacacatgtctcccccacttgggcttggaaaaaaatgtccagccagggtggcctacaagagactggtgaggatgaatatgccaattagcaatgaagatatgaccgttcatttcacttcaacactcatggcgcttattagaacggcccttgaaatcaaattggccccagccggtactaaacagcatcaatgtgatgcagagttaaggaaggagatctccgttgtctgggccaatctacctcagaaaacccttgacctgctcgttccccctcacaagcctgatgagatgacagtcggcaaagtatatgccgctctgatgatcttcgacttctataagcagaacaagacaacacgggaccagatgcagcaggctcctggtggattaagtcagatgggcccagtctccctcttccaccccctgaaagctaccctggaacagacccaaccagccgtgctaaggggcgcacgagtgtttctcaggcagaaatcatctaccagcctgtctaatggcggtgcaattcagaaccaagagtccggtatcaaagagtccgtgtcttggggtacgcagcgcacccaagacgctccccatgaggcgagaccacctctggagcggggtcattcgactgagatccccgttgggcgatccggggctcttgctgttgatgtccagatgcagtcaattacacggagaggtcctgacggagagccccagcccggactggagtcccagggacgcgctgccagcatgccacggctagccgcagaaacccagcccgtcaccgatgctagcccaatgaagaggtctatttctaccctggcccagcgtcccaggggcacccacctgtgctccactactcctgataggccccctccatctcaagcctcaagccaccatcatcaccacaggtgccatcggagacgggacagaaagcagcgttctctggagaaagggccatcactgtcagccgatatggacggtgccccaagctctgccgtgggtccagggctgcccccaggggaaggaccaaccggttgcagacgcgaaagggagcgtcggcaggagcgagggaggagccaggagcgacgccagccttcctcctcttcctctgagaagcagaggttctacagctgtgacaggttcggcggtagagagccccctaagccgaagccttcattgagctcccatcccacgagccccactgccggtcaagagcctggaccccatcctcagggaagtggtagtgttaatgggtcccccctcctgagtacttctggcgcttcaactccaggcagggggggaaggcgacagctgccccagactcctctaactcctagaccctcgatcacctacaagaccgccaattctagtccaattcactttgctggagcgcagacatctcttcccgctttcagccctggtcggttaagccgcggactgagcgagcacaatgccttgctgcagcgggacccccttagtcaacctctggcccctggaagtaggattggatctgacccgtatctcggacaacgcctggattccgaggcatccgtgcacgcactgcctgaagatactttaacctttgaagaagctgtggccacgaatagtggaaggagcagcaggacgtcctacgtgagctctctgacctcgcagtcacatcctctgagacgggtgcctaatgggtatcactgtacgttaggattgtcttcaggcggacgggcacgtcacagctaccaccaccccgaccaggatcactggtgtta

SEQ ID NO: 216645 - DNA, 7016 bp, synthetic construct
  misc_feature 1..7016: note = Description of Artificial Sequence: Synthetic coding sequence
  source 1..7016: mol_type = other DNA
atggtcaggttcggagatgagctgggcggaaggtacggcggacctggaggcggtgagcgggcacgcggaggtggtgcaggtggggcaggaggccctggcccaggcggtctgcagccaggccaaagagtgctctataagcaatccatcgcccaacgggcaagaaccatggcgctgtacaatccaattcccgtcaaacagaactgctttactgtcaatcgctccctgttcgtgtttagcgaagataacgtggttcggaaatacgcaaagcggatcaccgagtggccaccctttgaatacatgattctcgctacgatcatcgcaaattgtatagtgctggcgctggaacaacacctgcctgatggtgacaaaacgccaatgagcgaacggctggacgacaccgagccttacttcataggcattttctgcttcgaagctggtataaaaatcatagccctgggtttcgtttttcacaagggttcatatctgcgtaacggatggaatgtaatggactttgtggtggtgctaacgggcatccttgctaccgccggaactgactttgatttgcgcactcttcgtgccgtcagggtattgagaccactcaagctggtgtcaggaatcccgtctttgcaggtggtgctgaagtctatcatgaaagcaatggtgcctcttctgcaaatcgggctgctcctctttttcgctattctcatgttcgctattatcggcctggaattctacatgggcaagttccacaaggcatgttttccaaactcaacagatgctgagccagtgggagattttccttgcggtaaagaagcaccagcccgtctttgcgagggcgacactgagtgccgcgaatactggccaggcccaaattttggcatcactaactttgacaacatactgtttgccatcctgacagttttccagtgcatcactatggagggatggacagacattctgtataatacaaatgatgcggctggcaatacttggaactggctgtatttcattccgcttattattataggttcattcttcatgttgaatctcgtcttgggagtgctctcaggcgagttcgccaaggaaagggagcgggtggagaacaggcgcgctttcctaaaactccgtaggcaacaacaaattgagcgcgaactgaacgggtacctggagtggatcttcaaggccgaagaggtgatgctcgcagaagaggacaggaacgccgaggagaagtcaccccttgatgccgtccttaagagagcggctacaaaaaagagcaggaacgatctgatacacgcggaagaaggagaggaccggttcgcggacctgtgtgctgtgggatccccgttcgcaagagcaagcttgaagtctggcaagaccgagtcctccagttacttccgtaggaaagaaaaaatgttcaggttctttattcggagaatggtcaaggctcagtccttctactgggtagtgctgtgcgtggtggcactcaacaccctttgtgtggcgatggttcactataatcagcctcggaggctcacgacaacgctgtacttcgcagagttcgtatttctgggcctgtttttgaccgagatgtcactgaaaatgtatggcttgggacctaggtcctattttcggtcaagcttcaactgttttgacttcggagttatcgtgggatccgtcttcgaagtagtgtgggctgccattaagcccggttcgtcattcggcatttctgttctccgcgctctcaggctactccggatcttcaaagtgacaaagtactggtcatcgttacggaatctcgtggtcagcctcctgaacagtatgaagtctattataagcctcctgttcctcctattcctcttcatcgtggtgtttgctctcctgggaatgcagttatttggtggacagtttaatttccaggacgaaaccccaacaaccaacttcgacacgtttcccgctgcaatcctgactgtgtttcaaatccttaccggggaggattggaacgcagtaatgtatcatggtattgagagtcagggaggcgtgtctaaaggtatgttttcctctttttatttcatcgtgctgacactgttcggaaattacacgttgcttaacgtatttctcgcaatcgccgttgataatctggccaacgctcaggagctgactaaagacgaggaagagatggaggaagctgctaaccagaagttagctctccagaaggcaaaggaggtggctgaggtgagcccaatgtccgcagctaacatctccatagcagcgcgacagcagaactccgcaaaagccagatccgtctgggaacagcgcgcatctcagttacggctgcagaacttgcgagcttcatgcgaggccttgtatagtgagatggaccctgaggaaaggttgcgcttcgccaccacgaggcatctgagacccgacatgaaaacccatctggatcgaccactggtggttgagctgggcagggacggcgctcgcggacccgtggggggaaaggcgagaccagaggctgctgaggccccagaaggggtggacccgccacggagacatcacaggcacagggataaggacaagactcccgctgctggcgatcaggatagagcagaggctccgaaggccgaatcaggcgagcccggagcacgcgaggaaagacccagacctcacagatcacatagtaaagaagcagcgggtcctcctgaggcgagaagcgagcggggacggggaccaggcccagagggaggacgcaggcaccacagacgtggcagcccagaggaggccgcagaacgtgaacctcgcaggcacagggcacaccgtcaccaggaccccagtaaagagtgtgccggagcaaaaggcgaacgccgtgctaggcaccggggagggcctcgagctggccctcgggaagccgagtccggagaggagcccgcacggcgacaccgggcaaggcataaggcgcagccggctcacgaggccgtggagaaggagacgaccgaaaaggaagccactgagaaggaggccgagatcgtcgaggcagataaagagaaggaactccggaaccaccagcctagagagcctcactgtgacctagagactagtggcactgttacagtgggcccaatgcatacactccccagtacttgtcttcaaaaagtagaggaacagccagaggacgccgataatcagcgcaacgtaactcgcatgggcagccagcctcccgatcccaatacaattgtgcatattcccgtgatgttaactgggcctctgggggaggctactgtcgtcccatctgggaacgtggacctggagtctcaggccgagggcaaaaaagaagtggaggccgatgacgtcatgagaagtgggcctcggcctatagtgccatacagctccatgttctgcttatccccaaccaatttgctgaggcgcttctgtcactatatagtgaccatgcgttacttcgaggtggtgatcctggtcgttatagcgttatccagcattgccttggctgccgaagacccagtgaggaccgactctccaagaaataatgccctgaaatatcttgactacatctttactggggtcttcacctttgaaatggtcattaaaatgatcgatttaggtctgctattgcatccaggggcatacttccgggacctgtggaacattctggactttattgttgtgtcaggggcactggtggcattcgcattctccggaagtaaaggtaaggatatcaacacgatcaaaagtctgcgagttctccgagtactgagaccactgaagacaatcaagcgcctaccaaaactgaaggctgtgttcgactgtgttgtgaactctttgaaaaacgttctcaacatcctaattgtttacatgcttttcatgttcatcttcgctgttatcgctgttcagctttttaaaggaaagttcttttattgcaccgatgaaagcaaagagttggagcgagactgtagaggacaatatctcgactatgagaaggaggaggtggaggcacaacctcgacagtggaaaaagtatgattttcactatgataatgtcctgtgggcactccttacccttttcaccgtcagtacaggtgaaggctggccaatggtcctgaagcattccgtggatgccacgtacgaagagcaggggcctagcccgggatatcggatggaactgagtatcttctacgtagtctacttcgtggtattcccctttttcttcgtaaatatctttgtggctctgattataataacatttcaggaacagggggacaaggtcatgtcagaatgcagtctagagaaaaacgagagggcatgcattgatttcgccatctccgccaagcccctgacccgctacatgccacagaatcggcagagtttccagtacaagacctggaccttcgttgtatcccctccctttgagtacttcattatggccatgatcgccctgaatactgttgtcttaatgatgaaattctacgacgcaccctacgaatatgaattgatgctgaaatgcctaaatatagtttttacaagtatgttcagtatggaatgtgtcctgaaaattattgccttcggggtactgaactactttcgggatgcttggaatgtgtttgattttgtcactgtgctgggatctattacagacatcctggtaaccgagattgcaaacaattttataaatctgagctttctcaggttattccgagcagccaggctgatcaaactcctgagacaggggtacacaattcgcatcctattgtggacttttgttcagagcttcaaagcattaccctatgtatgcctcctgatagccatgctgttttttatctacgctattattggcatgcaggtgttcggcaatatcgccctcgatgatgacactagcatcaataggcacaataatttccggactttcctgcaagctctcatgcttctatttcgaagtgcaaccggcgaagcctggcacgagattatgttgtcgtgcctttctaaccaggcttgtgacgagcaggctaatgctactgagtgtggatctgactttgcctacttttactttgtgagcttcatttttttgtgttctttcctcatgcttaatcttttcgtggcagtaataatggataattttgaatatctgactcgcgatagttcaatcctagggccacaccatctggacgaatttatcagagtctgggctgagtatgatcctgctgcctgcgggcgaatatcttataacgatatgttcgaaatgctgaaacacatgagtccaccacttgggctgggcaaaaagtgtccggcacgggtggcctacaagcggttggtacggatgaatatgccaatcagcaatgaggacatgacggtccattttaccagtaccctgatggctcttattcggaccgcccttgagatcaagctcgcccctgcaggaaccaagcagcaccagtgtgacgccgagttgcgcaaggaaattagcgtcgtctgggccaacctcccacagaagaccctggacctgctggtgccccctcacaagcctgatgagatgacggttggaaaggtctacgcggctcttatgatctttgacttttacaaacagaacaaaacaactagagaccagatgcagcaagcacccggtgggttgagccagatgggtcccgtctccctatttcaccccctgaaagcaacgctggagcagactcagccagcagttctgaggggtgcgcgagtgttcctacggcagaagagttccacatcgctgtccaacgggggtgcaatccagaaccaggagagcggaataaaggagtccgtctcatgggggacccagcggacccaggatgcaccgcatgaggcacggccacctttggagcggggtcattcaaccgaaatccctgtggggaggtcgggagcactggccgtagatgtacagatgcaaagtattacacgcaggggcccagacggcgagccacagccaggcctggagagccaggggagagccgcatccatgccgagactcgctgccgaaacacaaccagtgaccgatgcctcacccatgaaaagaagcatcagtacactcgcccagaggccaagaggtacacacctgtgtagcaccaccccagaccgcccacccccaagccaagccagttcccatcaccatcaccacagatgccatcggcgtagggaccggaagcagcggtcacttgaaaagggtcctagcctctccgccgacatggatggtgcgccatccagcgcagtggggcctggcctgccacccggagagggccctaccgggtgccggagggagcgggaacgcaggcaagaacggggtcgttcacaggagcgtcgacagccttccagcagctcctccgagaaacaaaggttttactcttgcgaccggttcggcggacgagagccaccaaaaccaaaacctagcctgagcagccatccgacgtcacccacggctgggcaagaacctggaccccacccccagggatccggctctgttaacgggtcacccttgctcagtactagtggggcttcgaccccaggacggggaggacggcgtcaactgccacagactcctctgacacctcgcccatccattacttataagaccgccaatagctcacccatccatttcgcaggcgctcaaacctctttgccggctttttctcccggaaggctctctagaggactttcagagcacaacgccctactgcagcgagacccactgagccaaccactcgccccaggctcacgcatcgggtctgatccttatctgggccagcgcctggactctgaggccagcgtgcacgccttaccggaggataccctgacattcgaagaggctgtggctactaacagcggacggtcaagtagaacctcgtacgtgtctagcttgacaagccagtctcacccccttcggagagtgccgaacgggtaccattgtacattggggctctccagcgggggacgtgctcgtcacagctaccaccatcccgaccaagatcactggtgcta

SEQ ID NO: 216646 - DNA, 7013 bp, synthetic construct
  misc_feature 1..7013: note = Description of Artificial Sequence: Synthetic coding sequence
  source 1..7013: mol_type = other DNA
atggtgcgattcggagatgagctgggaggccgttacgggggaccagggggaggggagagagctagggggggaggcgctggcggagccggtggacccggtccaggaggcctccaacccggacagagagttctttataaacaatccatcgctcagagggcccgtaccatggctctgtacaatcctatacccgtcaaacagaactgttttaccgtgaatcgtagccttttcgtattctcagaggataatgtggtgaggaagtacgcaaaacgcatcaccgagtggcccccatttgagtacatgattctggctactatcatcgctaactgcatcgtgctggcgctcgaacagcacctgcccgacggcgacaagacacccatgtcagaaagactagatgacacggagccctactttattggaatcttttgctttgaagccggaatcaagattatcgccctcgggtttgtttttcacaagggatcttatctaagaaacggatggaatgttatggatttcgtggtggtgctgacaggcatactcgcgactgccggtacagacttcgacctgcgaaccctgcgcgctgtcagagtcctcaggccacttaaactagttagcggaatcccatctttgcaggtggtcctaaagagtattatgaaggccatggtacctctgttacaaatcggactcttgctcttctttgccatcctaatgtttgctataatcggactggaattctacatgggtaagttccataaagcttgcttcccaaactccaccgacgccgagccagtcggggattttccctgcggcaaagaagcaccggcaaggttgtgcgaaggcgatactgaatgcagggaatactggccagggccaaacttcggaatcactaatttcgataacattctgtttgcaatcctgaccgtgttccaatgcattacgatggagggttggaccgacatcctgtataacactaatgatgccgctggtaatacgtggaactggctatactttatccccttaataatcatcggaagcttcttcatgctgaacttggtgctgggggttctatccggtgagtttgctaaagagagagagagagtggagaataggcgtgcattcctcaaattgcgcagacagcagcaaattgagagggaactcaacggctacttggagtggatttttaaggccgaggaagtcatgctggctgaggaagaccgcaacgctgaagagaagtccccactggacgtgctgaaaagagctgcaactaaaaagtctcgtaatgacctgattcacgccgaggagggggaagatcgattcgccgacctgtgcgcggtgggctcgccattcgcgagagcctcgttgaaatccggcaagaccgagagctcttcatacttcagacgcaaggaaaaaatgttccggttcttcattcgtcgtatggtgaaagctcagtctttttattgggtagtgctctgtgtggtcgcactgaacaccttatgtgtagctatggtacactataatcagcccagacggttgacgactacattatacttcgcagagttcgttttcttaggattattccttacggagatgagtcttaagatgtatggcctggggccacgcagctacttccgctccagctttaactgcttcgattttggagtcatagtgggcagcgtattcgaggtggtttgggctgccataaaaccaggcagctcattcggcatcagtgtgctgcgcgctttgcgcctcctccggatttttaaagtcacaaagtactggagcagcctgcggaacctggtggtctccctgctaaactccatgaaatccattatttctctcttatttctcctttttttgttcattgtggtgttcgccctcctcggcatgcaactcttcggaggccagtttaacttccaggacgaaacgcccaccaccaacttcgatacctttcctgccgctattctgactgtcttccaaatcctgaccggtgaggactggaacgcagttatgtatcatgggatcgagtcgcaggggggagtctccaaaggcatgttttctagtttttattttatcgtgctcaccttgtttggtaattacaccctcctgaacgtcttcctggcaattgccgtcgataatctggccaatgcacaagaattaaccaaagatgaggaagagatggaagaggcggcaaaccagaagttggcattgcagaaagccaaagaagtggctgaagtatcccctatgtctgctgcaaacatttctatcgcagcaagacagcaaaactcagccaaggccagatcggtgtgggaacagcgtgcctcgcagctcaggctccaaaacctgcgcgcatcttgcgaggccttgtacagcgagatggatcccgaggagaggttaaggtttgccacgacccgccacctgaggccagacatgaaaacccaccttgatcggcctcttgtagtggagctgggacgagacggtgcacggggacctgtcggcggtaaggcacgtccagaggcggctgaagcccctgaaggcgtcgatccgccacgtaggcatcatcgccatcgcgacaaagataaaacccccgcagctggtgatcaggatagggccgaggctccgaaggctgaatctggtgaacccggtgccagagaggagcgacccagaccacaccgctctcacagcaaggaggcagctggaccgccagaggcacggagcgagcgtgggagaggccctggtccagaaggagggagacgacaccaccgcagagggagccctgaagaggccgctgaacgagagccacgacgtcaccgcgctcaccgacatcaggacccctctaaggagtgcgctggcgctaaaggggagagaagggccagacacagggggggacccagagccggtccaagggaggccgaaagcggtgaagagcctgcaagaagacaccgcgcacgccataaagcccaacccgcacatgaagccgtggaaaaggagaccacagaaaaagaagccactgagaaagaggcagaaatagtggaggctgacaaagagaaagaacttagaaatcatcaaccccgagaaccacattgcgaccttgagacaagtggtacagtcactgtagggccaatgcacaccctgccatccacctgcctgcaaaaggtggaggaacagccagaagatgctgacaatcaaagaaacgtaactcgcatggggtcacagccccctgacccaaacaccatagtgcatattccagtgatgttaacgggacctcttggcgaggcgacagtcgtacccagtgggaacgtcgatttggaatcccaggctgaggggaagaaagaggtcgaggcagatgacgtgatgcgttccggaccgaggccaattgtgccttactcatccatgttctgtctaagcccaaccaatctgctgagacgtttttgccattacatcgtgaccatgcgatacttcgaggttgttatactcgtcgtgattgctctctcctccatcgccctagcggcagaagatcccgtaagaacggactctcccaggaataatgccttgaaatacctcgattacatattcacaggcgtgttcacgttcgagatggtgatcaagatgatcgatctcggactcttgctgcatccaggtgcttatttcagggacctgtggaatattctcgatttcatcgtcgtcagtggtgctcttgtcgccttcgccttttcaggatccaaaggtaaggacattaacacgataaaaagcttgagggtcctccgggtgcttcggcctcttaaaacaataaaacggctaccgaaactgaaggccgtatttgactgtgtcgtcaatagtcttaagaacgtgctgaatatattaattgtttacatgcttttcatgttcatttttgcagtgattgccgtccagctgttcaaaggtaagtttttttattgcaccgacgagtcaaaggaactcgagcgagactgcaggggccagtatctggattacgaaaaagaagaggtcgaggctcaaccacgccagtggaaaaagtacgattttcactacgacaatgttctctgggcactcctaactctgttcactgtctcgacaggcgaagggtggccaatggttctcaagcacagtgtggacgccacttatgaggaacagggtccgagtcctggttaccgtatggagctgtcaatcttttacgtggtctacttcgtggtgttcccattttttttcgtgaacattttcgtagctctcattataattactttccaggagcaaggcgataaagtcatgagcgagtgctccctggagaagaatgaaagggcttgtattgactttgcaatcagcgctaaacctctgacaaggtatatgccgcagaatcgccagagctttcaatataagacttggacctttgtggtatcccccccattcgagtattttatcatggctatgattgccctgaacacagttgtcctgatgatgaagttttatgatgccccatatgaatacgaactcatgctgaaatgcctcaacattgtttttacttctatgttctctatggagtgcgtgctgaaaattatcgctttcggagtcctaaactatttccgtgacgcctggaatgtgttcgactttgtgacagtcctcggttcaatcacggacatacttgttacagaaattgccaacaatttcataaatttatcttttctgcgcttgttccgggctgcaaggctcatcaagttgctgcggcaaggctatactatccgaatactactgtggaccttcgtccagtcttttaaggctctcccttatgtgtgcctgcttatcgctatgctcttcttcatctacgcgatcatcggtatgcaggtgtttggcaatatagcattggatgatgacaccagtattaacagacacaataacttcaggactttcttacaagccctgatgctactgtttcgctcagcaacaggtgaagcgtggcatgagattatgctgtcatgtctgtccaaccaggcctgcgatgaacaggctaacgccacagaatgtggatccgacttcgcctatttttattttgtgtcattcatcttcctatgcagttttcttatgctgaatctgtttgtggcggtcattatggacaactttgagtacctgacacgggattcttctattctggggccacatcacttagatgaatttatcagggtgtgggcagaatatgacccagccgcttgcgggcgaatctcatacaatgacatgttcgaaatgctgaaacatatgagccccccactgggactggggaagaagtgtcctgccagagtcgcttataaaaggttggtgcgcatgaatatgcctataagcaacgaagacatgactgtgcatttcaccagtactctaatggcgttgattaggactgccctcgagatcaagttggctcccgctgggaccaagcagcatcaatgcgatgcagagcttcggaaagagatttctgtcgtctgggccaatctaccccagaagactctggatcttttggttcctccacataagccggacgaaatgacagtgggaaaagtctacgcagccctgatgatttttgatttttacaagcagaataagaccactcgcgatcagatgcagcaggctccagggggtctgagccagatgggaccggtgtccctgttccatccattgaaagccacactggaacagacccaacccgcagtccttagaggagctcgcgtgttccttcgccagaagagtagcacaagcctcagtaatggtggagcaatccagaatcaagaatcagggattaaggagagcgtgtcttgggggacacagagaactcaggatgcgccacacgaggcaaggccaccgctcgagcgaggccactctacagagatcccagtcggacgttcgggagctctcgccgttgatgtgcagatgcagagtattacccgtagaggccctgacggagaaccgcagcccggacttgagtcccaggggcgtgccgctagcatgcctaggttagcagcagaaacacagcctgtgacggacgcatcacctatgaaacgttcaattagtactctggctcagaggcccagagggacccatctctgttccactacacctgataggcctccaccctcgcaggccagttcccaccaccaccaccatcgctgccatcggaggcgggatagaaagcagcgaagcctcgaaaaggggcctagcctctccgccgatatggacggtgcgccatccagtgctgttgggcctggtctcccccctggcgaggggcctacggggtgtagacgagaacgagaacggaggcaggaacgaggacgcagtcaagaaaggcgtcaacccagctcatcctcttcagagaagcaacgcttctattcatgcgatcgcttcgggggtagagagcctcctaagcctaagccctctctaagttcacatcctacttctccaaccgcaggccaggaaccgggacctcatccccagggaagtggttcagtcaatggatcacctctacttagcacctccggagcctcaactcctggtcggggaggcagacggcaacttccgcagacgccgttaacacctcgaccaagcatcacgtataagactgcgaacagttccccaattcacttcgctggcgctcagacctcgttacctgccttttccccagggaggctgagccgcggtctgtccgaacacaacgcgctgcttcagagggaccccttgagccagccattggccccaggttctcgcatcgggagcgatccttacctcggccagcgtctggatagtgaggcgagcgtgcatgccctccccgaagacacgctgactttcgaagaagctgtggcaactaatagcggcagaagtagtcgcaccagctacgtcagtagcctcacttctcagagccatccgctgcggagggtgccaaacggataccattgcaccctcggactttcatcaggaggacgagcccgtcattcctatcaccaccctgatcaggatcattggtgcta

SEQ ID NO: 216647 - DNA, 495 bp, synthetic construct
  misc_feature 1..495: note = Description of Artificial Sequence: Synthetic coding sequence
  source 1..495: mol_type = other DNA
aacttccggacctttctgcaggcactaatgttgcttttcaggtcggctaccggagaggcttggcatgagatcatgctctcctgcctgagcaatcaagcgtgtgatgagcaagccaacgcaacagagtgtggatcagattttgcgtacttttacttcgtgtcgtttattttcctgtgtagttttttaatgctgaacctgtttgtcgccgtaatcatggacaattttgagtatctgacacgtgatagcagcattctagggccacatcaccttgatgagtttatccgggtgtgggccgagtacgatccagccgcatgttgccggatccactacaaggatatgtattccctgttaaggtgcatcgccccacccgtggggctcgggaagaactgtccgcgacgtttggcttacaaaaggcttgtgaggatgaacatgccaatctcgaacgaggacatgaccgtccactttacctccacgcttatggctcttatccgttag

SEQ ID NO: 216648 - DNA, 327 bp, synthetic construct
  misc_feature 1..327: note = Description of Artificial Sequence: Synthetic coding sequence
  source 1..327: mol_type = other DNA
ttaaggaatcaccagcccagggagccccactgtgacctggagaccagcggtacagtgacagtcggtccaatgcacacactgcctagcacatgtcttcagaaggtggaagaacagcccgaagacgctgacaaccagcgtaacgtaacgcgtatgggctctcaaccacccgaccccaataccatcgtgcatatcccagtaatgctcactgggcctttaggcgaagctaccgtagtccctacgctcgagaaaaacgtttgcctgtttcttctaacaagcatggtctctgacgaaaaatccactgtgatcagaattgtattctttttgtag

SEQ ID NO: 216649 - DNA, 7019 bp, synthetic construct
  misc_feature 1..7019: note = Description of Artificial Sequence: Synthetic coding sequence
  source 1..7019: mol_type = other DNA
atggtccgctttggcgatgaacttggtggcagatacggcggacctggtgggggtgaacgagccagaggcggaggcgctggtggtgctggcggaccgggaccaggcggactgcagccaggtcagagggtgctgtataaacagagcattgcccaacgcgctcgaactatggccctatacaatccaatccctgttaagcagaattgcttcaccgtcaatcgctcgctgttcgttttctcagaagacaatgtagtcaggaaatatgctaaaaggatcactgaatggcctcccttcgagtacatgatcttagctactatcattgctaactgcatagtacttgccctggagcaacatctgccggatggagataaaactccgatgtctgaacgcttggatgatacggagccatacttcattggtatattctgcttcgaagctggcataaagataatagcactcgggttcgtatttcacaagggatcctatctgcgcaacggttggaatgtgatggatttcgtggtcgtcttaacaggcatactggccaccgcaggcaccgacttcgacctgagaaccctgagggccgtccgagtactgcgccctctgaagcttgttagcggtatacccagcctccaggtcgtcttgaagtcaataatgaaggccatggttccactcctccagattgggctgttattatttttcgcaatactgatgtttgccataatcgggctcgaattttatatgggcaagttccacaaggcctgctttccaaatagcaccgacgctgagcccgtgggcgattttccgtgtggcaaggaggccccagccagactgtgtgaaggcgacacagaatgcagggagtactggcccggtcccaatttcggaatcacgaactttgataacatcctatttgccatcctgaccgtctttcaatgcatcacaatggagggctggaccgacatcctttacaacacaaatgatgccgcaggcaatacctggaattggctgtattttataccccttatcatcatcgggagtttttttatgctaaacctggttcttggagtgcttagcggcgaatttgctaaggagagggaaagggttgagaatcggagggctttcctgaagcttaggcggcaacagcagatcgagcgcgaactcaacggctacttagagtggattttcaaagctgaggaagtgatgctcgctgaagaggatcgaaacgcagaggagaagtccccactggatgtactgaagagagccgcaaccaagaagtcaaggaacgacctcattcacgcagaagaaggggaagaccgcttcgccgatttgtgcgccgtcggaagccccttcgctagagcctcgctgaagagcggcaaaactgaatccagttcttactttcgcagaaaggagaagatgtttcgttttttcatccgtagaatggtgaaagcccagtccttttactgggtggttttatgtgttgtggctctgaacactctttgtgtggccatggtccactacaaccagcccagacgcttgaccacaacgctctatttcgctgagtttgtgttcctgggattatttctgacggaaatgagcctgaagatgtacggcttaggaccccgttcctatttcaggtcgtcttttaattgtttcgacttcggcgtcatcgtgggatctgtattcgaggtcgtttgggctgctatcaagcccggatccagcttcggaatttccgtgctgagggccctgcgactactacgcatttttaaagtgaccaaatactggagcagcctgcgaaacctcgttgtgtcccttttgaactctatgaaatccataatcagcctgttgtttctgctgtttctgttcattgtcgtgtttgccttactcggcatgcagctcttcggaggacagttcaatttccaggacgagacaccaacaaccaatttcgatacatttccagcggcaatactgaccgtgtttcagattctgaccggggaagattggaatgcagtcatgtaccacggaatcgagtcccaggggggtgtctcgaagggcatgttctccagcttttacttcatcgttctaactctgtttggcaattacacactgctgaacgtttttctcgccatagccgtggacaatctggccaacgctcaggagctgaccaaagacgaggaggagatggaagaagctgctaaccagaagctcgccctccaaaaagctaaggaagtagccgaggtatcccccatgagtgctgctaacattagtatcgctgcaaggcagcaaaattctgccaaggcccgttctgtgtgggagcagcgagcttctcagctgcgcttgcagaatctgagggcatcatgcgaagccctctactccgaaatggaccctgaagagcgcctgagattcgctaccaccagacacctacggccagatatgaagactcacctagatagacctctggtggtagaactaggaagagatggggctagaggcccagtgggcggaaaagctaggcccgaagccgcagaggctccggaaggcgtcgatccacctcgacggcaccatcgccaccgcgacaaggacaagacccccgcagctggcgaccaggatcgggcagaggccccaaaggccgagagtggcgaaccaggggcacgagaggagcgccctcgaccacataggtcccatagcaaggaggcagctggtcctcctgaggcgagaagcgagcgtgggagaggacccggacccgagggagggaggcgccaccatcgcaggggctcccctgaggaggccgcagaaagagaaccgagacggcacagagctcatcgacaccaggatcctagtaaggaatgcgcaggcgcaaagggcgagaggcgggcacgccatcgcggagggccacgggcagggcctcgtgaggctgagtctggtgaggagccagcaagaagacaccgagctcgccacaaggctcagccagctcacgaagccgtcgagaaagaaaccacggaaaaggaggctaccgagaaggaggctgaaatcgtggaggctgataaggagaaggagctccgtaatcaccagcccagggagccacattgcgatcttgaaacctctggtaccgtcacggtagggcctatgcacactcttcctagcacatgtctgcagaaagttgaagagcagccagaggacgccgataaccagagaaatgtgacccggatggggtctcagccaccagatccaaacaccattgtgcacattcccgtgatgttgacaggaccccttggagaggccacagtggtaccctcaggcaatgttgacttggagtcacaagcagagggtaagaaagaggtggaagcggacgacgtgatgaggagcggcccacgtcctatcgtcccctacagtagtatgttttgtctgtcaccaacaaatctgctaaggcggttttgccattatattgtcacaatgagatactttgaagtcgtgattctggtagtaatcgccttgtcaagtatcgcactagccgcagaggatcccgtccggaccgactctccccgtaacaatgctctgaagtatctcgattacatttttaccggggtattcacatttgagatggtgatcaagatgatcgacctcggtttgctcctgcatcccggagcttactttagagacttgtggaatatactggacttcattgttgtctcaggcgctctggtagctttcgcattttcaggaagcaagggaaaggatattaatacaatcaaaagcctaagggtgctccgggtgttgagaccacttaaaacaatcaaacggctgcccaaactgaaagccgtgtttgactgcgtggtcaactccttgaaaaatgtgctgaacattttgattgtctacatgctgttcatgtttattttcgccgtcatcgctgttcagctgtttaagggcaaatttttttactgcactgatgagtccaaagaattggaaagagactgtagagggcagtatctggattatgaaaaagaggaggtagaagctcagcctcgtcagtggaaaaaatacgactttcattacgataacgtgctgtgggccctgctaacactattcacagtctctacaggggagggttggcctatggtgcttaaacattcagtggacgccacttacgaggagcagggacccagtccaggatatcgtatggagctgagcatcttttatgtcgtttacttcgtggtgtttccatttttttttgtgaacatctttgtcgcgctcattatcatcaccttccaggagcagggggacaaggtaatgtccgaatgttcactggagaagaacgaaagggcttgcatcgactttgccataagcgcgaagccactcacaagatacatgccacaaaatcgacagtccttccagtataaaacatggacctttgttgtgtccccccctttcgaatacttcatcatggctatgattgctcttaacaccgtcgtgctaatgatgaaattctatgacgctccctatgagtacgaactgatgctgaaatgtttgaacatcgtgtttactagtatgttctctatggagtgcgtgttaaagatcatcgctttcggcgtgcttaattattttcgggacgcatggaatgtgtttgattttgttactgtgctgggctccataaccgacatactggtgactgaaatcgccgagactaataactttattaatctgagcttcctacgcctgttcagggctgcccgtctcattaagttactgcggcagggctataccattaggatactactttggactttcgtccagtctttcaaggccctgccctacgtttgtttgcttatcgctatgctctttttcatttacgctatcatcggaatgcaggtctttggcaacatcgccctggatgacgatacgagcatcaatcggcacaacaacttcaggaccttcttgcaggccctgatgttgctgtttcggtcagcaacaggagaggcatggcacgaaataatgctctcttgcctgagcaaccaggcctgtgatgagcaggcgaacgctaccgagtgtgggagtgatttcgcatatttctattttgtctcatttattttcctgtgctcattccttatgctgaacctatttgtggccgtgattatggacaattttgaatacctgaccagggattcgtccatccttggtcctcatcacctggatgaattcatccgggtctgggcagaatatgacccagcggcttgcggtcgaatttcctacaatgatatgttcgagatgctgaaacacatgtccccacccctcggtctgggaaaaaaatgccccgcacgagtcgcgtacaagcgtttggtaagaatgaacatgccaatcagcaacgaagatatgactgtgcatttcacctcaacattgatggctctgattcgcaccgccctcgagatcaagttagctccagccggtacgaagcaacaccagtgtgacgccgagctgcgcaaagaaatcagcgtcgtttgggcaaatttgccccagaagacactggatttactggtgccaccacacaaaccagacgaaatgaccgtgggcaaggtctatgctgcgttaatgatctttgatttctacaagcagaataaaactacacgggaccagatgcagcaagccccaggtggtctctcccagatgggcccagtcagtctgtttcatcccctgaaggctactctcgaacagactcagcccgcagttcttcgaggcgctcgggtcttcctaaggcagaagtcatccaccagtctctctaatggcggagctatacagaatcaagagagtggtattaaggaaagtgtgagttggggcacccagaggacacaggacgctccccacgaggccaggccgcctcttgaacgtgggcactcaacagaaattccagtgggcaggtctggcgcactcgccgtggacgtgcagatgcagagcataacacggagaggccctgacggcgagcctcaaccaggtcttgagagccagggtcgagctgcctcaatgcctcgactggctgcagagacccagcccgtgaccgatgcctccccaatgaaacgaagcatcagtacgcttgcccaaaggccacgaggtacccatctttgcagcacgactcctgaccgaccccctccaagccaggcatcaagccaccaccatcaccaccggtgtcatcgaagacgcgatcgcaagcagagatccctcgaaaagggccctagcttatcagcagatatggacggagccccatcaagcgctgtgggcccagggctcccccctggagagggaccaacaggctgcagaagggaaagagagcggcgtcaggagagaggcagatcccaggagcgccgtcagcctagtagctcatcctcagagaaacagagattctactcatgtgataggtttggtggcagggagcccccaaagccaaagccgtctctgagcagtcacccaaccagtccaaccgctggtcaagaaccagggcctcatcctcaggggagcggaagtgtgaatgggtctcctctgctttcaacatctggagccagtacaccagggagggggggtcgccgacagctcccccagacgccacttaccccaagaccaagtatcacatataaaacggctaactcatcccccatccatttcgcaggcgctcaaacctctctgccagccttctccccaggtcgcttgagtcgtggattgtcagaacacaatgcgctcttgcagagggatccactttctcagccccttgccccaggtagtcgcattggctctgatccctatcttggacagcggcttgatagcgaggcaagtgtgcacgccttaccagaagatacattgaccttcgaggaagctgtagccacgaacagcggtagatcttcacggacttcttacgtatcctctctgacgagccagtcacaccccctgcgtagagtgccgaatgggtaccactgtaccttgggtcttagttcaggcggacgagcccgacatagttaccaccacccagaccaggaccattggtgcta

SEQ ID NO: 216650 - DNA, 498 bp, synthetic construct
  misc_feature 1..498: note = Description of Artificial Sequence: Synthetic coding sequence
  source 1..498: mol_type = other DNA
taaaattttagaactttccttcaggctctgatgctgctgtttaggtccgcaaccggcgaggcatggcatgaaattatgttgtcttgcctgtctaatcaagcatgcgacgagcaggccaacgctacagaatgcggtagtgactttgcatacttctactttgttagttttattttcctgtgttcttttctgatgttgaatcttttcgttgctgttattatggacaattttgaatatctcacgagggactcctcgatactcggcccacaccaccttgatgagtttatcagagtctgggcagagtacgatcccgcagcttgttgtagaatccattataaagatatgtatagtttgctgcgatgtattgcaccccctgtgggcttaggcaaaaactgcccaaggcggctcgcctataaaagactggtcagaatgaacatgcctatatcaaacgaggacatgactgtgcacttcacatctaccctaatggcccttataaggtag

SEQ ID NO: 216651 - DNA, 564 bp, synthetic construct
  misc_feature 1..564: note = Description of Artificial Sequence: Synthetic coding sequence
  source 1..564: mol_type = other DNA
ctgaggaatcaccaacccagggagccccattgcgatctggaaacatccgggactgtgaccgttggccctatgcacacactgccctctacctgcctgcaaaaggtagaagaacaacctgaggacgcagacaaccagagaaacgttaccagaatgggatcacaacctcccgatcccaacacaatagtgcacatccctgtcatgctgactggccctctaggtgaagccaccgtggttccatcacccacgatcggcagactgcaggccgaggagcaaggtgagcctgccagggtttccaagcttaatttggagagcgacgtgcgtgggcaggaagcttcatccaccggcgagaggtaccggctggggggaggcaatgtcgaccttgaatcacaggccgagggaaagaaagaagtggaggctgatgacgtcatgaggagtgggccacgcccaatcgttccgtacagttcgatgttctgtctgagccctaccaaccttctcagacggttttgccactatatcgtgacaatgcggtacttcgaggtggtgatcttggtggtgattgcctag

SEQ ID NO: 216652 - DNA, 6785 bp, synthetic construct
  misc_feature 1..6785: note = Description of Artificial Sequence: Synthetic coding sequence
  source 1..6785: mol_type = other DNA
atggcaagattcggagatgaaatgcccgcacggtacggaggcggagggtctggggcagctgcaggggtggtggtcggatccggtggcggtaggggggcaggagggtcaaggcaaggcggacagccaggtgctcagaggatgtataagcagtcgatggctcagcgggctcggaccatggcgctatacaatcctattcctgtccggcagaattgccttactgtgaacaggtctctcttcctgtttagcgaagacaatgtggtccgtaagtatgcgaagaagatcactgagtggcctccatttgaatacatgatcttagccactattatcgcgaactgtattgtgctcgcccttgagcagcacctgccagacgatgacaagacccccatgagtgagcgattggatgacaccgagccgtacttcattggcattttctgtttcgaggcagggatcaagataattgcactgggcttcgctttccataaaggcagctacttgagaaatggttggaacgtgatggacttcgtggtcgtactcacaggcatattggctaccgtcggaactgagttcgatctccgtaccctgagggcagtgagggttttgcggcctctgaagctagtgtctggcatccctagtctgcaagtggtactgaagtccattatgaaggctatgattcccctgctgcagatagggttgttgctgttctttgccatactgatctttgccataatcgggcttgaattctatatgggcaaattccacaccacatgcttcgaagaagggactgatgatatccagggagagtcaccagccccatgcggcaccgaggaaccagcccgtacctgtccaaacggcacgaaatgtcagccctactgggagggcccaaataatggcattacccagttcgacaacatcttgttcgcggtcctaaccgtgtttcagtgtatcactatggaagggtggactgatttgctgtacaattcaaatgacgcctcaggcaatacttggaactggttgtattttatccccttgatcatcatcggatcctttttcatgctgaacttagtactgggcgtgttatccggagaatttgcgaaagagagagagagagttgagaataggcgagccttcctgaaactgagaagacagcaacagatagaaagggaactgaacgggtacatggagtggatttctaaggcggaagaggtcattctggccgaggatgagacagacggagagcagcgtcatccgttcgacggcgcactcaggcgcacaacaatcaaaaagtccaaaacagacctactgaatccagaagaggcggaggaccaactggccgacattgcctcggttggctccccctttgcccgtgcaagcatcaaatccgccaagttggagaatagtacctttttccataagaaggaaagacgtatgcgattctatatcaggaggatggttaagactcaggccttttactggacggtcctctccctggtcgcacttaatactttatgtgtggccatagtgcattacaaccagcctgaatggttgtcagactttttatattacgccgagttcatcttcctggggcttttcatgtccgaaatgttcattaaaatgtatggattgggtacccgtccctattttcatagctccttcaactgttttgattgcggcgtgatcatcggatctatattcgaagtcatctgggcggtgattaagcccggaacttccttcggaatctcagtgctccgcgcattacgccttttgcggattttcaaggtgacgaagtattgggcgagcctgcggaatctggtggtctctctgttaaacagcatgaagtccatcattagcctgctgttcctactgtttttatttatcgtggttttcgcccttttggggatgcagcttttcggaggccagtttaattttgacgaaggcacccctcctaccaactttgacactttcccggcagcgatcatgacggtttttcagatcctgactggcgaggactggaatgaggtaatgtacgatggcatcaagagtcagggtggcgtccaaggagggatggtcttctccatctactttatcgtactcactctgtttggtaattatacgctgctgaatgtttttctggccattgctgtggataacctggcgaacgcacaggagctgaccaaggatgagcaggaggaagaggaggcagctaaccagaaattggctctgcagaaagccaaagaagtggcagaggttagtcctctgtccgccgctaatatgtccatcgccgtaaaggagcaacagaaaaaccagaagccggctaaatccgtttgggaacagcgaacctcggagatgcgcaaacagaaccttctggctagtagggaggctctttataacgaaatggatcccgatgagaggtggaaagccgcttatacccgtcacctaagaccagacatgaagactcacctggatcggccattggtggtcgatccacaggaaaatcgcaacaataacactaataagagccgggcagctgagcccaccgtggatcagcgactgggacaacagcgcgctgaagactttctgagaaagcaggccagataccatgatagagccagagatccctccgggtctgcaggactcgacgctcgtagaccatgggccggaagccaagaggcagagctgtcccgcgagggcccttacgggagagagtccgatcatcacgctagggagggctcactggagcaaccgggattctgggagggagaggcggaaaggggtaaggccggagatcctcatcggcgtcatgtgcatcgccagggtggctctcgtgagagcagaagcggatctcctcgtactggggcagacggagagcatcggaggcaccgggcacaccggaggcctggcgaggagggaccagaggataaggctgaaaggcgcgctcggcatagggagggcagcaggcctgctcgtggaggggagggagagggcgagggacctgacggcggagaaagacgaagacggcataggcacggcgcacccgctacatacgagggcgatgcaaggagagaggataaggagagacgccatcgcaggcgcaaagagaaccagggaagtggcgtgccagtctcaggtccaaatctctccactacacggcctatccagcaggacctgggccgtcaggaccccccactcgcagaagacatcgataacatgaaaaataataagcttgccacggctgagagtgccgctccccatggttcactggggcacgccggactgccacagtctccagccaaaatgggcaattccaccgatcctggccctatgctggcgattcctgcgatggccacaaacccccaaaacgccgcttctagaaggacccctaacaacccaggcaacccttccaatccgggtccccctaaaacccccgagaacagtctaatagttacaaatccctccggtacgcagacaaacagcgcgaagactgccagaaagcccgaccatacaacagttgacataccccctgcctgcccaccaccactgaaccatacagtggttcaggttaacaaaaatgcgaaccccgacccactgcccaagaaggaagaagagaaaaaggaagaggaggaggacgacaggggtgaggacggtccaaagccaatgcccccatacagcagcatgtttatcttgagtactaccaaccccttgcggaggctctgccactatatcctcaatctacggtatttcgaaatgtgtatcctgatggtgatagccatgtccagcatagctctggccgcagaggaccccgtccagcccaacgctccaagaaacaacgtgttgaggtacttcgactacgtctttacgggcgtgtttactttcgaaatggtaataaagatgatcgatctggggctggtgctccatcagggagcctacttcagggacctatggaacatcttggacttcattgtcgtcagcggtgctttagtcgcctttgccttcacaggcaattccaagggtaaggatattaacacgatcaaatcactgcgcgtactgagggtactccgcccattaaaaaccatcaagcggctgccaaagctgaaagccgtgttcgattgtgtagtgaacagcttgaagaacgtgtttaatattttaatcgtctacatgctgttcatgtttattttcgccgtggttgctgtccaactttttaaaggcaaatttttccattgtacagatgagtctaaggaatttgagaaggactgcagggggaaatacctgttatatgaaaagaatgaggtcaaagccagggaccgggagtggaagaagtacgagtttcattatgacaatgtcctgtgggccctgttgacactattcacggtgtccacgggagaaggttggccccaagtgctgaaacacagtgtcgatgccacctttgagaaccagggaccaagtccgggatatcgcatggaaatgtccatattctacgttgtctattttgtagtctttccgtttttcttcgttaatattttcgtggccctcattattattactttccaggaacagggagataaaatgatggaggagtattccctggaaaagaacgagcgggcttgtatcgatttcgccatcagcgcaaaacccctgacgagacatatgccacaaaataaacagagttttcagtaccgcatgtggcagtttgtggtgagcccccctttcgagtatactatcatggctatgattgccttaaacaccatcgtgctgatgatgaaattctacggggcttcagtggcctatgagaacgcgctgagagtttttaacatcgttttcacatccctcttctcactagaatgtgtgctgaaggtgatggcctttggcatcctgaattactttagggacgcctggaacatcttcgattttgtgactgttctgggctcgatcacagatattcttgtgactgagttcggaaataatttcatcaatctgtccttcttgcggctattccgcgctgcccgattaatcaaactattgagacagggctacaccatcagaatcctgttgtggacatttgtacagagtttcaaagcactcccttatgtgtgcctgctcatagccatgcttttttttatctacgctataatcggaatgcaggtgttcggtaatatcgggattgacgtcgaagatgaggattcggacgaagatgagtttcaaattactgaacataacaactttcgcacatttttccaggccctgatgcttctgtttcgctccgctacaggcgaagcctggcacaatattatgctgtcatgcctgtctggtaaaccatgcgataaaaatagtgggatcctaacacgcgagtgtggtaacgagttcgcgtacttctacttcgtgtcctttatttttttatgcagcttcctgatgctgaatctctttgtagcagtgataatggataatttcgagtatctcactagggattccagcatcttggggcctcaccatctcgatgagtacgttcgggtgtgggcagagtacgatcccgcagcatgcgggagaattcattacaaggacatgtacagtctattacgagtaatcagcccccctctaggcctaggtaagaaatgtccacatcgggtggcctgtaagcgcctgctgcgtatggatcttcctgtggcggatgacaataccgtgcattttaatagtacacttatggcactgattcgcacagctctcgacattaagatagcgaaggggggagcggacaagcagcagatggatgccgaactgcgcaaggaaatgatggccatctggcctaacctgtcccagaaaacgttggacctgctggtcacaccgcataaaagcaccgatctgaccgtgggaaaaatctacgccgcaatgatgataatggagtactacagacagtcgaaggctaagaaacttcaggccatgcgcgaagagcaggacagaacacccttgatgtttcagagaatggagcccccaagccctacccaggagggtgggccaggccagaacgccctcccctcaacccagctcgaccccggtggagcactgatggctcacgaaagcgggctgaaggagagcccttcatgggttacacaaagagcgcaggagatgttccagaagacggggacgtggtcgccagaacagggcccacccactgacatgcctaactcccagccaaacagccaaagcgtcgaaatgcgtgaaatgggaagagacggatattctgatagcgagcattatttgcctatggaaggccaggggcgagctgcatcgatgcccagattgcccgctgaaaatcagcggaggcgcggtaggccacggggaaataatttaagtacaatatcagacacttctccaatgaaacggtccgcctctgtgctggggcctaaagctagaagattggacgactacagtctggagcgagtaccccctgaagagaaccaaagacatcaccagagacgcagagatagatcccatagagcctcagaacgatccctgggtcgttacacagacgttgacactggcttggggacagacctctctatgacgactcagagtggcgacctcccatctaaggagcgggatcaggagcgtggtaggccaaaagaccgtaaacaccgacagcaccatcatcaccatcaccaccatcaccacccaccacccccagataaggaccgatatgcacaggaacgacccgatcacggtagggccagggcccgtgatcagcggtggtctagatctcctagcgagggccgtgagcacatggcacacagacagta

SEQ ID NO: 216653 - DNA, 7487 bp, synthetic construct
  misc_feature 1..7487: note = Description of Artificial Sequence: Synthetic coding sequence
  source 1..7487: mol_type = other DNA
atggcaaggttcggcgacgaaatgcctgcaagatacgggggtggcggaagtggggcagccgctggcgttgtggtcgggtcaggagggggaaggggcgctgggggaagcagacagggcggacaacctggcgcacagcgcatgtacaaacaaagtatggcccagcgtgccagaactatggccctctataatcccatccctgttagacaaaactgtctgaccgtcaatagatccctcttcctcttctccgaagacaacgtcgttagaaagtacgcaaagaagattacagaatggcctccattcgaatacatgattttggccacgattatcgcaaattgcatcgtgctggcgctggagcagcacctaccagatgacgataaaacacccatgagcgagaggcttgatgatactgaaccctacttcatcggcattttttgtttcgaggccggaattaaaattattgcccttggcttcgccttccacaagggttcctacctgcggaacgggtggaacgttatggacttcgttgtggttcttactggcatcttagccactgtcggtactgagttcgatttaagaactctccgagcggtcagagtactgcgcccactcaaactggtctccggcatacctagcctgcaagtagtactcaaaagtataatgaaggccatgatccccctcctgcagataggactgttgctgttcttcgcaattctcatcttcgccatcatcggactcgagttctacatgggtaagtttcatactacgtgtttcgaggaaggtacagacgacatacagggggaaagccccgctccttgcggcactgaggagcctgccagaacctgcccaaacggtacaaaatgtcagccttattgggagggtcccaacaatggaattactcagttcgacaatatcctgttcgcagttcttaccgtatttcagtgtattaccatggaaggatggactgacctactgtataatagtaacgatgcgtccggcaatacttggaactggctatactttatcccgctgatcattatcggtagcttcttcatgctgaatttagtcctaggcgtgctgtcaggcgaattcgcaaaggaaagggagcgggtcgagaaccgccgtgcctttttgaaactgagaaggcagcagcagatagaaagggaactcaacggctatatggagtggatttcaaaagctgaggaggtgattctagccgaagacgaaactgacggagagcagagacacccctttgacggggctctgaggcggacgacaatcaagaagtcaaagacggatctactcaatccagaggaggcggaggatcaactggctgatattgcctcagtagggagcccctttgccagggcctctattaaaagcgccaagttagagaacagcactttttttcataagaaagagaggagaatgcggttctacatccggagaatggtgaagacccaggccttttactggacggtattgagtttggtggccctgaatacattgtgtgtggctatagtccattataatcagcctgaatggctgtcggatttcttatactacgcagaattcatcttcctaggtctttttatgagcgaaatgtttataaaaatgtatggtctgggtacccgcccatacttccacagtagtttcaactgcttcgactgcggtgtgataattgggtccattttcgaggtcatctgggctgtaattaaacccggaacctcattcgggatctcagtgttacgggctctgcgacttcttcgcatcttcaaagtcactaaatattgggcctccctccggaatctcgtggtgagtctgctgaactcaatgaagtccattatctcactcctattcctgctgtttctattcatcgtggtgttcgcactgttagggatgcaactattcggaggccaatttaattttgacgaggggacacccccaaccaacttcgatacgtttcctgcggctattatgacagtcttccaaatactgactggggaggattggaatgaagttatgtacgatggcatcaagagtcagggaggagtccaggggggaatggtgtttagtatctacttcatcgtcttaacgctatttgggaactacaccctactgaacgtattcctggcgattgccgtggacaatctcgccaatgcccaagaactcactaaagacgaacaggaagaggaagaagctgcaaatcaaaagctagccctgcagaaagctaaggaagtagctgaagtgtctccccttagcgctgcaaatatgtccatagccgtaaaagaacagcagaagaatcagaaaccagccaaatccgtgtgggaacagaggacttccgagatgcggaagcagaatctgttagcctcaagagaagcattgtataatgaaatggaccccgatgagcggtggaaagctgcatacacaagacatctgcggcctgatatgaaaacacatttggatcgccctttagtcgtggatccacaggaaaatcgcaacaacaatactaataagtccagagccgctgagcccacagtagaccaacggctggggcagcagagagccgaggacttcctgcggaaacaggccaggtaccacgatcgagcaagagatccctctggtagcgccggtctagacgccagacgtccctgggccggttcccaggaagctgagctgtcgcgggaggggccatacggacgcgaaagtgaccaccatgccagagagggttcgttggaacagcccggtttctgggaaggagaagctgaaaggggcaaagccggagatccccacagaagacatgtgcaccgccaggggggatcccgtgagtcgcgctccggcagcccaagaaccggtgcggacggagaacacagaagacatcgggcacaccgaaggccaggggaggagggacccgaagataaggctgagcggcgtgctagacacagggaagggtcacggcctgcgcgaggaggtgagggcgagggcgagggcccagatgggggagaaaggcggagacggcacagacatggagcaccggctacttatgagggagacgctaggagagaagataaagagaggagacatcggcgacgcaaagagaatcagggctctggggtgccagtgtctggacctaatctgagcactactcgcccaatccaacaggatctggggagacaggatccgcctctggctgaggacatagacaatatgaagaataacaagctggccaccgccgaatccgccgcaccacatggcagtctcggccacgctggcctacctcagtcaccggcaaaaatgggcaattcgactgatccaggtcctatgttagccatccctgctatggccacgaatccacaaaatgcagcgagccgacgaacacccaacaacccaggcaatcccagtaatcctggaccacccaaaactcccgagaacagtttgatcgtgactaatcctagcggtacccagactaattctgccaaaacagcaaggaagcccgatcacaccactgtggacatcccccctgcatgcccgcctcccttgaatcatactgttgtgcaggtgaataagaatgctaatccggaccccttacccaagaaagaagaagaaaaaaaggaagaagaggaggacgacagaggtgaggatggcccaaagccgatgcctccttactcctctatgttcattctcagcacaacaaatcctctgagaaggctatgccactacatactcaacttgagatacttcgagatgtgtattctcatggtcatcgccatgtcgtcaattgccctcgctgcagaagaccccgtacaaccaaacgcccctagaaataacgttttgcggtattttgactatgtcttcacgggtgtttttacattcgagatggttatcaaaatgatcgacctgggccttgtactgcaccagggtgcatactttcgcgacctatggaacatcctggacttcatagtggtgtccggcgcactggtcgcgttcgcctttacagggaactccaagggaaaggacattaacactatcaagagcctcagggtgctgcgggtactacggcctttgaaaacgattaagcggctgccaaaactcaaagccgtttttgactgtgtcgtgaactcattaaagaatgtcttcaatatattgatagtttacatgctctttatgttcatcttcgctgtggtggcggttcagctgttcaaaggcaaatttttccactgtaccgatgaatcaaaggaattcgaaaaggactgtagagggaagtatctgctttacgagaaaaacgaggtaaaagctagagacagggagtggaaaaaatatgagttccactacgataacgtattatgggcactgctcaccctgttcacagtgtctaccggggaaggctggccccaggtgcttaagcactcagtagacgcaacattcgagaaccaaggtccttcaccaggttaccgcatggaaatgagcatcttctatgtagtgtactttgttgtgttcccatttttctttgtcaacattttcgtggcactgatcataataaccttccaggagcagggcgacaagatgatggaagagtactcccttgaaaaaaacgagagagcatgtatagacttcgccatcagtgccaagcctctgacgaggcacatgcctcagaacaagcagtcgtttcagtacagaatgtggcagtttgttgtgagtcctcctttcgagtataccatcatggcaatgattgctctgaacaccatcgtgcttatgatgaagttctatggggctagtgtcgcttacgaaaatgccctgcgagtctttaacatagtgtttaccagcttgttctccctggaatgtgtgctgaaggtgatggctttcggcatactcaattactttcgggacgcgtggaacatcttcgactttgtcacggtgctgggctccattacagacatcctggtgacagagtttggtaacaatttcattaatctgtcattcctccgactgttcagagccgcaagactcattaagctccttcggcagggatacacaataagaatattgctgtggaccttcgtccagagtttcaaggccctaccatatgtgtgtctgcttattgccatgcttttctttatttatgcaattatcggtatgcaagtgtttggaaacataggtatcgatgtggaggacgaagactctgatgaggatgaattccagataaccgaacataataattttaggaccttttttcaggccttgatgttgctttttagatccgcgacaggggaggcttggcacaatattatgttatcctgcctttctgggaaaccctgcgataagaattcaggcatccttaccagggaatgtggcaacgagttcgcgtatttctacttcgtctcctttatctttctctgtagcttcctgatgctgaacctgttcgttgcagtgattatggacaacttcgagtacttgacccgggatagtagcatactggggcctcatcatcttgacgaatatgtcagagtgtgggccgagtatgatcccgctgcctggggacggatgccttacttagatatgtaccaaatgcttcgccacatgagtcccccactgggcttaggaaagaaatgccccgctcgggttgcatacaagcgtctgctacgcatggacctgcccgtagcggatgacaacactgttcatttcaattccactctcatggccttgatcagaactgccttggatatcaaaatcgccaaggggggagccgacaaacagcagatggacgccgaactgaggaaagaaatgatggccatatggcccaacctcagccaaaaaaccctggacctgctggtaacaccacataaaagcacggatctgacagtgggcaagatctacgcagcaatgatgatcatggagtattaccgtcaatccaaggcgaaaaaactgcaggccatgagagaggagcaggaccgcacaccactgatgttccagcggatggaacctccatctcctacacaggagggcggacccggacaaaatgcattaccttcaacacagctggacccaggcggtgccctgatggcccacgagtcaggacttaaagaatccccgagctgggttacccaacgtgctcaggagatgttccagaaaacggggacctggagccctgaacaaggcccacctactgatatgcccaacagccagccgaacagccagtccgttgaaatgcgcgaaatgggtagagacggttatagcgattccgagcactacttacctatggagggtcaggggagagccgcttctatgccacggttgcccgctgaaaatcaaaccattagcgacacgtccccaatgaagaggagcgcctcggtgctaggtcctaaggctaggcgcctggatgactactcactggagcgggtccctcccgaggaaaaccagaggcatcatcagcgtcggagggacaggtctcatcgcgctagtgaaagatcgctgggccgttacaccgatgtggatactggcttgggcaccgacctgagtatgaccacccagtctggtgacctccctagcaaggagagagatcaggaacgcggtagacccaaagatagaaagcacagacagcatcatcaccatcatcaccaccaccaccatccgccaccgcctgacaaagacaggtacgcacaagaaagacctgatcacggcagagccagagcaagggatcagcgctggtcccgctctccatcagagggtcgggagcacatggcccataggcagggaagtagcagtgtatctggcagccctgccccttcaacaagtggtactagcactcccagacgaggacgcagacagctgccccagactccttcgacccctaggccccacgtgtcttactccccggtgatcaggaaagcaggtgggtccgggccaccacaacagcaacagcaacagcaacagcaacagcagcagcaggccgtggcgcgacctgggagagccgctacatctggcccacgtagatatccgggtcccaccgccgagcccttagccggtgaccggccacctacgggtggacattcttcaggcagatcacctaggatggaacgtagggttcctggccctgcacgtagcgagtcaccacgcgcttgtaggcacggaggtgcgagatggcctgccagtggccctcacgtgtcagagggcccacctgggccacgacaccacgggtattaccggggaagcgactacgatgaggctgacgggcctggatcagggggaggcgaggaagccatggctggtgcatacgatgcccctcccccagtccgacatgcctctagcggcgctaccggacgttcgccgaggacgcccagggcctctggaccagcctgcgcctctcccagccgacacggccgaaggctgcccaatggctattacccagctcacggtctggctcggcctagggggccaggctcacgcaaggggctgcatgagccttactccgagagcgatgacgattggtgtta

SEQ ID NO: 216654 - DNA, 7520 bp, synthetic construct
  misc_feature 1..7520: note = Description of Artificial Sequence: Synthetic coding sequence
  source 1..7520: mol_type = other DNA
atggccagatttggtgacgaaatgccagctcgctatggcggagggggaagcggcgcagccgctggggtagtagttgggtcagggggtggcagaggcgcaggcggaagtcgccaggggggtcagcctggcgctcaacgtatgtataagcaaagcatggcccagagggccagaacgatggcactctataaccctatccctgtccgacagaattgcctgaccgtaaacagaagcctgttcttattttctgaagataacgtcgtcagaaagtacgcgaagaagattaccgagtggccaccattcgaatacatgatcctggccacgatcattgcgaactgcatcgtgctggcgctcgaacaacacttgcccgacgatgacaagaccccgatgtctgagcgactggatgatacagagccatatttcattggaatcttctgcttcgaggctgggattaagatcatagccctggggtttgccttccataaagggtcttatttgcggaatggctggaacgttatggactttgtggtcgtcctgacaggtattctggccactgtaggaactgagttcgacctcagaacgctcagggccgtgcgtgtgctgaggccattaaaactcgtaagcggaatcccctccttacaagttgtcctcaaatcaatcatgaaagccatgatcccactgctgcagatcgggctcctactgttcttcgcgattcttatctttgctataatcggactggagttctacatgggcaagtttcacacaacttgcttcgaggagggcacggatgatattcagggggaatctccagctccctgtgggacagaggaacctgccaggacctgccccaacggcacaaagtgccaaccgtactgggagggaccgaacaacggcattacccagttcgataatattttgttcgcagtccttaccgtgtttcagtgtatcactatggagggctggactgacctgttatacaactcaaatgacgcgtcaggcaacacttggaattggctatatttcatccccctgatcattatagggagcttcttcatgctgaacttagtgctgggcgtgctctccggggagttcgccaaggaacgggagagggtggaaaatcgtagggcatttttaaaattacgacgccaacagcagatcgagcgagaattgaatggctatatggaatggatcagcaaggctgaagaggtaattctggccgaagacgaaacggatggagaacagagacatccatttgacgccctcaggcgcacaacaattaagaagagcaaaaccgacctactcaaccctgaggaagctgaagaccagctggccgatattgcgagcgtcgggtcaccttttgcacgcgcaagtatcaagtccgcgaagctggagaatagcaccttttttcataagaaggaacggcgaatgcggttttatattagacgcatggtgaagacccaggctttttactggaccgtactgtctttagtcgctctcaacaccctctgcgtggccattgtgcattataaccagcctgagtggttgagcgactttctttattacgcggagttcatttttctcggtctgtttatgtctgagatgttcataaagatgtatgggttgggtaccagaccgtacttccacagctcctttaattgctttgactgtggagtcatcattggctctatcttcgaggtgatttgggccgtgattaaacccggaacctcctttggaatcagtgtgctccgagccttgcgtcttcttcgtatctttaaggtgaccaagtattgggcttcccttcgcaacttggtcgtctcccttctcaactctatgaaatctattatttccttattgttcctgttattcctgtttatcgttgtgttcgccctgttagggatgcagttattcggagggcagttcaatttcgacgagggcacccccccaactaatttcgatacatttcccgctgccattatgacagtctttcaaatcctgaccggagaggattggaacgaagtgatgtatgacggtatcaagagtcaagggggagtgcaaggcggaatggtattcagcatctacttcattgtgcttaccttgttcggaaactatactctgctgaacgtgttccttgcaatcgccgtcgataacctcgcaaacgcccaggagctcaccaaggacgaacaggaggaggaagaggcggctaatcagaaattggcactccagaaagctaaagaggtcgcagaggtatcgcctcttagcgcagccaacatgtctatcgcggttaaagagcaacagaagaatcaaaagccagctaaatctgtttgggagcagcggacaagtgaaatgagaaaacaaaatctcctagcttccagagaggccctgtacaacgaaatggaccctgacgagcgatggaaagccgcttatacccgccatctcaggccagacatgaagacacacctggatcgccctctggtcgtggacccacaagaaaatcgcaataacaatactaacaaaagccgggctgccgagcccaccgtggatcagagactgggacagcaaagagccgaagacttccttagaaagcaggctcgatatcatgatcgcgcaagagacccctcgggttctgccggtctggacgcacgtcgaccttgggccggtagccaagaagccgaactctcccgggagggcccttacgggagggagtcagatcatcacgcgcgagagggaagtctggaacagccaggattttgggaaggtgaagctgagcggggtaaggctggcgatcctcatagaaggcacgtacaccgtcagggtggaagtcgggaaagtcgctccggcagccccaggaccggtgctgatggagaacaccgcagacaccgggcacacagacggccaggcgaggagggaccggaagacaaggccgagcggagagcccgacaccgcgagggctcgcggccagccagaggtggtgaaggtgagggggagggccctgacggaggtgaaagaagaagaagacacaggcacggagcaccagcgacctatgaaggggatgccagaagggaagataaagagaggagacacaggaggcgcaaggagaaccagggttctggagttcccgtgtctggccctaacctttcgaccacgcggcctattcagcaagacttaggacggcaagaccctccactcgcagaagacatcgataacatgaagaacaataagttagctacagcagaatcagcggctccacatggcagtcttggtcacgcaggactgccccaaagccctgcaaagatgggtaactccactgaccctgggccaatgctggcaatcccagctatggccactaatccccagaacgccgcttcacgtcggacacccaacaatcctggaaacccctccaatcctgggcctcctaaaacaccagagaattctctcatcgtgactaatcctagcggtacacagaccaacagtgccaaaaccgctcggaagcctgaccacactaccgtggatatacctcctgcctgtccaccacctctcaatcatactgttgtacaggttaataagaatgctaatcccgatccccttcccaagaaggaggaagagaaaaaggaagaagaggaggatgacagaggagaagatggacccaaacccatgccaccttattcgtccatgtttattctgtccaccaccaatcccctcagacggttgtgccattatatcctcaatctgagatacttcgaaatgtgtattctgatggtgattgctatgagttctatcgccttggccgctgaggatccagtgcaacccaacgcaccccgtaacaatgtgctgcgttattttgactatgtgttcaccggcgtgtttacatttgaaatggtaataaagatgatcgaccttggattggtcttacaccaaggtgcttactttagagacctatggaatatcctggacttcatagttgtgagtggcgctttggtggccttcgcattcactggcaatagtaagggtaaggatataaacactattaagtcgttgcgtgttcttagggtgctacgccctctgaaaaccatcaaacgactcccaaagctcaaggccgtgtttgattgcgtggtgaattcactgaaaaatgtcttcaatatcctgatcgtgtacatgctctttatgttcatattcgcagtggtcgccgtgcaattgtttaagggcaaattcttccattgcactgacgaatccaaggagttcgaaaaggattgccggggtaagtatctgctgtacgagaaaaatgaggtcaaggctcgagatcgggagtggaagaagtacgagtttcactatgacaatgtactatgggcactgctgaccctgttcacggtcagcactggggagggatggccccaggtactaaagcatagtgtagacgcaacatttgaaaatcagggaccgtcacctgggtatagaatggagatgtcaatcttctacgtcgtctattttgtggtgttccctttttttttcgtaaatattttcgttgctcttattattatcacgtttcaggaacagggagacaaaatgatggaggagtacagcctcgagaagaacgagagggcatgcattgattttgcaatttctgctaaaccacttacgcggcatatgccccagaataaacagtcctttcaataccgtatgtggcagttcgtggtctcacctccctttgagtataccatcatggccatgatcgctttaaataccattgtgttgatgatgaagttctacggggcttctgtggcttacgaaaacgcactgcgtgtgtttaacattgttttcaccagtctgttctccctcgaatgtgtgctgaaagtaatggctttcggaatcctgaactatttcagggacgcttggaatatttttgatttcgtaactgtgctggggagcatcacagacatactcgttactgaatttggaaacaattttatcaacttaagctttctgcggctctttagggctgccagattgattaaactgctgcgacagggatacaccataagaatcctcctctggacctttgtgcaatcatttaaggcactcccatatgtctgccttctcattgcgatgctattcttcatatatgcaataatcggaatgcaggtctttggaaacatcgggattgatgtggaggatgaagactctgatgaagacgagtttcagatcaccgagcataacaactttagaacgttctttcaggccctgatgcttctgttccgttcagcgactggcgaagcctggcataatatcatgctgtcatgcttatctgggaagccatgcgacaagaattccggcatcttaaccagggaatgtggtaacgagtttgcctatttctatttcgtgtccttcattttcctctgttcattcttaatgctgaatcttttcgtggctgtgattatggacaactttgagtatctgacccgagactccagtattttgggcccacatcacctcgatgagtacgtgagagtttgggcagagtacgaccctgcagcatggggacgtatgccatacttagacatgtaccagatgcttcgtcatatgagtcccccactggggttgggaaaaaaatgcccagcacgagtagcctacaagaggctgctgaggatggatctgcccgtggccgatgacaacacggttcatttcaactccacgctgatggccctgatcaggactgccttggacataaaaatagcgaaggggggagcagacaaacagcagatggacgcggagctccgaaaggagatgatggctatttggccaaatctgagtcagaagaccttagatctgttggtaactccccacaagagcacggacttgactgtcggtaagatctatgccgctatgatgattatggagtattatcgccaatctaaagcaaaaaagttacaggccatgcgggaagaacaagatagaacgcctcttatgtttcagagaatggagcctcctagccccactcaggagggcggtcctggccagaatgctttaccttcaacccagctggatcccggtggagctctgatggctcacgagtccgggttaaaagagtccccctcatgggtcactcagagagcacaggaaatgttccagaagactggcacctggagcccagagcaggggccacccaccgatatgcctaattctcagcctaactcccagagcgtggaaatgcgcgagatgggcagggatggatattccgactccgagcactaccttcctatggaaggacagggcagagctgcctcaatgcctagactgcccgctgaaaaccagcggaggcgtggccgacccaggggcaacaacttgagcactatcagtgacacaagtcccatgaagagatctgcttccgtcctaggcccaaaggcccgtcgcctcgacgattacagtctggaaagagtgcctccagaggaaaatcagcgccaccatcagaggagacgggatagatctcaccgggcatccgagaggagcctcgggcgttataccgatgtggataccgggctggggactgatctatccatgactacacagtcaggggatctgccttctaaggaaagagaccaggaacggggacggccaaaagacagaaaacatcgacagcatcatcaccatcaccaccatcaccaccacccacctccacccgataaagataggtacgcccaggagcggcctgaccacgggcgagccagggccagggaccaaaggtggagtcgaagtccctccgagggtagagaacatatggcccatagacaggggagtagctctgtgtcgggatctccagctccaagtacaagcggcacgagcacgccacgcagggggagaaggcagctacctcaaacgcctagcactccgagaccccatgtctcatacagtcctgtgatacgtaaagcgggaggctctggccctccgcaacagcagcaacagcagcagcagcagcagcagcagcaggcagtggcgagacccggtcgagccgcaacttccggtcccaggcgatatccgggacccaccgccgaacctttggccggagacaggccgccaacaggcggacacagctccggcaggagcccacgcatggagagacgggtacctggtcccgcacggagtgagagtccccgagcctgcagacacggaggagcgagatggcccgcatcagggccacacgtgagcgagggtccaccgggtcctagacatcacggttattacaggggaagcgattacgatgaagccgatggcccagggtccggagggggtgaggaggcaatggccggtgcttacgatgcgccaccaccagttcggcatgcctccagtggcgcaactgggagatctccaaggactcccagagcttcgggaccagcgtgcgcaagtccctcccgacacggcagaagacttcctaatggatattatcccgcacacgggctggctagaccaagaggccctggatcacggaaaggcctgcacgagccatatagcgagagcgatgacgattggtgcta

SEQ ID NO: 216655 - DNA, 7538 bp, synthetic construct
  misc_feature 1..7538: note = Description of Artificial Sequence: Synthetic coding sequence
  source 1..7538: mol_type = other DNA
atggcaaggtttggcgatgaaatgccagcacgctatgggggtggcggatctggtgcagctgctggcgtcgtggttggctccggtggcggaagaggggcagggggatcccgacaggggggacagccaggggcacagcgaatgtacaagcagtccatggcccagcgggctagaactatggccttatacaaccccattccagtgcggcagaattgtcttacagtgaatcggagtctgttcttgttctccgaagacaatgtcgtgagaaaatatgctaaaaaaattacagagtggcctccgtttgaatacatgatcctcgctaccatcatcgccaactgcatcgtgttggcgttggagcagcacctgccagacgacgacaaaactcccatgtcggagaggctcgatgataccgaaccgtactttatcggaattttctgcttcgaggcgggaattaaaatcatcgcactggggttcgcattccacaagggtagttatctgaggaatggttggaacgttatggatttcgtcgttgtgctcaccgggatcctggcaacagtcggaaccgaatttgatttgagaaccttacgcgctgttagagtgctcagacctctgaaattagtaagcggcattccaagcctccaggtagtgcttaagagtattatgaaggctatgatcccattgctgcagatcgggctgttactgttctttgctatcctgatttttgctattattggcctggaattctacatgggtaaattccatactacttgttttgaggaaggtacggacgacattcagggagaatcccctgcaccttgcgggactgaggaacccgcacggacctgccccaacgggaccaaatgtcagccatactgggagggccctaataatgggattacacagttcgacaacatactgtttgccgtgcttactgttttccagtgcatcacaatggaaggctggacagatctgctttataacagcaatgacgctagcgggaacacctggaattggctgtattttatccctctaattatcatcggttctttcttcatgctcaacttggttttgggcgttctgagcggtgaattcgcaaaggagcgtgaacgggtggaaaaccggagagcttttctgaagctcagacgccagcagcaaatcgagagggaactaaatgggtacatggaatggatctctaaagccgaagaggtaatcctcgcagaggatgaaactgatggggaacagcgccaccccttcgacggggctctgaggagaaccaccataaagaagtctaaaaccgacctgttaaacccagaagaagccgaagaccagctggccgacatagccagcgttggatcccccttcgcccgagcaagtatcaaaagcgctaagctggaaaatagcactttctttcacaagaaagagaggcgaatgcgcttttacatccggagaatggtgaaaacacaggcattttattggaccgtgctgtccttggtggctctgaacacactttgtgtggccattgtacactacaaccagccagagtggctgtcagattttctctattatgccgagtttatttttctggggctgtttatgtccgagatgtttatcaagatgtatggactggggaccaggccttactttcacagctcttttaactgctttgactgcggggttattattggatcaatatttgaagtcatctgggccgtgattaagcccggaactagttttggaattagcgtgctgagggcacttcgactgctgaggatctttaaggttacaaagtattgggcctctctgaggaaccttgtggtgtcactgctgaattccatgaagtctatcatttctcttctgtttctgctgttcctatttattgtcgttttcgctctgctgggtatgcagctgtttggcggacagttcaactttgacgagggcactcctcccacaaatttcgacactttccccgcagccattatgaccgttttccagatactaaccggcgaagattggaacgaggtgatgtatgacgggatcaagtctcagggaggagttcaggggggaatggtcttcagcatatattttatagtgcttacactgtttgggaattataccttgttgaatgtgttcctcgctatagccgtggacaatctagccaatgcccaagagctcactaaagtcgaagccgacgagcaagaggaagaagaggctgcaaaccagaagttggcactccagaaggcgaaagaggtggcagaggtaagccctcttagtgctgccaacatgtcaatcgcagtgaaggagcagcagaagaaccaaaaacctgccaagtccgtgtgggagcagcgcacaagtgagatgcgtaagcagaacctgctggcttcacgtgaggcactgtacaatgagatggacccagacgaaaggtggaaggccgcatacactcgtcacctgcgcccagacatgaagacacacctggatagaccgctggtcgtagaccctcaggagaatcgcaataataatacaaataagagcagggcagcagagccgaccgttgaccagcgactgggacaacagcgcgctgaggacttcttacggaagcaagccagatatcacgatcgggcacgcgacccttctggatcagccggacttgacgcccgacgaccttgggctggatcccaggaggccgagctgagtagggagggaccctacgggcgtgagtccgaccaccatgctagagaggggtcactggagcagccaggattctgggagggcgaagccgagcgcggaaaagcgggagaccctcaccggagacatgtgcacagacaagggggatcccgcgaatctagatctggttcccctcgaaccggagccgacggcgagcaccggagacatagagcccatcggaggccaggagaggagggtccagaggataaagctgagagacgtgccaggcatcgtgagggcagccggccagccaggggaggcgaaggcgaaggggaaggcccagacgggggagagcggagacgcaggcataggcacggagcacccgctacctacgagggtgacgccaggcgagaagataaggagaggcgtcaccgccgtcgaaaggaaaaccaggggtccggcgtgcctgtctctggccctaatctgagcacaacccggccaatacaacaagatcttggcaggcaagaccctccactggctgaagatatcgacaatatgaaaaacaataagctggcaaccgcggagtcggccgcacctcatggctccctgggacatgccggactgccccagtcacccgcaaaaatgggcaactccacggacccgggacctatgttggccatcccagcgatggccacaaatccacagaatgccgcttccaggagaaccccgaacaaccccggtaatccctccaatcccggtcccccaaaaacccctgaaaatagtcttatcgtgaccaatcctagtggaacccagaccaactcggccaaaaccgctcggaagcctgatcatacgactgttgatatcccacccgcatgccctccaccgttgaaccatacagtcgtgcaggtgaataagaacgccaatccagatccactacccaaaaaagaggaggaaaaaaaggaggaagaggaagacgatcggggtgaggacggccctaaacctatgcctccatattcatctatgttcatcttatcaacaactaacccgctgcggcgactctgccactacatactcaacctgcgctacttcgagatgtgcatactaatggtgattgcaatgagttccattgccttggccgctgaagatcccgttcagcccaatgcccctaggaataatgtcctacgctattttgactatgtattcaccggagtgtttacttttgagatggtcatcaagatgattgacctcggactagtgcttcaccagggcgcttactttagggatttgtggaacatccttgattttatcgttgtgtctggtgccctggtggctttcgcttttaccggaaatagcaaaggtaaggacatcaacacaattaaaagccttcgcgtgctgcgagtgcttagacccttgaagactattaaaaggcttccaaaattaaaggcagtgtttgattgtgttgtcaattcactcaagaatgtgttcaatatcctgatagtctacatgcttttcatgtttattttcgccgttgtggccgtgcaattatttaaaggtaaattctttcactgcactgacgaatcaaaagaatttgagaaagactgtcggggaaaatatctcctgtacgaaaagaacgaggttaaggcgagggaccgggagtggaagaaatacgagttccattacgataacgtcctatgggccttgctcactttgtttaccgtgagtaccggtgagggctggcctcaggtgctgaaacacagtgtggacgccacttttgagaatcagggcccttcacccggttaccgaatggaaatgtccatcttttatgtggtgtactttgtggtcttcccattctttttcgtgaatatcttcgtggccctgatcatcattacattccaggaacaaggcgataagatgatggaggagtacagtttggaaaagaatgagagagcgtgcattgacttcgcaataagcgccaagccacttacgaggcacatgccacagaataagcagtctttccagtatcggatgtggcagttcgtggttagtcctcctttcgagtacacgatcatggccatgattgctctcaatacgattgtattgatgatgaaattttatggtgccagtgtcgcatacgagaatgctctgagggtgtttaacattgtgttcacgtccttgttttccttagagtgtgtcctgaaagtgatggccttcggaatccttaattatttccgcgacgcttggaacatttttgactttgtcacggtgcttgggagcattacggacattctggtcactgagtttggaaatcccaataacttcattaatctgagctttctgaggctattccgggcagcgcgtcttattaaactgctcaggcaggggtatactattcggattctcttgtggacattcgtccagtctttcaaagcccttccttatgtgtgcctcctgatagcaatgctgttctttatctacgctattattgggatgcaggtgttcggaaacattggaattgacgttgaagatgaagactccgacgaagatgagttccagattaccgaacataataacttccgcaccttcttccaggccctgatgctgctttttagatcggccactggggaagcttggcacaatatcatgctgagctgtctttctgggaagccttgtgataaaaactcaggtattctcaccagggaatgcggcaacgaattcgcctacttctacttcgtgtccttcatcttcctgtgtagctttcttatgcttaatttatttgttgccgtgataatggataatttcgagtacttgacccgcgattcaagtatcctcggccctcaccatctggatgagtacgttcgcgtatgggccgagtatgaccccgcagcctggggaagaatgccttacctcgacatgtatcaaatgctgaggcatatgtcccctcctctcggcctgggaaagaaatgtcccgctcgagtcgcttacaagcgcctgctcaggatggacttgcccgtggccgacgacaacacagtgcactttaattccaccttgatggcgctcataagaaccgctcttgacataaaaattgccaaggggggtgccgataagcagcagatggacgctgaactcagaaaggaaatgatggccatctggcctaatctatcacagaagaccctggaccttctggttacccctcacaagagcaccgacctcacagtggggaagatctacgctgcgatgatgattatggaatactacagacaaagtaaagcgaagaaacttcaagcaatgcgggaggagcaggatcgaacgccgctgatgttccagaggatggagccgccatccccaactcaggaggggggtcccggacagaacgctttgccgtcaacacagttagaccctgggggagcgcttatggcccatgagtcagggctgaaagagagccccagttgggtaacacagcgggcacaggaaatgttccaaaagacaggaacttggagccctgaacaggggccacccacagacatgccaaattctcaaccaaacagtcagtcagtcgaaatgcgggagatgggtagggatgggtattccgatagcgagcactacctgccaatggagggccagggcagagccgcaagcatgccgcgacttccagccgaaaatcaaaggcgcagaggaagaccacgaggaaataacctgagcaccatatcagacacctctccaatgaagagaagcgcctctgttctcgggcctaaagctagacgccttgacgactatagtctcgagagggtgccaccagaagaaaaccaacgacaccatcagcgtaggcgcgataggagccatcgtgcatccgaaagatcactagggagatacaccgacgtggacactggactgggtaccgatctgtctatgacaactcagtctggcgatttgccgagtaaggaaagagaccaggagagaggcaggccaaaagatcgcaaacaccgccaacaccaccaccaccaccaccaccaccaccatcctccaccacctgataaagataggtatgctcaggaacgaccggatcacgggagagcgagggcaagagatcagcgctggtctagatctccctcagaagggagagagcatatggcacaccgtcagggaagcagctccgtcagcgggtccccggctcccagcacctcaggcacctctaccccacggaggggtcggagacagctgccccagactccgagtacccctagaccccatgtgtcctatagcccagtcataaggaaggcagggggaagcggccctcctcagcaacagcaacagcaacaacagcagcagcagcagcaagctgttgctaggcccggacgcgcagccacctcaggacccagacggtaccccggtccgaccgccgagcccctcgccggtgacagaccccctaccggcggtcactcctcggggaggtcacctagaatggagcggcgagtaccaggccctgcaagatcagagtcgccacgcgcttgcaggcatgggggtgccagatggcctgcctctgggccacacgtctctgagggacctcctggaccacgacaccatggatactacaggggttcagactatgacgaggccgatggtccaggctccggtggcggagaggaagcaatggctggagcatacgatgcccctccacccgtgcgccacgccagcagcggggcaactgggagaagtcccaggacacctagagcgtcaggaccggcatgcgcgtcacccagccggcacgggaggcggctgcccaatggctattatccagcccacggcctggccaggcctaggggccctggctcacgtaaggggctgcatgagccctacagcgaaagcgacgatgattggtgtta

SEQ ID NO: 216656 - DNA, 804 bp, synthetic construct
  misc_feature 1..804: note = Description of Artificial Sequence: Synthetic coding sequence
  source 1..804: mol_type = other DNA
atgctctttatgttcatcttcgcagtcgtggctgttcagttgttcaaaggtaagttcttccactgcaccgatgaatcgaaagaatttgagaaagactgtagaggcaaatacttgctgtacgagaaaaacgaggtgaaagcccgagaccgggaatggaagaagtacgaattccactacgataatgtgctgtgggctctacttacactgtttaccgtgagcacaggggagggttggccccaagtgctgaagcattctgtcgatgctacatttgagaaccagggccctagcccagggtatagaatggagatgagtattttttacgtagtgtacttcgtcgtctttccatttttctttgtaaacatcttcgtggctctgataatcattacctttcaggaacagggcgataagatgatggaagagtactcacttgaaaagaacgagcgtgcctgcatcgacttcgccataagcgcgaaacctctgacaaggcacatgccacagaacaaacaatctttccagtatcgtatgtggcagttcgtggtatcacccccatttgagtatacaataatggcgatgatcgctcttaacaccattgttctcatgatgaaattttatggcgcatccgtggcgtacgagaacgccctgcgcgttttcaacattgtgttcacttccttattttccctggagtgtgtgctgaaggtgatggccttcggcattcttaattatttcagagatgcttggaacatctttgacttcgtcacggttttgggaagcattacggacatcctggtcaccgaatttggatag

SEQ ID NO: 216657 - DNA, 6794 bp, synthetic construct
  misc_feature 1..6794: note = Description of Artificial Sequence: Synthetic coding sequence
  source 1..6794: mol_type = other DNA
atggcgctctacaatcccatccccgtgagacaaaactgtttcaccgtaaatcggagcctattcatctttggcgaagacaacattgtcaggaaatacgctaagaaactcattgattggccacccttcgagtacatgattcttgcaactataattgccaactgtattgtgctcgctctggagcagcacctgcccgaagatgataaaacacccatgtctcgtaggctcgaaaaaaccgaaccatattttatcggaatcttctgttttgaagctgggataaagatcgtagcgctgggcttcatttttcataagggctcctatctgcgaaatggatggaatgtcatggatttcattgtggtgctatctggtattcttgctaccgcaggtactcactttaacacgcacgtagatctgcgtactctcagagccgtacgggtgctgagacccctcaagctcgttagcggtattccgtctctgcagattgttctgaaaagtattatgaaggcaatggtgcctttgctccagataggtttgttgctgttcttcgcaatcctgatgtttgccattattgggctcgaattttattcgggtaaactgcaccgcgcttgtttcatgaacaacagcggaatccttgagggatttgatcccccacacccctgtggcgtgcaggggtgcccagctggatacgagtgtaaggactggataggaccaaacgacgggataacccagtttgacaatattctgttcgccgtgctcacagtcttccagtgtattaccatggaaggttggacgaccgtgttgtataacaccaacgatgcccttggagcaacctggaactggctctatttcatcccactgattattatagggtccttctttgtgctgaacctggttctgggcgtgctctctggtgagtttgcaaaagagagggagagggtcgagaatcgtagggccttcatgaagttaagacgtcaacagcaaattgagcgcgagctaaatggatacagagcatggatagataaggctgaggaagtgatgttggccgaggaaaataaaaacgctgggacttctgctctggaggtgctgcggagagcgaccattaaacggtcccgcacggaggcgatgacccgggactctagtgacgaacactgcgtggatatctcctccgttggaactcctctggcaagggccagtatcaaaagcgctaaggtcgacggggtttcatatttcaggcataaggagcgactgctgagaatttccataagacacatggtcaagagtcaggtcttttactggatcgtgctctcgcttgtggccttgaataccgcctgcgtggcgatagtgcatcacaaccagcctcagtggctgactcatctactatactacgccgagttccttttccttggcctgtttctcctggagatgagcctcaagatgtatggaatgggaccgagactttattttcactcctcctttaattgtttcgactttggggttaccgtgggttccatttttgaagtggtgtgggcaatcttcaggcccggaacctccttcggaatcagtgtgctgcgcgcactcaggctcctgaggattttcaaaatcaccaaatattgggctagtctcagaaacctggtcgtaagcctgatgtcctctatgaagtctattatctctctcctgtttctgctgttcctctttattgtcgtctttgccttgctcggaatgcagcttttcggaggccgtttcaacttcaacgacggtacacccagcgctaacttcgatacgttccccgcagccattatgaccgtcttccagatactgaccggcgaagactggaacgaggttatgtacaacggaatcaggtcacagggcggagtttctagtgggatgtggtcagccatatactttattgtactgaccctgtttggtaactatactctgctcaacgttttccttgcgatcgcagtggacaacttagctaacgctcaagagcttactaaagacgagcaggaggaagaggaggcctttaaccaaaaacacgctcttcagaaggcaaaggaggtcagtcccatgtctgcgccaaatatgccgagtatcgagcgtgaccgcaggcgtcgccaccatatgtctatgtgggagccaaggagtagtcatctgcgggagcggagacggagacaccacatgagtgtctgggagcaaaggacctcccagttacgaaaacacatgcaaatgtcaagccaagaggcactgaacagggaggaggcccctaccatgaaccccctgaatcccctcaatccgttgagttctctgaacccacttaatgctcatccctcgctatataggagaccgagggcaattgaaggcctggctctcggtttggctctggagaagttcgaggaggaacgaatatccagggggggaagcctgaagggcgatgggggtgataggtcttccgccctggacaaccagcgtacacccttgagcctcggccaaagggaaccaccctggttggcacgcccttgccacggcaactgcgaccctactcagcaggaagcaggtgggggtgaggcagtagtcaccttcgaggaccgcgctcgacacagacagagtcagcgcagaagtagacatcgccgagttagaacggagggtaaggagtcgagctccgccagtcggagtcgctccgccagccaggaacggagtctcgacgaagcgatgccgactgagggggagaaggaccatgagctgagggggaaccatggagccaaggagccgaccatccaggaagagagagctcaagatctccgaaggactaatagcctcatggttagcagaggctctgggctggctggcggattagatgaggctgatacacctttggtgctgccacacccagaactggaggtggggaaacacgtggtgttaactgagcaggaaccggaaggcagtagcgagcaagcgctcctcggcaacgtacagctggacatgggccgagtgatcagtcagagcgagcctgatctgtcatgcatcactgcaaacacagataaggcgacaaccgagtctacttctgtaacagtagcaatcccggacgtggaccccctggtagacagcacggtagtgcacataagtaataagaccgacggggaggccagtcccttgaaagaagcagagatccgggaagatgaagaggaagttgagaagaaaaagcaaaagaaagagaaacgcgagacgggaaaggctatggtaccccacagcagcatgttcatattttcaacgacgaaccctattcggagggcttgccactatatcgtcaaccttcggtatttcgagatgtgtatactgctggtgattgctgcttcttccatcgccctagctgccgaagaccccgtcttaaccaattccgagcggaacaaggtactgaggtattttgattatgtgtttactggagtgttcacattcgagatggtgataaaaatgattgaccaagggttaattctccaggatggttcctacttccgggacttatggaacatactggacttcgtggtggtggtgggggctctcgtagcgtttgccttagctaatagcatgaagactaacaagggacgagacatcaagactattaagagtctgagagtactgcgcgtattaaggccactcaagaccataaaaaggctcccgaagttgaaggctgtgttcgattgcgtggttaccagcctaaagaacgtgtttaatattttgattgtctacaagctgttcatgttcatatttgccgttatcgcggtacagctgttcaagggtaagtttttttattgcacagactcttcaaaggacaccgagaaggagtgtattggcaactacgtggaccatgaaaagaataaaatggaagtaaaaggcagagaatggaagagacatgagtttcattatgataacattatttgggccttactcacactctttacagtgtctaccggagaaggttggccacaggtcctccagcattccgtggacgtcaccgaggaggatcgcggtccatcgagatctaatagaatggagatgagcatcttctatgttgtgtacttcgtcgtctttcccttcttctttgttaatatttttgtcgctctgataattattaccttccaagagcaaggagacaagatgatggaagaatgctcgctggagaaaaatgagcgcgcatgtatcgatttcgctatctctgctaaacccttaactcggtatatgccccagaacaggcataccttccagtacagggtgtggcatttcgtcgtgtcgccaagctttgagtacacgatcatggctatgatcgccttgaatacggtggtccttatgatgaaatactatagcgccccatgcacttatgagcttgccttgaaatatctgaacattgcgttcacaatggtgttctcactggaatgcgtgctcaaggtgattgcgttcggttttctgaattattttagagacacctggaatatcttcgacttcatcacagtgatcggtagtattactgaaattatcctgactgactctaaactggtcaacaccagcggcttcaatatgtccttccttaagctgttcagggccgctcgcctaattaaattgctccggcagggctacacgatccgcatactactgtggaccttcgttcagtcctttaaagccctgccctatgtgtgcttgctcattgctatgctcttcttcatctacgcaataatcggtatgcaggtgttcgggaacattaagctcgacgaagagagccacatcaaccgacacaacaacttccgctcgttcttcggcagcctcatgctgctgtttcggagtgccactggcgaagcctggcaggaaattatgctctcgtgcctgggtgaaaaaggatgcgagcccgatacaaccgccccttcaggccagaatgaaaatgaacggtgcggaacagaccttgcatatgtgtactttgtcagctttatctttttttgcagtttcttaatgctcaacctgttcgtcgcagtgattatggataattttgaatacctgacacgagatagttccatcctaggtccccaccacctggatgagttcgtccgggtgtgggcagaatatgaccgcgctgcatgcggacgcatccattatactgagatgtacgagatgctaaccttgatgtctcccccactggggctcgggaagcggtgtccgagcaaagtggcctacaaaaggctggtactgatgaacatgcctgtcgcagaagacatgaccgtgcatttcacctctaccttaatggctctgattaggaccgccctggatatcaagatagccaaagggggtgcagatcgccagcagctcgactccgaacttcagaaagaaacgttggctatctggcctcatctgtcccaaaagatgctcgaccttctggtgcccatgccaaaggcgtccgatcttacagtgggaaagatatacgccgcaatgatgataatggattattataaacagtctaaagtgaagaagcagagacaacagttggaggaacagaagaatgcgccaatgttccagagaatggaaccaagctcactgcctcaggaaataatagccaatgctaaggcgctgccctatctgcagcaggatcctgtgagcggtctctccgggagatccgggtacccctcgatgtcacctctatccccccaggatattttccagctggcttgtatggatcccgctgatgatggacagttccaagaacgccagtctctcgaacccgaagtgtcagagctgaagagcgtacaaccctcaaatcatggcatctatctgccgtcagacacccaggagcatgccggtagcgggcgtgcttcgagtatgccccgtctgactgtcgatccacaggtggtcactgacccttcatcaatgaggcggtcattcagtacgatcagagataagcgtagcaattcctcctggctggaggagttcagtatggaacgatcttcagaaaatacatataaatcgagacggaggtcttaccattcctccctgcggcttagtgcacatcgactgaattcagactcaggacacaaaagcgacacacatcgatcaggtgggagagagcgagggagatctaaggaaaggaaacacctgctgagccctgacgtgtcccgctgtaactccgaagagagaggaacacaggcggattgggagagtccagagagacgacagagtaggtctcccagcgaaggcagaagccagacaccaaaccgccaagggacaggctcgctgagcgagagctccattcctagcgtatcagatacatccaccccaagaagatctcgcaggcagctgcccccagtgccacctaaacctcgtccacttctaagttatagctccctgatccggcacgcaggctccatttctccacccgcagacggaagcgaggagggcagccctttaacctctcaggcgttggagtccaataatgcctgtctgacagagtccagcaactcaccacatcctcagcagtctcagcacgcgtcccctcagcgatatatttctgaaccttacctcgccctgcacgaggactcgcatgcctctgattgtggggaagaagagactctcaccttcgaagccgctgtggctacctccttggggagaagcaatactattggctccgcccctccattgcgccattcatggcagatgccaaatggacactatcgacgccgtcgcagaggaggaccgggtcccggaatgatgtgcggcgctgtgaacaatctcctaagtgatactgaagaagacgataaatgcta

SEQ ID NO: 216658 - DNA, 6608 bp, synthetic construct
  misc_feature 1..6608: note = Description of Artificial Sequence: Synthetic coding sequence
  source 1..6608: mol_type = other DNA
atggccctatataatccgattccagttcgccaaaactgttttactgtgaaccgtagcctgttcatctttggtgaggacaacatagtgaggaagtatgctaagaagcttatcgattggccaccattcgaatacatgattttagccacaattattgcgaactgtatcgtgttggccctggagcagcatttgcctgaggacgacaagacacccatgtctcgacgccttgagaagacggagccctatttcataggcatcttttgtttcgaggcagggattaagatagtcgccttgggttttattttccacaagggcagctacctccggaatggatggaacgtgatggactttattgtggtgttaagcggaatcctggccaccgccggaactcattttaatacacatgtagatctccgaaccctgcgagctgtccgggtgcttcggccactgaagttggtctcgggaatcccctccctgcagattgttcttaaatctattatgaaagcgatggtccctctgttgcagataggcctactcctgttcttcgccattctgatgtttgctattattggacttgaattttattcaggcaaacttcacagagcgtgcttcatgaataacagcgggatcctagaaggcttcgatcctccgcatccgtgcggagtgcaagggtgccccgcaggctatgaatgcaaggactggattggccctaacgatggcatcacgcagttcgacaatatactgttcgccgtactcacggtgtttcagtgcatcacaatggaggggtggactacggtcctatacaacacaaacgacgcactaggagcaacatggaactggttgtactttatacctctgatcatcataggtagcttcttcgtgttaaacttggtcttgggagtgctgagtggagagttcgcgaaggaacgtgaaagagtggaaaatagaagggcctttatgaagcttagaaggcagcaacagattgagcgggagctgaatggctacagggcctggattgataaggctgaggaggtcatgctcgcggaagaaaacaagaacgccggtacctctgcactcgaagttctgcggagagccacgattaagcggtctcgtacggaagcaatgaccagggacagctccgacgaacactgcgtggacatcagttccgtgggtacccctctggctagagcctctatcaagagcgcaaaagtggatggtgtgtcctatttcagacacaaagagcgcttgctccgcatctcaattcggcacatggtgaaatctcaggtattctactggatcgtgctcagtctggtggccctgaacaccgcgtgcgtcgcgattgtgcatcacaatcaacctcagtggctgactcatcttctctactacgccgagtttctattcctaggactgttcctgttagagatgagtttgaagatgtatggcatgggtccaagactgtattttcacagttcattcaactgctttgacttcggcgttactgtcggaagcatcttcgaagtagtctgggctatttttagacctggtacgtccttcggcatcagcgttcttcgcgctttgagattgctccggatctttaaaatcacaaaatactgggcaagtcttaggaatcttgtggtgagtttaatgtccagtatgaagtccatcataagcctgttgttcctgttgttcttattcattgtggtctttgcactgctaggtatgcagctctttggaggccgattcaactttaatgatgggactccctccgcaaactttgacacatttccggctgctattatgactgtgttccagatccttacaggagaggattggaatgaggtaatgtataacggaattaggagccaggggggagtgtcttccggtatgtggagcgccatctacttcatagtgctcactttgttcggcaactacactctgttaaatgttttccttgcaatagcagtagacaaccttgctaatgcccaggagttgactaaagacgagcaggaggaagaagaggcttttaaccagaaacacgcactgcagaaagcgaaagaagtgtcccctatgtctgcaccaaacatgccctcgatcgaacgagagcgtcggagacgtcatcatatgtccgtgtgggaacagcgtacatctcagctgcgcaagcatatgcaaatgtcatcacaggaggctctgaatcgcgaggaagctccgactatgaaccccctgaacccgctgaacccactcagttccctaaaccccctcaacgctcacccctccctctataggaggccacgtgcaatcgaaggcttagcacttgggcttgcgctagaaaaatttgaggaggagagaatctcccgaggtggttctcttaagggggatggcggtgatcgctcctccgccctcgataaccagcgaactcccttatccctgggacagcgagagccaccatggcttgccagaccctgccatggcaattgcgaccccacccagcaggaggccggtggcggagaagccgtggtgacctttgaggatcgcgcaagacatcgccagtcccagcggagaagccggcaccggagggtaagaaccgaagggaaggagtcctcaagtgccagccggagtcgtagcgcgtctcaggagaggagcttggacgaagccatgcctacagaaggagagaaggatcacgaactacgtggcaatcacggcgcaaaagaacccactattcaggaagaacgcgcacaagatttgcgccgtaccaattccctgatggtatcaagagggagcgggttggccggtggcctggatgaggccgataccccccttgttctgcctcacccagaattggaagtcgggaaacatgtcgttctgacagagcaagaaccggagggatcttccgagcaggccctgctgggaaacgtgcaactggacatgggcagggtcatctctcaaagtgagcccgacctttcgtgcataactgcaaacaccgacaaagccaccactgagtcaacttcggttacagtggcaatccccgacgtggacccgctggtggactctacagtagtgcacatatccaataaaactgacggcgaagcatcaccccttaaagaggccgagatccgcgaggacgaagaggaggtggaaaaaaaaaagcagaagaaagagaaaagggaaaccgggaaggctatggtcccacattcatctatgttcatcttttctaccactaaccctattcgacgcgcatgccattacattgtcaatctcaggtatttcgagatgtgtatcctgctggtgattgcggcttccagtattgccctcgccgcagaagatcccgtattaacaaatagtgagaggaacaaggtcctcagatacttcgattacgtgttcacaggtgtgttcacttttgagatggttatcaagatgattgaccagggactgattcttcaggacggctcttacttcagagatctgtggaatatcttagatttcgtcgtggtggtcggcgcactcgtagccttcgcattggccaatagcatgaagaccaacaaggggagggacatcaagaccatcaaatcccttagggtcctgagagtcctccgccctctgaagacgataaagagactccctaagctgaaagcggtgttcgattgcgtggtcacatctctaaagaatgtttttaacatcctcatcgtgtataagctgttcatgtttattttcgccgtgatagctgtgcagctcttcaagggcaagtttttttactgcactgattcatccaaggacaccgagaaggagtgtatcgggaactacgtggaccatgaaaagaataagatggaagtgaaaggcagggaatggaagagacatgagttccattatgataacattatatgggctctgctgacgttgttcaccgtctcaacaggtgagggctggccacaagtgcttcagcacagtgtggacgtgactgaggaggatcggggtccgagccgcagtaaccgcatggagatgagcatcttctacgtggtttattttgtggtctttcctttctttttcgtcaatattttcgtggcactgattataatcacatttcaggaacagggcgacaagatgatggaggaatgctctctggagaagaatgagcgcgcttgcatcgacttcgccatatctgctaaacctctaacacgctacatgccgcaaaatcggcatacttttcagtacagagtctggcacttcgtggtgtcacccagctttgagtacacaattatggcaatgatcgctctgaatactgttgtcctgatgatgaaatactattcggcaccctgtacctacgaactggctctgaaatatctgaacatcgcctttacaatggtcttttccctggagtgcgtgctgaaagtcatcgcatttggcttcctgaactacttcagggacacctggaatatattcgatttcatcacagtaattggctcgataactgagatcatcttgacggactcaaaactggtgaacaccagcggctttaacatgtcattcttgaaattgttccgggcagctcgtctgattaaacttttgcgccagggctataccattagaatcctgctctggactttcgtccagtcttttaaagccctcccatatgtatgtctgctgatcgctatgctattcttcatttacgccattatcggaatgcaggtgttcggcaacattaaattggacgaagagtctcatatcaatcgccataataacttccggagcttcttcgggtcactgatgctactcttccgttccgccactggtgaggcctggcaagagattatgctgtcgtgtctaggggagaagggctgcgaacctgacaccacagccccttcaggccaaaacgaaaacgaaaggtgtggtactgatctcgcttacgtgtactttgtctcatttatcttcttttgcagcttcctgatgctgaacctatttgtggcagtgattatggacaacttcgaatacctgacccgggactcctccattctgggtcctcatcacttggatgagttcgtgcgggtatgggcggagtatgacagggccgcttgcgggcgtatcccatacaaggacatgtataaactggtacgggtaattagcccccctctgggactgggggagaactgcccctacagagtggcatgtaagcgcttagtattgatgaatatgccagtggccgaagatatgaccgtgcacttcacctcaaccctgatggctctgattcgcacagccttggatatcaaaatcgccaaggggggagccgacaggcaacaattggactcagagctacagaaggaaactctcgccatttggcctcatctatcccagaaaatgcttgacctgcttgtgcccatgcctaaagcatccgatttgacagttgggaagatctacgccgctatgatgataatggactattataaacagtcaaaggtgaagaagcagcgtcagcagttggaagagcagaaaaatgccccaatgttccagcgaatggagccaagcagtctaccacaggaaatcatcgcaaacgcaaaagccctgccctacttgcagcaggacccggtctcggggctgtccggcagaagtggctacccctccatgtctccactctcacctcaagatattttccagctcgcatgcatggacccagccgacgatggacagttccaagagcgccagtcactggtcgtgacagacccttcctcaatgagacggtccttcagtacaatacgcgataagcggtccaactcttcttggctcgaagagtttagcatggaaaggtcctctgagaacacctacaaatctcgaaggaggtcatatcacagtagccttagactctctgctcacaggctgaacagtgattcagggcataagagtgacactcacaggtctgggggacgcgaacgcggaagatccaaagaacgcaaacatctcctaagcccagacgtgagtcgatgcaatagcgaggaacggggaacacaagccgattgggagagccccgagcgcagacagagtcgttcaccctcagagggcaggagccagactcctaaccgtcaggggaccggttcgcttagcgagtcatcaattccatccgtgtctgatacctccactcccaggaggtcccgtcggcagcttccgccagtccctccgaaacccagaccgctcctgtcctatagttctttgattcggcatgctggcagtatttctcctcctgcagatggcagtgaagagggatcaccacttacgagccaggcactggaaagtaataatgcctgcctgaccgagtcctccaattcaccacatccacagcagagccaacatgcctccccccagcgctatataagcgaaccgtacctagccctgcacgaggattcacatgcatcagactgcggagaagaggaaactctgacctttgaagctgctgttgcaacctccttgggcagatccaacacaattggcagcgccccacctctccgacattcctggcaaatgcctaatggacattatcggaggcgacgtcgcggagggcctggtccaggcatgatgtgcggagccgtgaataacttactgtctgacaccgaggaagatgataaatgcta

SEQ ID NO: 216659 - DNA, 6884 bp, synthetic construct
  misc_feature 1..6884: note = Description of Artificial Sequence: Synthetic coding sequence
  source 1..6884: mol_type = other DNA
atggcgaggtttggagaggcagttgttgccaggccagggtctggggacggtgattctgaccagagccgtaacaggcagggaacaccagtgcctgcttccgggcaggcagcagcctataaacaaaccaaagcacagcgcgctcggaccatggcactctacaacccaattccagtgagacagaactgctttactgtcaatcgctccctgtttatcttcggcgaagataatattgtgaggaaatacgccaagaagctgatcgactggccacctttcgaatatatgatcctggccaccatcatagccaactgcatcgtgcttgcattggaacagcatctgccagaggatgacaaaacccccatgtccagaagactggagaaaaccgaaccatattttataggaatcttttgctttgaagcgggtattaagatagtcgcactggggttcatattccataaaggttcgtacctacgcaacgggtggaatgtgatggacttcattgttgttctgagcggtattcttgccacggcgggaacccactttaacactcacgttgatctacgcaccttaagagccgttcgggtactgcggcctctgaagctggtgagcggcattccttccctgcagatcgtccttaagtctattatgaaagccatggtgccactcttgcagatcggcctgcttttgttttttgcgatcctaatgttcgccatcatcggactagaattttactcaggcaaactgcaccgtgcatgttttatgaataattctgggatcctggagggattcgacccccctcacccctgtggcgttcagggatgcccagctggttacgagtgtaaggattggattggccctaacgacggcattacacagtttgataacattcttttcgcagttctcaccgtgttccagtgtataactatggaaggctggactacagtgctctataacaccaacgacgcactgggtgcaacctggaattggctgtacttcattccactgatcatcataggttctttttttgtgctgaatctcgtcctcggtgtgctctcaggagagttcgcgaaggagagggagcgtgtcgaaaacagaagggccttcatgaagttgcgacgccaacagcagatcgagcgcgagctcaatggctacagggcctggattgacaaggctgaggaagtgatgctggcggaggagaataaaaacgcaggaacttccgccctggaggtactgaggcgcgcaactattaaaaggagtagaacagaggccatgacacgcgattccagtgacgaacattgcgtcgacatttcttcagtgggaactccccttgcacgtgcgtcgatcaagtccgctaaagtcgacggtgtatcatattttagacataaagaacggttactgcggatctctattcgacatatggtgaagtcccaggtgttctactggatcgttctgagcctggtggctctgaacaccgcgtgcgttgcaatcgttcaccacaatcagcctcagtggctaacccaccttctttactatgcggagtttctcttcctcggtctgttcttactggagatgtccctgaagatgtacggcatggggcctcgactttacttccacagtagcttcaactgttttgacttcggggtgaccgtagggagcatttttgaagtagtgtgggctatcttccgcccaggaacaagctttggcatctccgtcctgagggctcttcgtctgctgaggatttttaagataacaaagtattgggcttcactccggaacctggtggtttccctgatgtcctccatgaagtctattattagcctgctgtttctgctctttctcttcatcgtcgtcttcgcacttctcggaatgcaactgtttggaggcagatttaattttaacgatggtacaccaagcgcaaactttgatacatttcctgccgctatcatgactgtgtttcaaatcctgactggcgaagactggaacgaggtcatgtataatgggatacgctctcaggggggtgtgagctctggtatgtggagcgccatttattttattgtcctcaccctattcggtaattacaccttacttaatgtatttttggccatcgcggtggataacttagccaatgcccaggagctaaccaaagatgagcaggaggaagaggaggctttcaatcaaaagcacgcactgcagaaggcgaaagaagttagcccaatgagcgcacctaacatgcccagtatagagcgcgaacgcagaaggaggcatcatatgtctgtgtgggaacaacgaacctctcagttaaggaagcacatgcagatgagcagccaggaggcccttaatagggaggaagccccaacaatgaacccactcaatccactcaaccccctttcaagcctgaaccctctgaatgcacacccctcactgtacagaaggccaagagctatcgagggtttggcactggggctggccctagaaaaattcgaagaggagcgcatcagccggggaggtagtctaaagggcgatgggggtgataggagcagcgcgctggataatcaaaggacgccactctctctcggccagagagagccaccatggttagctagaccctgccatggaaactgcgatccgacccagcaggaggcagggggtggtgaagcagttgttacgttcgaggatcgggctagacacagacaatcacagcgccgttcaaggcaccgcagggtccggaccgagggcaaggagtcatcatccgcgtctcgtagtcgaagcgcctcgcaggaacggagtttagacgaagccatgcccacagagggcgagaaagatcacgagttgcgcggtaaccatggggcaaaggagcctaccatccaggaagaacgagctcaagatctgcgccgaactaactcattgatggtgtcccgcggatccggactggccggtggcttggacgaagccgacacaccactggtgctgccacaccccgagttggaggtaggaaaacacgttgtgcttaccgagcaggaacccgaaggatcctctgaacaagccctgctggggaacgtccagctggatatgggcagggtgatctcccagagtgaaccggacctctcttgtatcactgctaacaccgataaggcaaccactgaatcaaccagcgtcacagttgctatcccggacgtggaccccttagttgacagcactgtggtccacatatctaacaaaactgatggtgaagcctcgccactcaaagaagctgaaattagagaagacgaggaggaggtagagaagaagaagcagaaaaaggagaagcgcgagactgggaaggcgatggtcccccatagttctatgttcatcttttccacaaccaatcctattcgcagagcctgccactatatcgtgaacctcagatattttgaaatgtgcatactcctcgtgatcgccgcttcttccatcgccctggccgcagaggatccagtcctcacaaatagcgagaggaacaaggtattgcgctattttgattacgtgttcaccggggtcttcacattcgagatggtgatcaaaatgattgaccaaggtcttatccttcaggatggctcttatttccgcgatctctggaacattttggactttgtggtggtggtgggcgctttagtcgctttcgccctcgccaacgccttggggacaaacaagggaagagacatcaaaaccataaaaagtttgcgtgttctgcgggtcttgcgacccctcaagaccatcaagaggctccctaagctgaaagcggtgttcgattgcgttgtgactagccttaaaaatgttttcaatatcctcatagtctacaagctgttcatgtttatatttgctgtgatcgctgtgcaactttttaaaggaaagtttttctattgtactgactctagcaaggacactgagaaggagtgtatcggcaactacgttgatcacgagaagaacaagatggaggtcaaagggcgagaatggaaacgccatgaattccattacgacaatattatatgggcgcttctgaccctgttcacagtttccactggggagggctggccacaggtgttacagcatagtgtcgatgtgactgaggaagaccgcggaccttccaggagcaaccgtatggagatgtcaattttctacgtcgtgtattttgtcgttttccccttttttttcgttaacatctttgtggctctgatcattataacgttccaggagcagggcgacaagatgatggaggagtgcagtctggaaaagaacgaacgggcttgtatcgatttcgccatcagcgctaagccactgactaggtacatgcctcagaaccgtcatacctttcagtaccgagtgtggcacttcgtggtgtctccaagtttcgaatacaccataatggcaatgatcgctctcaacaccgttgttttgatgatgaagtattattccgcaccctgtacttatgagttagctctaaaatatctaaatattgccttcacaatggttttttccctggagtgcgtgctgaaggtgattgccttcggcttcctgaattacttccgtgatacttggaacatttttgatttcattactgtgattggctctatcacagagatcatccttaccgacagcaagttggttaatacatcaggattcaacatgagctttctgaaattgttccgggcagctagactaatcaaattgctccgtcaggggtacaccatccggattctgttatggacctttgttcagagctttaaggccctgccttacgtgtgtctcttgatcgccatgttattcttcatttacgccattatcggcatgcaggttttcggcaatatcaagctagatgaagagagccatattaaccgccacaacaacttcaggtcattttttgggtccctgatgcttttgtttcgctcagccaccggggaggcttggcaggaaataatgcttagctgcctcggcgagaaaggttgcgagccagataccacggctcctagtgggcagaacgagaacgagcgatgcggtacagaccttgcctacgtgtatttcgtttcctttattttcttctgcagtttcctgatgctcaacctttttgtggccgtgatcatggacaatttcgaatacctgacacgggactcaagcatactgggccctcatcacttagacgagtttgtgcgtgtctgggcagagtatgacagagccgcttgcggccgaatacactacacagaaatgtacgaaatgttaaccctgatgagccccccactgggactgggtaagcgctgcccctcaaaggtcgcctataaacgcctggtgctcatgaacatgcccgtggccgaggacatgaccgtgcacttcacatccactctgatggcattaatacgtacagctctggatattaaaatcgctaagggaggagctgacagacaacagttagactcggaacttcagaaggagaccctggctatatggcctcatctaagccagaagatgctggatttgctggtccctatgccgaaagccagcgatctgacggttggcaagatttatgctgcaatgatgataatggattactacaagcagtctaaagtgaaaaaacagcgccagcagcttgaagagcaaaagaacgctcctatgttccaaagaatggagccatcctccttgcctcaagaaatcatcgcaaacgctaaagcgctgccatacctgcagcaggacccagtgagcggtctgtccggtcgaagcggttatccttccatgtcccccctaagccctcaggacatttttcagttagcttgcatggacccagctgacgatggccagtttcaggaacggcaatctctggagccggaggtatccgagctgaaaagcgtgcagccgtcaaatcacggtatttacctgcctagtgacacacaggagcatgcagggagcggccgagccagtagtatgccaaggttaacagtagacccccaagttgtcaccgacccatctagtatgcgccgttccttcagcactatcagagacaagcgttccaactcgtcctggctcgaagagttttcaatggagagatctagcgaaaacacctacaaatccagacggcgatcgtatcatagttccctgaggctctccgcccacagactgaattcagattccggccataagtctgacacacaccgctcaggcggtcgggagcggggacgctccaaggagcggaagcatctcctgagccccgatgtgtctaggtgtaatagtgaggagcggggaacccaggcagactgggagtcccccgagcgacgacagagtaggtctcccagcgaaggaagatctcagacacctaacagacagggaacgggtagtctgtctgagagttccatacctagtgtctccgacactagcacccccagaagatcaaggcggcagctgccgcctgtacccccaaagcctcgaccgcttttgtcctacagttctctcatacgccatgccggttcaataagcccacctgcagacggctccgaggagggatcaccacttacaagtcaggcactggaatccaacaacgcttgcctgactgaatcctctaatagtccccatccccaacagtcccagcatgcctcgccccaaagatatatctctgagccatacctggcccttcatgaggacagccatgcctccgattgtggagaggaggaaaccttaacatttgaagccgctgtcgccacctcacttggtcggtccaatacgatagggtccgccccacccttaaggcactcctggcaaatgccaaacggacattaccgcaggcgcaggcggggagggcctggccctggcatgatgtgcggcgcagtcaacaatctgctgagcgacactgaagaagacgataaatgcta

SEQ ID NO: 216660 - DNA, 5633 bp, synthetic construct
  misc_feature 1..5633: note = Description of Artificial Sequence: Synthetic coding sequence
  source 1..5633: mol_type = other DNA
atgcttgctgaggaaaataaaaatgctgggacatcagccctcgaggtgctccggagggccaccatcaagagaagcaggactgaagccatgacccgcgactcgagtgatgagcactgcgtagatatatcaagcgtggggacgcctctcgcccgtgccagtatcaagtctgccaaggtggatggggtgtcatatttccgccacaaggagaggctcttgcggatttccatcaggcacatggttaagagtcaggtgttctattggattgtcctgtctctcgtggcccttaataccgcttgtgtggcaatcgtccatcacaatcaacctcagtggttgactcacctcctctattacgcagaattcctttttcttggcctgttcctgctggagatgtctctaaagatgtatggtatgggaccaagattgtactttcactcctcttttaattgcttcgattttggggtgactgtcggcagtatcttcgaggtcgtgtgggctatttttaggcccggaacatctttcggcattagtgtcctcagagccctgcggctactgcgaattttcaagataacgaaatattgggcttccctccgcaatcttgtggtctctcttatgagtagcatgaaatcaatcatttctctgttgttcttgctcttcttgttcattgtggtctttgccctcctgggaatgcaacttttcggaggcagatttaattttaacgatgggaccccgtccgccaacttcgacacttttcccgctgcaattatgactgtgtttcagatcctcacaggagaggactggaatgaggtgatgtataacggcattagaagtcagggcggagtgagctcaggcatgtggtcagccatttactttatagtcctgactttgtttggaaactacacccttcttaacgtgtttcttgccattgctgtggataacctggccaatgctcaggagttaaccaaggatgaacaagaagaagaagaggcatttaatcagaagcacgccctccaaaaagcaaaagaggtgtcacccatgtccgctcccaatatgcccagcatcgagagggacagacgtcgccgacaccatatgagcatgtgggaacctcggtcctctcacttacgggagagacgtcgacggcatcatatgtccgtctgggagcaaaggacaagccagctgcgaaagcacatgcaaatgtcgtcacaggaggccctgaatcgcgaagaggctccaaccatgaaccccctcaacccccttaatccgcttagctctttgaacccactaaatgcccatcccagcctgtaccggcgtcctcgggcaatcgagggccttgcgctgggccttgcattggagaagtttgaagaagagcgcatttcacgagggggttcactgaagggcgatggcggagacaggtcaagcgcgctggacaatcagagaacccccctgtcactcgggcagcgcgaacccccttggctcgctagaccctgccatggtaattgcgaccccacccaacaggaggcaggtggaggagaagccgttgtgacatttgaggatagggctagacacaggcaaagccagcgcaggtctaggcaccgccgtgtccgcaccgagggtaaagagtctagctcggcctctaggtctcggtcagcaagtcaggaaagaagcctcgacgaggctatgccaactgagggggagaaagaccacgagctgcgaggcaatcacggtgccaaggagcctacaatacaagaggagagagcgcaggatttgcggagaaccaatagtttgatggtgtcccgagggtccggacttgcgggtggcctggacgaggccgacactcccctcgtccttccgcaccctgagttggaggtgggcaagcacgtggttctgaccgaacaagagcctgaaggctcatccgaacaggccttgttgggaaacgtgcagctggatatgggcagagtaatctcccaatccgagcccgatttatcctgtatcaccgccaataccgacaaggcgaccaccgagtccacttctgtgacagtggcgattcccgacgtcgaccctcttgttgactctaccgtcgtgcacatcagtaacaagacagatggcgaggccagtcctttaaaagaggccgagatccgggaggatgaagaagaagttgagaaaaaaaagcagaagaaggagaagagggagacgggcaaagcaatggtcccccattcgtctatgttcatattctcaacaactaaccccatacgcagggcatgccactacatcgtgaacttacggtatttcgagatgtgcattctgttggtcattgctgcatcttctatagccctggcagcggaggaccctgtcctgactaattcagaaagaaacaaagtgttgagatactttgactacgtcttcacaggcgtattcactttcgagatggtcattaagatgatagatcagggcctaatcctacaggatggcagttactttcgcgatctttggaacattttggatttcgtcgtagtggtgggtgcccttgtggcctttgctctagccatgtcccttgaaaccaataaaggaagagacatcaaaacaatcaagagcctgcgggtgctccgcgtacttagacccctgaaaaccattaagcgcctacctaagctgaaagcggtctttgactgcgtggtgacgtctctgaagaatgtgttcaacattcttatcgtttataagctgttcatgttcatctttgctgtgattgccgtgcagctatttaagggcaagtttttctattgcaccgacagtagtaaggataccgagaaagagtgcatcggcaactatgtagaccatgaaaagaataaaatggaagtaaagggcagggaatggaagaggcacgagttccactatgacaacataatttgggcactgctcaccctgtttaccgttagcaccggagaaggttggcctcaagtgttgcagcacagcgtggatgtgactgaggaagaccgtgggccttccaggtccaaccggatggagatgtccattttctatgtggtgtattttgtcgttttcccctttttcttcgtgaatatctttgtggcccttatcattatcacttttcaggagcagggcgataagatgatggaagagtgttccttggagaaaaacgagcgcgcttgtattgattttgccattagtgcgaaacctctgacaagatacatgcctcagaataggcatacattccagtatagagtgtggcacttcgtcgtcagtccatccttcgagtacaccatcatggcaatgatcgcactgaacactgtggtcctgatgatgaaatactactcggcaccttgcacatacgagctagccctgaaatatctaaacattgcgttcaccatggtgttctctctcgagtgcgtactgaaggtcatcgcatttgggtttctgaattacttcagagacacctggaatatttttgacttcatcacggttatcggcagcattactgagatcatacttaccgatagcaaactggtgaatacatctgggtttaacatgagtttccttaagctgtttagagctgcccgtctaattaaactgctgcgtcaaggctataccatccgcatcctcctgtggacatttgtccagagcttcaaggcactgccctatgtctgcctgctcatcgcaatgctgtttttcatctatgctattatcgggatgcaggtcttcggaaatataaagctggacgaagagagccacataaaccggcacaacaattttcggtccttcttcgggagtttgatgctactgtttcgttctgccacaggggaagcctggcaggagatcatgctctcatgtctgggcgagaaaggatgtgagcccgacacgacagccccatcaggtcagaacgagaatgagcgatgtggcacggatctcgcttatgtttatttcgtctcatttatcttcttctgcagttttctgatgctgaacttgtttgttgcagtgataatggataactttgagtacttgacaagagactccagtatattaggaccacatcaccttgatgagtttgtccgcgtgtgggccgaatacgatagagcagcttgcggacggatccactatacggagatgtatgagatgctcactctgatgtctcctcctctaggactcggaaagcgctgcccgagcaaggtagcatacaaaaggctcgtgctcatgaacatgcctgtggcagaggatatgacagtgcattttacatccacgctgatggccctgatccggacggccctcgacatcaagatcgccaaaggcggtgctgaccggcagcaactggattctgagctacagaaagaaacactcgccatatggcctcatctctcccagaagatgctggacctacttgtgcccatgcccaaagcctcagatctcacagttgggaaaatctatgctgcaatgatgattatggactattataagcagagcaaagttaagaaacagcgacaacagcttgaagaacagaagaatgcaccaatgttccagcggatggaaccatctagcctgccccaggagattatcgcaaatgctaaagccctcccttacctgcagcaggaccctgtgagcgggctatccggacgcagtggttatccttcaatgtctcccctgtctcctcaggatatttttcaactggcttgcatggacccagctgacgatgggcagtttcaagaacgacagtcacttgtcgtgactgatccgagttccatgcgtcggagcttctctaccatacgcgataaacgctcaaacagtagttggttagaagagttttccatggagcgatcttcagaaaatacctacaagagccgcaggaggtcttaccactctagcctccgattgtctgctcatagattgaactctgactcgggacataagagcgatacccacagatcagggggtcgcgaacggggaaggtccaaagagaggaagcatctcctatcaccagacgttagtcggtgtaacagcgaggagcggggtacacaggccgactgggagtcccccgagcgccgacaaagtaggagtccctctgagggccgatcacagacaccaaatcgacaggggacgggttcactgagcgagtcatccattccgtctgtgtccgacaccagcacaccacgccgttcccggcgtcaacttccgccagtcccgccaaaaccacgcccacttctgtcatactccagtctgatcagacatgcaggaagcatctccccccctgctgatggcagtgaagaagggagtccactaacttctcaagcccttgagtccaataatgcctgtctcacagaatcttcaaatagccctcacccacagcagtctcagcacgcctcacctcagcggtatatctcagaaccctatctagctctgcacgaggacagccacgcatctgactgtggtgaggaggaaacactcacatttgaagccgctgtcgcaacatctttaggtcgttccaatactatcggttcagctcctcccttaagacactcttggcaaatgccgaacgggcactataggagacggaggcgtggcggtcccggtcccggaatgatgtgcggggcagtcaacaacctcctgagcgatacagaggaagacgataaatgcta

SEQ ID NO: 216661 - DNA, 6812 bp, synthetic construct
  misc_feature 1..6812: note = Description of Artificial Sequence: Synthetic coding sequence
  source 1..6812: mol_type = other DNA
atggcccgattcggcgaggctgtggtagctcgacctgggagtggcgacggggactccgaccagagtcgaaaccggcaaggtacgcctgtgccggcttcgggtcaggccgctgcatataaacaaacaaaagcacaaagggctcggacaatggccttatacaatcctattcccgtgagacagaactgtttcaccgtgaataggtccctgttcatattcggagaagataatatcgtgaggaagtatgctaagaaactgatagactggcccccattcgagtacatgatcctggccactataatcgccaattgcatcgtgctcgcgttggagcaacacctgccagaggatgacaagaccccgatgtccagaaggcttgagaaaacagagccctatttcataggcatcttttgttttgaggcgggaattaagatagtggccctgggattcattttccataaagggtcatatctcaggaacggctggaatgtgatggatttcattgttgtgctaagcggaatcttagccacagctggcacacattttaacacgcacgtggacctccggacactgagagctgtgagagttctccgacccctcaagctggtctctggcattccatccctccaaatagtcttgaagagtattatgaaggcaatggtacctcttttacagatcgggttactgctcttcttcgctatcctgatgttcgcaataatagggttggagttctattccggcaagcttcacagagcgtgctttatgaataattccggtattctggaggggtttgatcctcctcacccctgcggcgtgcaaggctgccccgctgggtatgagtgcaaggattggattggccctaacgacgggataacccaattcgacaacatcctttttgctgttctcaccgtatttcagtgtatcaccatggaagggtggactacagttctgtataacactaacgacgccctcggagctacctggaactggctgtatttcattcctctgatcatcatcggcagcttctttgtgctaaaccttgtgctcggcgttctcagcggagagttcgcaaaggaaagggagcgtgttgagaatcggagagcatttatgaagctacgacggcaacagcagatagaacgggaattaaacggatacagagcttggattgacaaggctgaagaagtcatgctggccgaagaaaacaagaatgcaggtacgagtgccctggaggttctccgacgagcaacgatcaagagatcaaggaccgaagccatgacaagagacagcagcgacgaacattgtgtcgatatatccagtgtcggcacacccctcgcccgagccagcattaaaagtgctaaggtggatggagtgagttacttccggcataaagagagattgctgcggatttccattcgacacatggtcaagtcgcaagtgttctattggattgtcctaagcctggttgctctgaacacggcatgcgtggctattgtacaccacaatcaaccccagtggttaactcaccttctttactacgcggaatttctcttccttggcctgtttctgctagagatgtcactcaagatgtacgggatggggcctcgactttatttccatagctcttttaattgctttgattttggcgtcaccgtgggatcaatatttgaagtagtgtgggctatctttcggccaggaaccagctttggaattagcgtgctaagagctctgaggcttctccggattttcaagataacaaaatattgggcaagccttaggaatttggtggtgagcttgatgagttccatgaagagtatcattagcttgttgttcctcctcttccttttcatcgtcgttttcgccctgctgggaatgcagctgttcgggggtagattcaacttcaatgatggaacgcccagcgccaattttgacacattcccggctgcaataatgacagtgtttcaaatactgaccggagaagattggaacgaggttatgtacaatgggatccggtcccaaggtggggtgtcttctgggatgtggagtgctatctattttatagtcttgactctgttcggcaactatacgctgttaaatgtgttccttgcaattgcagttgacaacttggcaaacgctcaggaactgaccaaagacgaacaagaagaagaagaagctttcaaccagaaacatgcgctgcagaaggccaaagaagtgagccccatgagcgccccaaatatgccctcaatcgagcgtgatcggagacggagacatcatatgtctatgtgggagcccagaagttctcatcttcgtgagcggcgtcgtcggcatcatatgtcggtatgggaacagcgcacttcccagctcagaaagcacatgcagatgagctcacaagaggcattgaacagggaggaagctccaacaatgaatcctctgaaccccctgaatcctctgagctccctcaatccactgaacgctcacccatctctgtaccggagacccagagccatcgagggactggcacttggtttggccctcgagaaattcgaagaagagaggatcagtaggggcggatctctgaaaggggacggaggcgatcggtcatccgcgcttgacaaccaaagaactccccttagccttggccagagggagcccccatggctagccaggccctgccacgggaactgcgatcctactcagcaggaagctggcggaggggaggccgttgtgacctttgaggacagagcccgacaccgtcagtctcagcgtagaagccggcatcgccgtgtccgtaccgagggaaaggagagttcctcagcctctcgcagcaggtccgcatcacaggaacgcagtctagacgaagccatgcctaccgagggggagaaagatcatgaactgcgaggcaaccatggggctaaagagcctactatccaggaagaaagagcccaggatctccggagaaccaactcgcttatggtgagcagggggtctggcctggctggtggcctcgatgaagctgatacccctctggtgctgcctcacccagaattagaagtgggtaagcatgttgtgctgaccgagcaggagccagaggggtcatcggaacaggccctcctgggcaacgtacagctggacatgggacgggtgatatcccagtcagagcccgacctatcctgcataaccgctaatacagacaaggcgactaccgagtctaccagcgtcacagtggcgatacctgatgttgaccccctagtggattccacagtggttcatattagcaataaaactgatggcgaggcctctccgctaaaagaggccgaaatccgagaagacgaagaagaagtggagaaaaagaaacaaaaaaaggagaaaagggagaccggtaaggcaatggtgccacactcaagtatgtttatcttctccacaacaaaccctattaggcgagcatgtcactatatagtgaacctgcgctattttgagatgtgtattttgctggtaatcgcggcatcatccattgccctcgctgcagaggaccctgtgctgaccaactccgagaggaataaggtactgcgatattttgactacgttttcaccggtgtcttcacttttgagatggtgatcaaaatgatcgatcaggggctgatcttgcaggatggctcttacttcagggatttgtggaacattctcgactttgtagttgttgtcggcgcactagtggcctttgccttggccaatgcactgggcaccaacaagggcagagacatcaaaactatcaagtctcttcgggtgttacgagtgctccgtcctcttaagacaataaagaggctgcccaagctgaaggccgtcttcgattgtgtcgtgacctccctgaaaaacgttttcaacatcctgattgtttacaagctttttatgtttatcttcgccgttatcgcggtccagctgttcaagggaaagtttttttattgtacagattctagtaaagacacagagaaagaatgtattggcaactatgtggatcacgagaaaaataagatggaagtgaaaggaagggaatggaagcgccacgagtttcactacgataacatcatctgggccctcctgacactgttcaccgtgtccactggggaggggtggccacaggtgcttcagcatagcgtggacgttaccgaggaggaccggggaccctcacgttccaataggatggagatgagtatcttttacgtggtctactttgtggtctttccattttttttcgttaatatcttcgtggctcttatcattatcacctttcaagaacagggcgataaaatgatggaagaatgctctcttgagaagaatgagagggcgtgtatcgattttgcaattagcgccaaaccacttacacgctatatgccccagaataggcacactttccagtacagggtgtggcattttgtggtttctcctagtttcgagtatacaatcatggccatgatagctctgaacaccgtggtgctgatgatgaagtattacagcgcgccttgcacctatgagctggcattgaaatatctgaatatagcatttaccatggtgttcagcctggagtgcgttctaaaggttatcgccttcggatttcttaactactttagagatacctggaacattttcgattttatcactgtgatcgggtccatcaccgagatcatcctgactgatagtaagctggtaaacaccagcggcttcaatatgagttttctgaaactcttcagagccgctcgacttatcaaattgctccgccagggatacacaatcagaattctactgtggacatttgtgcagagctttaaagctcttccttatgtgtgcctgctgatcgccatgttgtttttcatttacgctattatcggcatgcaagtcttcggcaatataaaactcgatgaggaaagtcacattaatcgccacaacaattttcgctcattctttggttcgctgatgctgcttttccgctcagccaccggggaggcttggcaggaaatcatgctgtcttgtctgggcgaaaagggctgcgagcccgacactaccgctccctccgggcagaacgagaacgagagatgcggcaccgaccttgcatatgtctacttcgtgagctttatattcttttgctcattccttatgctgaatctttttgtggccgtgataatggacaacttcgaataccttactcgggatagtagtatcctggggcctcatcacctggatgagttcgtgcgcgtctgggcagaatatgatagagctgcttgcggacggatccactatacggagatgtacgaaatgctcacactgatgtccccgccactgggattagggaaacggtgccctagtaaagtagcttacaagagattggttctcatgaatatgcccgttgctgaggacatgacagtgcatttcaccagcaccctgatggctctgatacggacggcactggacatcaagatcgctaagggtggtgcagaccgccaacaactcgattctgagctccaaaaggagaccctcgccatttggccccacttgtcacagaaaatgctggacctcttggtcccgatgccgaaggcttctgatctgacagtcggtaagatttatgctgcaatgatgattatggattactataagcaaagcaaggtgaagaaacagagacagcaactggaggagcagaagaatgctccaatgttccagagaatggaaccttcttccctaccgcaggaaattatagccaatgctaaagcgctcccatacctgcagcaggaccctgtctcaggtctctcaggaagatctggttatcccagcatgagccccctttcaccccaggatatcttccaactggcgtgtatggatccggctgatgacggacaattccaggagagacagtctctagtggttacagacccttcgtctatgcgtcggtccttttccacaatccgggacaaacgaagtaatagcagttggcttgaagaattctccatggagaggtcttccgaaaatacttacaaaagccgcaggagatcttaccactcgagccttcggctgagcgcccatcgattaaatagtgattccggccacaaatctgacacccaccgtagcgggggaagagagcgcggacggtctaaggagcgtaagcacctcctgtctcctgatgtttctcgttgtaatagcgaagagcggggaacacaagccgattgggaatcccccgagagaaggcagagtagatcaccctctgaaggaaggtctcagacacccaataggcagggcaccggcagcttgagcgagagtagcatcccatctgtcagcgacacgtccactccaagaaggtcaaggcggcaactcccgccagtccctcccaagccccgtccccttcttagttattcttccttgattcggcacgccggaagtatctctccccctgctgatggtagcgaggaagggtcccccctcacatcccaggctttagagtctaacaatgcgtgcctgacagaaagttctaattcgccgcaccctcaacagtcgcagcatgcgagccctcaaaggtatatcagcgaaccctatctcgcactacacgaggatagtcatgctagtgattgcggggaagaggagactctaactttcgaggccgcagtggcaacaagtttgggccgatctaacactattggttctgcccctccacttcggcacagttggcagatgccaaatggacattatcgacgcaggcggagagggggacctggccctggaatgatgtgtggggctgtgaataatttgctcagcgatacggaagaagatgataaatgtta

SEQ ID NO: 216662 - DNA, 6941 bp, synthetic construct
  misc_feature 1..6941: note = Description of Artificial Sequence: Synthetic coding sequence
  source 1..6941: mol_type = other DNA
atggcccgtttcggggaagccgtggtggcaagacccggaagcggagacggcgactctgatcagtccagaaacagacagggaacgccagtccctgcaagcggccaggcggcagcttacaagcagactaaagcacagagagccagaacgatggccctgtataatcctatcccggtgcgacagaattgcttcacagtgaatcgtagtttgttcatcttcggagaagacaacattgtgagaaagtatgcaaagaagttaatagattggccccctttcgaatacatgatcctagctaccattatagccaactgtatcgtgctcgctctggagcagcacctgccagaggacgataaaacacctatgagcaggagacttgagaagacagagccttattttatcggcatcttttgctttgaggcaggcattaagatcgtggccctcggtttcatctttcacaagggatcatacttgagaaacggctggaacgttatggacttcatcgtcgtgctgagtggaattctggccactgccggaacccactttaatacccacgttgacctgcgcacccttcgggcagttcgtgttctgcgaccactcaagttggtgagcgggatcccgtcgcttcaaattgtactgaaaagtataatgaaagcaatggtgccactcctgcagatcggccttcttctgttctttgccatcctcatgtttgcaatcataggcctggagttctattctggcaagctacatcgcgcttgctttatgaataacagcggcatcctggagggattcgatcctccacacccttgcggcgttcaaggctgtcccgcaggctatgaatgcaaggattggattgggccaaatgacggaattacacagttcgacaatatcctcttcgccgttctcacagtgttccaatgtatcactatggagggctggacaactgtactgtataacacaaacgacgccctgggagctacttggaactggttgtacttcatccccctgatcatcataggctcatttttcgtcctcaatttagtcctgggggtgctctcaggcgagtttgccaaggaacgggagcgcgttgagaacagaagggcttttatgaaactaagaagacaacagcagattgagcgagagctcaatgggtacagagcgtggattgacaaggccgaggaggtgatgctggccgaagagaacaagaacgccggaacctctgccctggaggtgctcaggcgggcaacgataaagagatcaaggactgaggccatgacccgagactcatccgacgagcactgcgttgatatcagctccgtgggcacaccgttagcccgtgcttccatcaagagcgccaaagtggacggggtctcctatttccgccacaaagagaggttgctacgcatcagtattcgccatatggtgaaatcacaggtattctactggattgtgttatcactggtggctctgaatacggcctgtgtcgccattgtgcaccataatcaacctcagtggctgacccacctgctgtactatgccgagtttttgtttctcggactcttcttacttgagatgtccctaaagatgtatggcatgggtccacggttgtactttcacagtagcttcaactgttttgactttggtgtgaccgtgggctccatctttgaagtggtgtgggccatcttccgccctgggacgtcattcggaatttctgtgctccgcgcattgagactgctccgcattttcaagattactaagtattgggcgagcctcaggaatctagtcgtatccctgatgtcaagtatgaagagtataatctctctcctgtttctcctgttcctcttcattgtcgtgttcgcactgttgggcatgcaattatttggaggccgatttaatttcaacgacggcacgccttcggccaattttgatacgtttcctgccgcaattatgacggtattccagattctcacaggcgaggactggaacgaggtcatgtacaacggaattcggtctcagggcggagtctcgtcaggcatgtggagcgcgatctatttcatcgtcctaacgctgttcgggaactataccctgctgaacgtgtttctcgccatcgcagtggataacctggcaaacgctcaggagcttactaaagatgagcaggaggaagaagaagcgtttaaccagaaacatgccctacagaaggcaaaggaggtgtcccctatgtcagctcctaatatgccaagcatcgagagggaccggaggagacgccaccacatgtctatgtgggaacctaggagcagccatctgagagaacggagaaggcgccatcatatgtcagtttgggagcaacggactagtcagctacggaagcatatgcaaatgagcagccaggaggctctaaatagagaggaggcgccaactatgaaccccctgaatcccctgaatcccctgtcttccctcaaccccctcaatgcccatccgtccctctacaggcgccctagagccatcgaaggtctcgccctgggcctcgcactggagaagtttgaggaggagagaatttctcggggtggatccttaaagggcgatggcggagatagatcctcggcccttgacaaccagagaacaccccttagcttgggccagagagaaccgccttggctggcccgtccctgtcatggtaactgtgacccgacgcagcaagaagctgggggtggcgaggctgtcgtgaccttcgaagaccgcgctagacatagacagtcccagaggcgtagccgtcaccgtcgcgtccgaaccgaggggaaggaatcctccagcgcttccaggtcaaggtccgcttcacaggagcgaagtttagacgaagcaatgcccacagaaggcgaaaaggatcacgagttgcgagggaaccacggggcaaaagaacctaccattcaggaggaaagagcacaggatctgcgtagaaccaacagtttaatggtgtcaaggggtagcggcttagccggaggccttgacgaagccgacacaccgttggtgcttccacatcccgagcttgaggtaggcaagcacgtggtcctaactgagcaggagccggaaggatcatcagaacaagccctgctcggaaatgtgcagcttgatatgggcagggtgatctcgcagagtgaaccagatttatcttgtataactgctaacacggacaaggcaacaacagagagcaccagtgtgacagtcgccatcccggacgtggatcccttggtggactctactgtagtgcacataagcaacaagacagacggggaggcaagcccactgaaggaggccgaaatccgggaggatgaagaagaagtcgagaaaaagaagcaaaagaaagaaaaacgagaaacaggaaaagcaatggttcctcactcttctatgtttatattctctaccacgaaccccattcggagagcctgtcactatatcgtgaatctgcgctacttcgagatgtgtattctactcgtgatcgccgcatcctctatcgctttagctgcggaagatcccgtgcttaccaactctgaaagaaataaggttctgaggtactttgactacgtcttcaccggggttttcacgtttgagatggtgattaagatgattgatcaggggctgattcttcaggatggcagttactttagggatttgtggaatattctggattttgtggtggtggtgggagctcttgttgcgtttgcgctggccaacgcacttgggacaaataagggcagggacatcaaaacaatcaaatccctgagggtcctgagggtgctgcggcctctgaaaaccattaagcgtctgcccaagctgaaggccgtgttcgactgtgtggtaacaagtctaaagaatgtgtttaatattctgatcgtctacaagcttttcatgtttatattcgctgtcattgctgttcaattgttcaagggaaagttcttctattgtacagattccagcaaggacacagagaaagagtgcatcggaaattatgtggaccacgagaagaacaagatggaagtgaagggtcgcgagtggaaacgccacgaatttcattatgataatataatttgggccctgttgaccctattcaccgtctccactggagagggctggcctcaagtcctgcagcattccgttgacgtgaccgaggaggaccgcggaccatcccgctctaaccgcatggaaatgtctatcttttatgtcgtgtatttcgtagtgtttccattcttctttgtaaacatcttcgtggccctgatcatcatcacctttcaggagcagggtgataagatgatggaggagtgttcccttgagaaaaatgaaagggcctgcattgatttcgcaatcagcgcaaaaccgctgacccgctacatgcctcagaatcggcacacatttcagtatcgcgtctggcacttcgtcgtatcgcctagttttgaatacaccattatggcgatgattgccctgaatacggtcgtcctgatgatgaagtattattcagcaccctgtacgtatgagctagctttgaagtatctgaacatcgcttttacgatggtgttttcgctcgagtgcgtgctgaaggtgattgcattcggcttcttgaattattttagagatacgtggaacatcttcgatttcattacagtaatcggctcaattactgagatcatcctcaccgattcaaaactggtgaacaccagcggcttcaacatgagttttctaaaattgttccgggctgctagactgattaaacttctgcggcagggctacaccattagaattctgctatggacctttgtgcagtcattcaaagcccttccttatgtttgcttactgattgctatgctcttctttatttacgcaatcataggcatgcaggttttcggaaatatcaaactggacgaagagtcccatattaacaggcacaacaacttcaggagtttctttggatccctcatgttgctttttaggtccgccacgggcgaagcttggcaggagataatgctctcgtgcctcggagaaaaagggtgtgagcctgataccaccgccccaagcgggcagaatgagaatgaaagatgtggcaccgatctcgcatacgtgtacttcgtcagcttcatattcttctgttccttcctgatgctgaatctgtttgtcgctgtgatcatggacaattttgagtatctcacgagggactcttctattctcggtcctcaccatctggatgagtttgttcgcgtctgggctgaatacgatagagcggcttgtgggaggattcactacacagaaatgtacgaaatgctaactctcatgtcaccgcctctcggtttgggaaagaggtgcccgagcaaagtggcttataaaaggctggttttgatgaatatgcctgtggcggaagacatgaccgtccactttacaagcacattgatggccctaattcggaccgcattagatatcaaaattgcgaagggaggagccgatagacagcagctcgattccgagctccagaaagagacgttagctatttggccacacctgagccagaagatgctagacctgctggtgccaatgccaaaagcttccgacttgaccgtgggaaagatctatgctgccatgatgattatggattattataagcaaagtaaggtaaagaaacagcggcagcagctggaagagcaaaaaaacgcccctatgtttcagcggatggagccaagcagcctgccccaggagattattgccaacgctaaagctcttccgtaccttcagcaggatcccgtgtcaggattaagtgggaggtctggctatccgtctatgtctcctttatccccccaggatatttttcagctggcctgcatggatccggcagatgacgggcagttccaggagcgccagtccctcgagccggaggtgagcgaacttaagagtgtccagccatcaaatcacggaatctacctgccctcagacacccaggagcacgcaggatcaggcagagcttctagtatgccccgtctcacggtcgaccctcaggtggtcaccgacccctcttcgatgcgacgatccttcagtacgatccgcgacaaaagatctaacagttcttggctagaggagtttagtatggagcgatctagcgaaaatacctataaatctaggcgacggtcttatcacagctcgctccggctttcggctcaccgactaaattctgactccggtcataagagcgacacacacagatctggtggacgggagcggggtcgctccaaagagcggaaacatctgcttagccctgacgtatccaggtgtaactcagaggagagaggtacacaggcagattgggaaagccctgagcggaggcagagccggtccccctcagaaggaagatcacagaccccgaacagacaaggaacaggatccctgagcgaaagttctattccctctgtgagtgatactagtaccccaagacgatctcgcaggcagctgcctcctgtccccccaaaaccgaggcccctccttagctattcttcgctgattagacacgccggtagcatctcacctcccgctgatggctccgaagagggctctcccctgacttcacaggctctcgaaagcaacaacgcgtgtctgacagaaagtagcaactctcctcatccccagcagagccagcatgctagccctcagcgatacatctccgaaccatatctggctctgcatgaggattcacacgcttctgattgcggggaagaggagactttaaccttcgaagctgccgtcgcgacttcactcggacggtctaatacaatagggagtgccccaccccttcgacacagctggcagatgcctaacgggcattacagacggaggcgccgtgggggtcctggaccaggaatgatgtgcggagccgttaataacctattaagcgacacggaagaagatgacaagtgtta

SEQ ID NO: 216663 - DNA, 1317 bp, synthetic construct
  misc_feature 1..1317: note = Description of Artificial Sequence: Synthetic coding sequence
  source 1..1317: mol_type = other DNA
atggccaggttcggtgaagcagtggtcgccaggccaggctctggggatggagacagtgaccaaagtcggaacagacaaggtacccccgtgccggcatccggccaagctgccgcttataaacagactaaagctcagcgggctcggaccatggccctttataacccaataccagtgaggcagaactgcttcaccgttaataggtccctcttcattttcggagaggacaacattgtgagaaagtatgcgaaaaaattgatagactggccccctttcgagtacatgatcctcgccaccatcatcgccaactgtatagtgctcgcgcttgagcagcacttgcctgaggacgataaaaccccgatgtccagacgcctggaaaagacagagccgtacttcattggcattttctgttttgaggcaggcattaaaattgtggcactgggatttattttccataagggaagctatttgcggaacggttggaacgtgatggactttatcgtcgtactcagtggtatccttgcaactgccggtacccatttcaatacgcacgtggacttgagaactctgagggcagttagagttctgcggccactcaagttggtgtctgggatcccgtcgctgcagatcgtgcttaaatctatcatgaaggccatggttccgctgctgcagatcgggttgttgctatttttcgctatcctgatgtttgccatcatcggactggaattttactcaggaaagctccacagagcgtgcttcatgaacaattccggaatactggagggctttgatccacctcatccttgcggagtacaaggatgcccagcgggatacgaatgtaaggactggattggtcccaacgatggaattacccagtttgataacattctgttcgctgttctcacagttttccagtgcatcactatggaggggtggaccactgtcctgtacaatacaaatgatgccctcggagccacgtggaactggctgtattttattcccctgatcatcatcgggtcattttttgtgttaaaccttgtgctgggtgttctgtcaggcgagtttgccaaggagcgcgagcgggtggaaaacaggcgagctttcatgaaactgaggagacagcagcagatcgaacgagaactgaatggctatcgtgcatggatcgataaggccgaagaggtgatgctggctgaggaaaataaaaacgcagggaccagcgccctagaggtgctgaggagagccacaataaagcgcagccgcaccgaagctatgacacgcgacagtagcgacgaacattgtgttgacatatcatctgtctag

SEQ ID NO: 216664 - DNA, 6755 bp, synthetic construct
  misc_feature 1..6755: note = Description of Artificial Sequence: Synthetic coding sequence
  source 1..6755: mol_type = other DNA
atggctcggttcggtgaagccgtcgtggccagacccggaagcggagatggcgattctgaccaatcacggaataggcaggggacgcctgtgccggcttctgggcaggctgcggcttacaaacagaccaaggcccagcgagcaagaaccatggctctgtacaaccctatcccggtgaggcaaaattgttttactgtaaaccgctcactctttatcttcggagaggacaacatcgtcagaaagtatgccaagaagctgatcgactggcccccattcgaatatatgatattggctaccattattgcaaattgcattgtcctagccctggaacagcatttgcccgaagacgacaagactccaatgtcccggcgtctggagaagactgaaccatactttatagggatattttgctttgaggcgggtattaagatagtagccctcggattcattttccacaaggggtcctacttacgaaacggatggaacgtcatggactttatcgtagtgctgtcgggcatcctggcaaccgccggaacacactttaacactcacgttgacctgaggacactgcgggctgtcagagttctgagaccactgaaattggttagcggcatacctagtctccagatcgtcctgaaaagcattatgaaggccatggtgcccctcctgcagattggccttctgttgttctttgcaattctgatgtttgctattattggcctcgaattctactctggaaaactgcaccgcgcatgctttatgaataacagcggtatactggagggttttgaccccccacatccttgtggcgtgcaggggtgtcctgctggatacgagtgcaaagattggatcggtcctaacgacgggatcacccagttcgacaatatcctgtttgctgtacttaccgtctttcagtgcattacgatggagggatggacgaccgtcctgtacaacaccaatgatgcgctgggggcaacatggaattggctctactttatcccccttatcatcatcggcagtttcttcgtactcaatcttgttctcggagtgctctcgggtgagttcgccaaagaacgggagagggtggagaaccgccgagcatttatgaagttgcgtcggcagcagcagatcgagagagagctcaatgggtatcgcgcatggattgacaaggccgaagaggtgatgttggcggaagaaaacaagaatgctgggacaagtgccctcgaggtgctacggcgagcaaccatcaagcgctcaagaactgaagcaatgacaagggactccagcgatgagcattgcgtggacatctcttccgtgggaactccccttgcgagggcaagcatcaaaagcgcgaaagtcgacggcgtgagttactttaggcacaaggaaagattattgcgcataagtatcagacacatggtgaaaagccaggtgttttattggatcgttctgagcctggttgcccttaataccgcctgcgtggctatcgtgcaccataaccagccccaatggctcacgcatctgttatattatgctgagtttctgtttctcggactgttcctgctcgagatgagtcttaaaatgtacggcatgggaccccgtctgtactttcactccagctttaactgcttcgatttcggagttactgttgggtccattttcgaggtggtttgggccatctttaggccaggcacttccttcggcatctctgttctgcgcgcattgcggctgctgaggatctttaagattacgaagtactgggcctctctgcggaacctggtggtatcactgatgtcttcaatgaagagtatcatttctttacttttcctgctcttcctctttatagttgtgtttgccttgttgggtatgcagctgttcggtgggaggtttaacttcaatgacgggaccccctcagccaatttcgacacctttcccgctgcaatcatgaccgtttttcagatcttgaccggagaggattggaatgaagtcatgtataacggtatccggtcacagggcggtgtgtccagcggaatgtggagcgccatatacttcatagtgctaacgctttttggcaactataccttgctaaacgtgtttctggcgattgccgtggacaacctggcgaacgcccaggaacttactaaggatgagcaggaggaagaagaggcgttcaaccaaaagcatgctctgcaaaaggccaaggaagtgagcccaatgtccgccccaaacatgccaagcatagaacgtgaaaggcgaagacggcaccacatgagcgtctgggagcagcggactagtcagctgaggaagcatatgcagatgtctagccaggaagcactgaaccgcgaagaggctccgacaatgaacccactcaatcctctcaaccccctgagtagcctgaaccctcttaacgcacatccttccctctatagacgccctagagctattgagggcctggccctgggcttagccttggagaaatttgaggaggaaaggatcagcaggggcggatctctgaaaggtgatgggggtgaccgatcctcagctctggataaccagcgaactcctttgagtctcggtcagagggagcctccctggctggctcggccatgccatgggaattgtgatcctacccagcaagaggcaggcggtggagaggccgtggtgacatttgaagacagagcaagacataggcagagtcagcggaggagcaggcataggagagtcaggacagaagggaaggaaagttcctcagcttcccgatctagaagcgcaagtcaggaacgttcactggacgaggccatgccaacggagggcgaaaaagaccatgagttgcggggaaaccacggggctaaagaaccaactatacaagaggaacgagcacaggatttgcgcagaaccaatagcctcatggtttccagggggagtggcctggccggaggactggacgaagcggatacacctctggttctgccacatcccgagctcgaagttggaaagcacgtagtgctgaccgagcaggaacctgagggcagctctgagcaagcacttcttggtaacgtgcagctggatatgggcagagtcataagccaaagtgaacctgatctgtcttgcatcaccgctaatactgacaaggcaacaaccgagagtactagcgtgaccgtggcaatacctgatgtggaccctctcgtcgatagtactgttgttcacatcagtaacaaaaccgatggtgaagcgtctccgctgaaagaagcagagatcagggaagatgaggaggaagtcgagaaaaagaagcaaaagaaagaaaaacgcgagacgggcaaagcaatggtaccgcactccagcatgtttatattctcaaccaccaaccccattcgcagagcctgtcactatatcgtgaatctacgatattttgaaatgtgcattctcctcgtgatcgcagcgtcctcaattgcactggctgctgaagatcctgtcctaaccaattccgaacgcaataaagtcttaaggtacttcgattacgtcttcactggagtctttacatttgagatggtaattaagatgattgatcaagggctgattctccaggatggatcctatttcagagacctgtggaatatcctggatttcgtggtggtagtcggagcgctagtagcattcgcgctcgccaatgcactaggaactaataaaggacgggacataaagacaatcaaatctctcagggtcttacgagtgttacggcctctgaaaacaatcaaacggcttccgaaattgaaagccgtctttgactgcgtcgtgacgtccctgaagaacgtatttaacatactgatagtctacaagctgttcatgttcatcttcgccgtgattgccgtccagctgtttaagggaaaattcttctattgcactgactcctctaaagatactgagaaggaatgcatcggcaattacgtggatcacgagaaaaacaaaatggaggtaaagggcagagaatggaagcggcacgaattccactatgacaatatcatatgggctttactcaccttgttcacagtcagcaccggcgaagggtggccccaggtgttgcagcactccgtggatgtcaccgaggaggaccgagggccatctcgtagtaatcggatggagatgtctatattctacgtcgtgtactttgtcgtgtttcccttttttttcgtgaatatctttgttgcactcatcatcatcacctttcaggagcaaggggacaagatgatggaggagtgcagcctggaaaaaaacgagagggcttgcatcgacttcgctatttctgcaaaacctctgacgaggtatatgccgcagaacaggcacacctttcaatatagggtgtggcattttgttgtgtctccatctttcgaatatacgattatggcaatgatcgctctgaacacagttgtgctgatgatgaagtattattctgcaccctgcacatacgaacttgccctgaagtacttgaacatcgcttttacaatggtgtttagcctcgaatgcgttctaaaggtaatcgcgttcgggttcctcaattacttccgagatacttggaacatctttgatttcataacagtgatcggatccattacagagatcatcctcactgactcaaaactggtcaacacatctgggtttaacatgtcattccttaaactgtttcgagccgcacggctcattaaactgctgaggcagggttataccatcaggatcctcctctggacatttgtccagagctttaaggcactgccatatgtctgtctgctgatcgctatgctatttttcatctacgccattatcggtatgcaggtttttggcaatattaaactggacgaagagagtcatatcaacaggcacaataacttccggtcatttttcggaagcctcatgctcctgttcaggagtgccactggagaagcctggcaagagatcatgcttagctgtttgggcgaaaaaggctgtgaacccgacacaactgccccatccgggcagaatgagaatgaacgctgtggcaccgatttggcttatgtgtattttgtgtccttcatattcttctgctctttcctgatgctcaacctttttgttgctgtgataatggacaattttgaatatctaacccgggattctagtatcctgggcccacaccacttagatgagtttgtacgtgtgtgggccgagtacgaccgtgcagcctgtgggagaattcattacactgaaatgtatgagatgttgacactaatgagccctcctttagggctgggaaagagatgcccaagtaaggtggcttataagcggcttgtcctaatgaatatgcctgtggcggaagacatgactgtacacttcacgagtaccttgatggctttgattcgcacagccctggatataaaaattgccaaaggtggtgccgacagacagcagttagactccgagcttcagaaggagactcttgccatctggccgcatctgtctcagaagatgctcgatttgctggtacccatgcctaaagcctcggatctgacggtcggcaagatctatgcagcaatgatgatcatggattactataagcaatctaaggtaaagaaacagcggcagcagctggaggaacaaaaaaacgccccaatgttccagaggatggaaccatcttccctgccacaggagataatagccaacgccaaggcactgccatatctgcagcaggaccctgtgagtggactgtccggacggtccggatatccaagtatgtcccccctcagtccgcaagacatcttccaactggcttgcatggatcctgcagacgacggtcaatttcaggaaaggcagagtttagtggttaccgaccctagctcaatgcgcagatcttttagcactatccgggacaagaggagcaattctagctggctcgaggaattcagcatggaacgcagcagtgagaacacttacaagagtcgtcggaggtcttatcacagtagcttgagactgtcggctcataggttaaattcagacagcgggcacaagtctgatacccatagatctggcggaagggagcgcggacgttcaaaagagcgaaaacacctgctttctcccgatgttagcagatgcaattccgaggaaagagggacccaagctgattgggaaagcccagaaagacgccaatctcgaagccctagcgagggcagatcacagaccccgaatcgtcagggaaccggatccctgtccgagagttctatccctagtgttagtgatacatccacacctcgcaggtccaggaggcagctgccccctgtgccccctaagcctcggccacttcttagctactcatcgctgatccggcacgccggtagcataagcccacctgcagacgggtccgaggagggttctcccctcacttcacaggccttagagagcaataatgcttgcttaactgaatcttcaaacagtcctcatcctcaacagtcccagcacgcctctccccaaagatatatttctgagccgtacctcgcactgcacgaagactcccacgcaagcgattgtggcgaagaggagactctcacatttgaagccgctgtcgcaacctccctggggcgatccaataccatcggaagcgctccacctctccggcacagctggcagatgccaaatggccactatcgacggagacggagaggtgggccagggccaggaatgatgtgcggcgctgtgaacaacctcttgtccgataccgaggaagatgacaagtgtta

SEQ ID NO: 216665 - DNA, 7061 bp, synthetic construct
  misc_feature 1..7061: note = Description of Artificial Sequence: Synthetic coding sequence
  source 1..7061: mol_type = other DNA
atgactgagggtgcacgagccgctgacgaggttcgggtaccacttggtgcacctccaccaggcccagccgctcttgtgggcgcatcccctgaatccccaggcgcaccaggcagagaagccgagcgcggttctgaactgggagtttcccctagcgagtcgcctgccgcagaacgcggagcagagctgggtgcagatgaggaacagcgtgttccatatcccgcacttgccgctacagtctttttctgtttgggtcagacgacacggccacggtcttggtgcctgcggctcgtctgcaacccctggttcgagcacgtgagcatgctcgtgatcatgctcaactgcgtgactctggggatgtttaggccttgtgaggatgtggagtgcggcagtgagagatgtaatattttggaagcatttgacgcttttattttcgcattttttgctgtggagatggtgatcaaaatggttgcattaggcctgtttggccaaaagtgctaccttggcgatacctggaaccgcctggatttttttatagtcgttgccggaatgatggagtactctttggacggacataacgtgagcttatccgcgatccgtaccgtgcgagtgctgcgacctctgagggccatcaaccgggtaccatccatgcgcatcctcgtgacactgctgttggacacactgcccatgctcgggaacgtgcttctgctgtgcttcttcgtgttcttcatcttcggcatagtaggcgtccagttgtgggctgggttactcaggaatcgatgttttctcgactcagcttttgtgaggaataataatttaacatttctgaggccatattatcaaacagaggagggcgaagagaatccctttatctgcagcagccgaagggacaacggcatgcagaaatgcagccatataccgggtaggcgcgaactccgtatgccgtgcactctgggctgggaggcctacacccagccacaggcagaaggggttggagcagccaggaatgcctgcatcaactggaatcagtactataatgtctgccgttccggagattcgaacccacataatggggcaattaacttcgacaacatcggctatgcttggattgccatctttcaagtgatcacacttgaaggatgggtggatatcatgtactacgtgatggatgctcatagtttctacaactttatttacttcatcctgctaattattgtcggatcatttttcatgataaatctctgtcttgtggtgatcgcgacccagttttccgagacaaagcagagggaatcccagctcatgagggagcagcgtgcacgtcacctgagtaatgattccaccctagcatcattctctgagccagggagctgctatgaggagctcttgaaatatgtaggacacattttccgcaaagtcaagagaagatccttgcgcctttatgcacgctggcaatctcgatggagaaaaaaggttgatccaagtgccgtgcaaggccagggaccaggccatagacagcggagagccggtcgacacacagcttctgtacatcacctcgtgtaccaccatcatcaccaccaccatcatcactatcactttagtcacggcagtcctcgaaggccgggacctgagccgggagcctgcgatactcggttagtgcgcgcaggagctccacctagcccgccaagccctggccgtggtcccccagatgctgagagcgtccatagcatttaccatgctgattgccatatcgaggggccacaggaacgggctcgggttgcacatgcagcagccacggcagctgcctccctccgcctggccaccgggttggggacgatgaactacccaacaatccttccaagcggggtaggttctgggaaggggtcgacatccccaggtcccaaaggcaaatgggctggagggccaccaggcaccggtggccatgggcctttgagcctgaatagcccagatccatacgaaaaaattccgcacgttgtgggggaacatggcttagggcaagcccctgggcacctctcaggcctgtcagtgccatgccctcttccatctccgccagccggtacacttacgtgtgaattaaagagttgtccttattgcacaagagcgttggaggatccagaaggtgagctcagtggctctgaatccggcgacagcgatggaagaggagtgtatgagttcacgcaggacgtgcgccatggggacagatgggacccgactaggccgcctagggcgacggatacacctgggcctggccctggcagcccccagcgtcgggctcagcagcgggcagcgccaggtgaaccgggatggatgggcaggctgtgggtgacattcagcggcaaactcagacgcatcgtagattctaaatacttctcacgagggatcatgatggcaatactcgtaaacactctttctatgggcgttgagtaccacgaacaaccggaggaactgacaaatgctctggagatatcgaatattgtgttcacctcgatgtttgctctggagatgttactgaaacttctggcctgcggtccactgggctacatccggaacccctacaatatctttgatgggatcatcgttgttatttcagtttgggagatcgtgggacaggccgacggaggactgtcagtattacggacgtttcggctgctcagagttctgaaactcgtccggtttctccccgcacttcgaagacaactggttgttctggtgaagacgatggataatgtcgcaaccttctgcactctgttgatgctcttcatcttcatattctctatcctgggaatgcacctcttcggttgtaagttctcattgaaaaccgatacaggcgacaccgttccggaccgtaagaattttgatagtcttctgtgggccatcgttactgttttccagatcctgacacaggaggactggaacgtggtgctttataatggtatggcgagtaccagctcttgggccgcactgtattttgtcgccctgatgacttttgggaattatgtactgttcaacctactggttgcaattctggtggagggtttccaggctgaaggggacgcgaaccggagtgataccgacgaggataagacctccgtgcactttgaggaagactttcataagctgagggagctccagacaacagaactgaaaatgtgctcccttgccgtgaccccaaatgggcacttggagggcagaggcagcctatcacccccacttattatgtgtacagcagccactccaatgcccaccccgaaaagctcccccttcctcgacgcagccccatccttgccggattcccgcaggggttcatcatctagcggcgacccacctctgggggaccagaagccccctgcgtctctgaggtctagcccttgtgccccatggggacccagtggagcatggtcaagtcgccgatcgtcctggagctctctgggccgtgccccttccctcaaaagacgcggacagtgtggagaaagggaatccctgctcagcggggaaggaaagggtagtactgatgacgaggctgaagatgggagagctgctccaggcccaagggcaacccccttgcgaagggctgaatccttggatcccaggcccttgagacccgcagcattaccaccaacaaagtgccgggacagagacggccaggtggtagctctgccctctgattttttcctaaggattgacagtcaccgagaagatgctgctgagctggacgacgattccgaggactcatgttgcctgcggctgcacaaggttctggaaccatataagcctcagtggtgcagaagccgggaggcctgggctttatacctgttcagtccacaaaaccgatttagggtcagctgtcaaaaagtgataacgcacaagatgttcgaccacgtcgttttggtctttatcttcctaaattgtgtgacaatcgccctcgagcgtcctgatatagatcccggtagcactgagcgggtgtttttaagtgtgtccaactacatctttaccgctatcttcgtcgctgaaatgatggtcaaagtggtggccttgggacttctttctggtgaacatgcttaccttcagtctagctggaatctgcttgatggcctgctggttctggtttctctggtggatattgttgtcgcgatggcttcagcagggggtgccaagattctcggggtgctcagagttctgcgactgctgcggactcttcgacctttgcgtgtcatttcaagagccccagggctgaaactcgttgtagaaacactcatcagcagcttgaggcctattggaaacatcgtactcatctgttgtgccttctttatcatcttcggcattcttggagtgcaactgtttaagggaaagttctattattgtgagggacctgatactcgaaacatctccactaaagcccagtgcagggccgcacattacaggtgggtccggaggaagtacaattttgataacctaggtcaggcgttaatgagtttattcgtgttaagctccaaggatggctgggttaacataatgtacgacggtctggatgccgtcggtgttgatcagcagccagtgcagaatcataacccttggatgctgctgtatttcatttccttcctcctgatcgtttccttttttgtactcaacatgtttgtcggtgttgtggtggagaatttccataagtgtcgtcaacaccaggaagctgaggaagctagaaggcgcgaagaaaaacgccttcgccgtttggagaggcgtagacgttccacattcccatcacccgaagcccagcgacggccttactacgcggattatagcccaactagacggagtatccacagtttatgcacttcacattatctcgacttgtttataacattcattatctgcgtaaatgtcatcactatgtcgatggagcactacaatcagccgaagtctttagacgaagccctcaagtactgcaattacgtgttcactattgtgtttgtcttcgaggccgctctgaaactcgtcgcctttggatttcgccgttttttcaaagataggtggaatcagctcgacctggcaatcgtgctcctatcgttgatgggcatcacactcgaggagatcgagatgagcgcagctctccctattaatccaacaatcatccggatcatgcgcgtgcttcggatcgcacgtgtccttaagctcctgaagatggctaccggcatgcgcgctctgctggacaccgtcgtgcaggccttgcctcaggtgggaaatcttggactgttgttcatgctgctcttctttatctatgcggcactcggcgtagagctatttggccgactggaatgtagcgaagacaacccatgtgaaggtttgagtcgacatgcgactttttctaacttcgggatggctttccttaccttgttccgggtgagcacaggggataattggaatggaataatgaaagataccctgagggagtgtagcagagaagataaacactgtctttcatatctccccgctctgtctcccgtgtacttcgtcacatttgtgctggtggcacagttcgtcttggtgaacgtcgttgtcgccgtgctaatgaaacacctggaagagtccaacaaggaggcccgagaagacgccgaactggacgcggaaattgagctcgagatggctcaaggccctggctcagctcgacgtgtggatgcagatcggccacccctacctcaggagtccccaggtgccagagacgctccaaacctggtcgctcggaaggtgtctgtgtctcgcatgttatcacttccgaatgattcgtacatgttccggccagttgtgcccgctagcgcacctcatcctcgccctcttcaggaagtggagatggaaacgtacggcgcaggcacaccactgggttctgtggcatcagtgcattctccacccgctgagtcttgcgcaagtttgcagattcctctagctgtgagcagcccagccagatcaggagagcctcttcacgctttgtccccaaggggtactgcacgcagcccatctctcagtcgcctactatgtaggcaggaagccgtacacactgattcactggaagggaagattgattcccccagagacacgctggatcccgctgagcctggggagaaaacacccgtgcgccctgtgactcagggcggttcgttacagagtccacctcgcagtcctagacccgctagcgtcagaactaggaagcacaccttcggacagcgttgtgtcagctcgcgcccagccgctccagggggagaggaggccgaagcttcagaccctgccgacgaggaagtatcccatatcacctcttctgcttgcccgtggcagcccactgctgagccacacggtcccgaagcatctcccgtagccggaggcgaacgcgaccttcgcagactctacagtgtggacgcacaaggcttccttgacaagcccggtagggcagacgaacagtggcgacctagcgctgagctgggcagcggagagccaggcgaagccaaggcctgggggccagaagctgaacccgctttaggagccagacgcaagaagaaaatgtccccaccctgcatctccgtggagcccccagcagaggatgagggaagcgcccgtcccagcgctgcagaaggaggaagtacaacgctccggaggcgtactccctcctgtgaggccaccccacaccgggatagtctggagcctactgaaggttcgggggctggcggtgatccggcagctaaaggggaacgctggggccaggctagttgccgggcagaacaccttactgtgccctcgtttgctttcgagcccttagacttaggtgtgccgagcggtgatcctttcctggacggcagtcactcagtcacaccggagagccgagcgagctcatccggtgccatcgtgccactcgaacctcccgagtctgagccccctatgcccgttggagatccaccagagaagcggagaggcctgtaccttacagtgccccagtgcccccttgagaaacccggatctccttccgcaaccccagcaccgggaggaggggctgatgacccagtgta

SEQ ID NO: 216666 - DNA, 7043 bp, synthetic construct
  misc_feature 1..7043: note = Description of Artificial Sequence: Synthetic coding sequence
  source 1..7043: mol_type = other DNA
atgaccgaaggtgccagggccgctgatgaggtgcgtgtgccgctgggcgctccgcctccgggtcccgcagcactagtaggcgcatccccggagagcccaggagcccctgggagagaagccgaacgagggtccgaactgggcgtgagccccagcgagtcgccagccgcagagcggggagcagagctgggggctgacgaggaacagcgcgtgccttatcccgctctagccgcaacagtctttttctgcctcgggcaaaccacacgaccacgctcttggtgcctccgcctcgtttgtaacccctggtttgaacacgtctctatgctggtgatcatgctgaattgcgtgactctgggcatgttcaggccctgcgaggacgttgagtgtgggtcagagaggtgtaatatactggaagccttcgacgctttcatttttgcattctttgccgtcgaaatggtaattaaaatggttgccctaggcctttttggtcagaagtgctacttgggtgatacttggaaccgtctggacttttttattgtggtcgccggtatgatggaatattcgctcgacggacataatgtatctctgtcggctatccggacagtacgcgtgctgcgtcctctccgcgcaatcaacagggttccttccatgaggatcctggtcactctcttgctggacaccttaccaatgcttggtaatgttttgttactctgcttctttgtattttttatctttggcatcgttggcgtgcagttatgggccggactcctaagaaacagatgtttcctcgactccgctttcgtgcgaaataataacttgacgtttctgcgcccatactaccaaacggaggagggcgaggagaatccgtttatatgcagcagtcgcagagataatggtatgcaaaagtgctcgcacattcctgggaggagggaattgcgaatgccttgcacccttggttgggaggcctatacacagccacaagccgagggagtcggggcagctcgtaatgcctgtatcaattggaatcagtactacaacgtctgtagatccggggacagcaacccccacaacggcgcaattaacttcgacaatatcggatacgcctggattgctatatttcaggtgataactcttgagggatgggttgatattatgtattacgtgatggatgctcacagtttttataactttatctattttattctgctgatcatcgtggggtccttctttatgatcaatctttgtttagtggtcatcgcgacccaattcagcgagaccaagcagagggagagccagctgatgagagaacagcgcgctcggcacttgtctaatgattctaccctagcctctttttccgagcccggtagttgttacgaggaactgttgaagtacgtcggacacatattccggaaagtaaaaagaagaagtctgagactctacgctcgatggcagtcccgctggcgtaaaaaggtagatccaagcgccgtccagggacagggccctgggcatcggcagaggcgagcgggtagacacactgccagtgtgcatcaccttgtgtaccatcatcaccatcaccatcaccaccattaccatttcagccacggcagtcctagaagacccggtccggaaccaggagcctgcgataccaggctggtgagggccggagcacccccttcacccccaagccccggacggggacctccagacgccgaaagcgtccacagcatctatcacgcagactgccacatcgaggggcctcaggaacgggcacgggtggctcacgccgctgcaaccgctgccgcaagtctgcgactagcgacaggccttggcacaatgaattatcctacaatcctgccgtctggtgtgggaagcggcaaaggttccacctcaccgggtccgaagggaaagtgggcaggcggtccgccagggaccggaggacatggcccacttagcctgaattctccggatccttatgagaagatccctcacgtagtcggagagcacggactgggccaggctcccggacacctgagtggactctcagtgccttgtccactgccttcccctcctgccggtaccctgacctgtgagctcaaatcgtgcccttactgcacccgcgctcttgaagatcccgaaggtgagctgtccggttccgagtctggggactcagatggcaggggggtgtatgaattcacccaagacgtgaggcacggagaccggtgggaccccacccggccacccagggcaactgatactcccggacccggtccaggcagcccccagaggcgggctcagcagagggccgctccaggagagcctggttggatgggccgtttgtgggtcacattttcagggaaactgcggagaatcgtggactcaaaatatttttcacgcggaattatgatggccattctggtcaacacccttagcatgggagtggagtatcacgaacagcccgaggagttgacaaacgccttggagatctccaacattgtgttcacttctatgttcgcgttagaaatgctcctgaagctgctcgcgtgcgggccattgggatatattagaaacccctataacattttcgacggcatcatcgtggtgatttcagtgtgggagatcgtgggacaggctgacgggggactgtctgttctgaggacattccggctgcttcgtgtcctgaaactggtccggtttttacctgccctccgcagacagcttgtggtgttggttaaaacaatggacaacgtagcgaccttctgcacactgctgatgctgttcatctttatattctcaatcctcggcatgcacctcttcggatgcaagttttccctaaagacagacacgggcgacaccgtcccagacaggaaaaattttgacagtcttctctgggccatagtgactgttttccagatacttacacaggaggattggaacgtggtactttataatggcatggcctcaacaagctcctgggcagccctctatttcgtcgcactaatgactttcgggaactatgtcctgttcaacctgctggtcgcgattctagtggaaggctttcaggctgagggggacgccaatcgttcagacaccgacgaagataaaacttcggttcacttcgaggaggatttccacaaacttcgggagcttcaaactactgaactcaagatgtgctctttagcggtaactcctaatggacacctagagggtcggggttcactgtcaccaccactgattatgtgcaccgctgctactcctatgccaacacctaaaagtagcccgtttctcgacgctgcaccctcactgcccgattctcgacgcggatcctctagctcaggagaccccccactaggcgatcagaagccgccagcgtctcttagaagcagtccctgcgccccatggggtcctagcggcgcttggagcagtcgcaggtcctcctggagctccctgggccgagctcccagtcttaagagacgcggtcaatgcggagaaagagagtctttgctgtccggggaaggcaagggaagcaccgatgacgaagccgaagatgggagggcagcaccaggcccacgggctactcccctgcggcgtgctgagtccttagaccctcggccattacgcccagccgcacttccacccaccaaatgtcgcgatagagacggccaggtcgtcgccctgccatccgatttcttccttaggatcgacagtcaccgtgaggatgccgcagaactcgatgacgacagcgaggactcttgttgtcttcgcctgcacaaggtactcgagccttataaaccccagtggtgtagatctcgcgaagcctgggcattgtatcttttctccccacagaaccggtttcgggtctcttgccaaaaggtcattacacataagatgtttgaccatgtggtgttagtgtttatctttctcaattgcgtcaccatcgcgttagagcggccagatattgatccaggcagtaccgagcgggtattccttagcgttagcaattacatttttactgcgatttttgttgccgaaatgatggtaaaggtggttgccctcggcctcctgtcgggtgaacacgcgtatcttcagagttcttggaacctgctggacggcctgttggtgctggtgagtctcgtcgatattgtcgtagctatggcatccgcgggaggagctaagatactaggggtgctgagagtgctgagacttctgcgcacccttcgccctctgagagtaatatccagggccccaggtttgaagctagttgtggaaactcttatctcgtccctgagacctattggtaatattgttttaatctgttgcgccttctttatcattttcggaattttaggggtacagctttttaagggcaagttctactactgcgaagggcctgatacacgaaatatttctaccaaggcccagtgccgtgcggctcactaccgatgggtgaggcgcaaatataacttcgacaacctgggccaggcactgatgtcattgttcgtgctgtccagtaaggatggctgggtgaatatcatgtacgatggtctggacgcagtaggggtcgatcagcagccggtccaaaatcataacccctggatgctgctgtactttatctcctttttactcattgtgtctttctttgtccttaatatgttcgttggtgtggtggtggagaatttccacaaatgcagacagcatcaggaggccgaggaggcacggcgacgcgaagaaaagcgattgcggagattggaacgacgccgaaggaaagcacagcgccgtccatactacgccgactatagtccaacccgtaggagtatccatagtttatgtacttcacattacttggacctgtttatcactttcattatttgcgtcaacgtaatcacaatgtccatggaacactacaatcaacctaaaagtctcgatgaggccctgaagtactgtaattacgtattcaccattgtgtttgtattcgaggctgctctgaagttggtggccttcggcttccggagatttttcaaagaccggtggaatcagttggatttggccattgtgctgctcagcctgatggggatcacccttgaggagatcgagatgtctgccgctcttcctataaaccccacaatcatacgaattatgcgtgtgctgaggattgctagagtattaaaacttctgaaaatggccaccggcatgcgcgcactcctggacaccgttgtgcaagcccttcctcaggtgggcaatctagggctgctgtttatgttgcttttttttatctacgccgctctcggggtggaattgttcggtcggctcgaatgctctgaagataacccatgcgagggcctttccagacacgccaccttttctaatttcggcatggcctttcttaccctgtttagagtgtcaaccggcgacaattggaacgggattatgaaggatactctcagggaatgttcccgagaggataaacactgcctttcttatcttcctgctcttagtcccgtttatttcgtaaccttcgtgctagtcgctcagttcgtcttggtgaacgtggttgttgccgtgctgatgaagcacctcgaagaaagcaacaaagaggccagagaggatgcagagctggacgccgagatcgagttggagatggcccagggccctggatccgcacgccgtgtggacgctgaccgacccccacttccacaggaaagcccaggcgcacgcgacgctccaaatttggttgcaagaaaagtgtcggtgagccgcatgctgtcactcccaaacgacagctacatgttcaggcctgtggtgcctgccagtgccccacacccacgaccattgcaagaggtggagatggagacctacggagccggaacccccctggggtccgttgctagcgtgcatagtcctcccgcagaaagctgcgcatctctgcagatcccgctagccgtctcctcccctgccaggtctggcgaacctcttcacgctctgtccccacggggaactgcccgttcaccgagcctgtccagactcctgtgtcgccaggaagcggtgcatacagattccctggagggaaagattgattcgccgagagataccttggatcccgctgagccgggtgaaaaaaccccagtgcggcctgttactcagggtggctccctgcagagcccacccaggtccccgcgaccagcgagcgtgagaaccagaaagcacacttttggacagagatgcgtgtcatcccgcccagctgccccaggcggtgaagaagccgaagcatctgatccggctgatgaagaagtgagccatataacctcgtccgcttgtccctggcagcccaccgccgagccccacggcccagaagcctcccccgtggcaggtggggagcgcgatcttcgccgattgtactcggtggacgcccaagggtttctggacaagcccggtagagccgatgagcagtggagaccatctgccgagctaggctctggggaacctggtgaagccaaagcatgggggcctgaggcggagcctgctctgggggcaaggagaaagaaaaaaatgtctcccccttgcatctccgttgaacctccagcggaagatgagggttcagcgcgtcccagtgctgcggaaggaggaagtacgaccttaaggcgaagaacaccgtcttgtgaagcaactcctcacagggattcactggagccaactgaaggaagtggagcaggaggcgatcccgctgcaaagggggagaggtggggccaggcatcttgtcgggcagagcatctcacagtgccatcatttgcatttgaaccactagacctgggtgtcccgtcaggtgatcccttcctcgacggtagccatagtgtgacccccgagtctcgcgcaagctctagtggcgctattgtgcctcttgagccacccgagagcgagccaccaatgccagtgggcgatccgccagaaaaaagacggggtctgtacctgaccgtccctcagtgcccccttgaaaagcctggctccccgagcgctactccagctcctggaggtggcgctgatgacccagtgta

SEQ ID NO: 216667 - DNA, 6689 bp, synthetic construct
  misc_feature 1..6689: note = Description of Artificial Sequence: Synthetic coding sequence
  source 1..6689: mol_type = other DNA
atggctgagtcggctagccctcccagttcctctgccgctgcgcctgcagccgagcctggggtgactactgagcagccgggaccacggagcccgccttctagtccgccaggccttgaagaaccacttgacggagccgacccccacgtgcctcatccagacttggccccaattgccttcttctgcctgcgccaaacgacatcacctaggaactggtgcatcaaaatggcgaccggcccttggtggtggtgtttgtgtatgctcgtaatccttctcaactgtgtaaccctgggcatgtatcaaccgtgcgatgatatggattgcctctctgatcggtgtaagatcctacaggtgttcgacgacttcatctttattttttttgcaatggaaatggttctgaagatggtagcgctcggcattttcggcaaaaagtgttacctaggagatacctggaatagactggacttcttcattgttatggctggtatggtcgagtatagcctggacctgcaaaatatcaacctcagcgccattcggaccgttagggtgctgaggcccctcaaagccataaacagagtcccctcaatgcgcatcctagtaaatctgctgctagataccttgccaatgctggggaatgtgctcctgctctgctttttcgtatttttcatcttcggaataattggcgtccaactgtgggcgggattactgagaaataggtgcttcctcgaggaaaatttcaccatccagggtgatgtcgcactccctccctactatcagcctgaggaggacgatgagatgccttttatctgctctctctccggggacaatggcatcatggggtgtcacgagattccacccttaaaagagcagggacgcgaatgttgtctgtctaaagatgatgtgtacgatttcggggcaggaaggcaggacctaaacgcctccggtctgtgtgtgaactggaacagatattacaacgtttgcaggactggtagcgccaacccacacaaaggagctatcaactttgataatataggatacgcctggattgtgattttccaagtcattactctggagggctgggttgagatcatgtactacgttatggacgctcacagtttctataacttcatctatttcatcctcctgattatagtgggaagctttttcatgattaacctctgtctggtggtgattgctacccagttcagtgagaccaaacaaagggagcatcggttaatgctggagcagagacagcggtatctgtccagtagcaccgtggccagttacgccgaacctggcgattgctacgaagagatattccagtatgtttgtcacatactgcggaaagcgaagcgccgagcacttgggctgtatcaagccctgcagtctcggaggcaggcactagggcctgaggccccagctcctgcgaagcctggcccacatgccaaagagccacgccactaccatggtaaaacaaaaggccagggagatgaaggacgacatcttggttccaggcactgtcagaccttgcatgggcctgcttccccaggcaacgaccactctgggcgtggaaagcctggccctagggaactttgtccgcagcactctccacttgatgccactccccatacgcttgtgcaacctatccctgcgaccctcgcgagcgatcccgcttcctgcccatgttgtcaacatgaagacggcaggaggcccagcggtcttggtagcaccgacagcgggcaagaaggatctggcagcgggagcagtgcgggtggggaggatgaggctgatggcgatggagcccgatcctcggaggatggagctagtagtgaactgggcaaggaagaagaagaggaggaacaggccgatggagcagtatggctatgcggcgatgtatggcgggagacgagggccaagttgcgcggaattgtggatagcaagtatttcaaccgcggtataatgatggccatactagtgaataccgtgtctatggggatcgaacaccacgagcaggctaacgaactcactaacattttagagatctgtaatgtggtgtttacatctatgtttgctcttgagatgatactcaaactggctgctttcggcctttttgactacctgcggaacccatacaatatcttcgattccatcattgttatcatcagtatctgggagatcgtcggccaagcagatggtggactgtccgtgctgaggacattccgacttcttcgcgtgttaaaactggtgcggtttatgccagcattaagacgacagttggttgttctgatgaaaacgatggataacgttgccacattttgtatgctgttgatgttgtttatattcatcttttcgatactaggcatgcatatcttcgggtgcaagttctcactgcggacagacactggtgacacggttccagaccgtaagaatttcgatagcttgctttgggcaattgtgactgtatttcaaatcctgacccaggaagattggaacgttgttctatataatggtatggccagcacctccccttgggcatctctgtatttcgtggcactcatgacatttggaaactatgtcctgtttaacctgttggtagcaatccttgtcgagggtttccaggccgaaggggacgccaataggtcctactctgacgaggaccagtctagcagtaatatagaggagttcgacaagctgcaggagggactagatagcagcggcgatccaaaactttgtcctatcccaatgacccctaacggccatctggacccttcacttcctctgggagggcacctcggcccagccggagccgcaggccctgctccaagattgtcacttcagccagacccgatgctggtggccctgggcagccggaaatcatccgttatgtctctaggacgaatgtcgtatgatcagcgcagcctgagcagcagcagatcatcctattatggaccgtggggccgaagcgccgcatgggcctctcgtcgttctagctggaactcactgaaacataagcccccttccgctgaacatgaatcactcctcagcgctgaacgtggtggtggcgctcgcgtgtgcgaagtggcggctgacgaaggccctccccgtgccgcaccgctccacacgccacatgcccaccatattcaccacggccctcacctggcccaccgtcaccgtcaccacaggcgtactctttcactcgataacagggacagtgtggaccttgccgagctcgttccagccgtcggggcacatccccgagcagcctggcgcgcagccggacctgcccctggacacgaggactgcaatggcaggatgcccagtatcgccaaagatgtcttcacaaagatgggggatagaggagacagaggggaggacgaagaagagatcgattacactctctgtttcagagtgagaaagatgatagatgtgtacaaaccagactggtgtgaggtacgagaagactggagtgtttatctattctctccagaaaatcggtttagagtgttatgccagaccatcatcgcccacaagttgtttgattatgttgtgctcgcttttattttcctcaactgtatcactatagcgttagagaggcctcagatagaagccggtagcaccgaaaggatattcttgactgtctccaattatatttttactgcaattttcgtgggggagatgaccctcaaggtcgtctcgctaggtctgtactttggcgaacaggcatacctgagaagctcgtggaatgtgctggacggctttctggtgtttgtttccatcattgacatcgtagtctctctggcaagcgctgggggagccaaaatcctgggtgttctcagggtgttgcgtctactccgtaccttacgacctctaagagtcattagcagggccccaggcctgaaactcgtggtggagacgctgatcagctccctgaagcctatcggaaatatagttcttatatgttgtgctttcttcattatctttgggatcctgggggttcagcttttcaaagggaaattctatcactgtctgggggtggacaccagaaacataacaaaccggagtgactgcatggccgctaattatagatgggtacaccacaagtacaacttcgataacctggggcaggccttaatgtccttatttgttctcgctagcaaagacgggtgggttaacatcatgtataatggcttggatgctgtggcagtcgatcagcagccagttacaaaccataacccctggatgctgctgtactttatttctttcctcttgattgtttcttttttcgtccttaatatgttcgtgggcgtggtggtggagaacttccataaatgccgacagcatcaggaagcagaagaagctcgccgtcgcgaagaaaagagactgcgcaggctcgaaaagaaaagaaggaaggcacaaaggttgccttactatgcaacctactgccatacgaggctcctaatccactctatgtgcaccagccattacctcgacatcttcattactttcatcatttgcctgaatgtggtgacgatgtcgttagaacattataaccagcctacaagcctcgagacagccctcaagtattgcaactacatgttcactaccgtgttcgtactggaagccgttctgaagttggtagctttcgggctccgaagattcttcaaggaccgatggaaccagctggatcttgcaattgtcctcctctccgtgatgggtataaccttggaagagatcgagatcaatgcggcattgccgatcaaccccaccattatcagaataatgagagtcctgagaatagccagggtgttgaagttactgaagatggctaccgggatgcgcgctctcctagacaccgttgtacaagccctaccacaggttgggaacctgggcctgctctttatgctgttattttttatctatgccgcactgggggtggaactcttcgggaagcttgtgtgtaacgacgagaatccatgtgaaggaatgagtcgccacgccacatttgagaactttggcatggcctttctgaccctcttccaggtgtcaacaggggataattggaatgggatcatgaaagacacacttcgggattgcactcatgacgagcgcagttgcttatcctcgctgcagttcgtgtccccattgtactttgtgtcatttgtgttgacagcgcaattcgtcctgataaatgtggtggtggccgtcctgatgaagcaccttgacgattccaataaggaggctcaggaagacgcagagatggacgccgaactcgagctggaaatggcacacggtctggggccaggcccaaggttgcctacgggatctccaggcgctcccggacggggtcctggaggggctgggggtggcggagataccgagggcggattgtgtagacggtgttactctccagcacaggaaaatctctggttggacagcgtttcactcatcatcaaggactctctggagggggaattgaccatcatcgacaacttgtcaggcagtatcttccatcactatagctctccggcaggttgtaaaaagtgccaccacgataagcaagaggttcagcttgctgagaccgaggcctttagcctgaactctgatcgctcaagctccatcctgctcggcgacgatctcagtctggaggacccgactgcatgcccacctgggcgaaaagactcaaagggcgagcttgacccaccggaacctatgcgcgtgggggatctgggcgaatgcttcttccctttaagctctactgctgtgtcacctgatcctgagaattttttatgcgaaatggaagagatccccttcaatcccgtgagaagctggctgaaacacgactcgtcgcaggcccctccaagcccattctcaccagacgcatcctctccactgctgcccatgcctgccgagttctttcatccagctgtttccgcttctcagaaaggaccagagaagggcacaggcaccggaactttaccgaagatcgccctgcaaggcagctgggccagcctacggtcaccacgagtcaattgtaccctcctcaggcaggccacggggagtgatacttcactagacgcttcgccctcaagctccgctggctcactacagactactttggaagactccttaacactctctgacagccccaggagggccctcgggccacctgctccggcacccggacctagggccggacttagtcccgcagcccgtaggcggctgagcctgcgagggcgaggtctctttagtttgaggggtcttcgtgcgcaccagagaagccactcctcggggggatctactagcccagggtgcacacaccacgattctatggacccatccgacgaggaggggcgaggaggcgctgggggaggcggagccggatccgagcacagtgaaactctgagctctctctctctaaccagccttttctgcccccctccgccacctccagctcccggattgactccagctagaaagttttcctccacttcaagcttggccgctcctggacgcccacatgctgcagccctggcccacggcctggctcggagtcccagctgggcagcggaccgcagcaaagatccaccgggtagagccccactccctatggggctcgggccactggctcccccaccgcaacctctgccaggggagctcgaacccggagacgcagcgtccaaacggaagagata

SEQ ID NO: 216668 - DNA, 6566 bp, synthetic construct
  misc_feature 1..6566: note = Description of Artificial Sequence: Synthetic coding sequence
  source 1..6566: mol_type = other DNA
atggccgagtcagcgtctccacccagctcatccgcggctgcccctgcagccgaaccgggagtcactacggagcagccaggacctagatcccctccctcctcaccccctggtttggaagagcccttggatggcgctgatccacatgtgcctcaccctgacttggcccctatagcctttttctgcctgcgacaaacaactagcccaaggaactggtgcattaagatggctactggtccttggtggtggtgtctgtgtatgctagtaatcctgctgaattgcgtcactctgggcatgtatcagccctgtgatgatatggattgcctttcagatcgctgcaagatcttgcaagtatttgatgacttcattttcatcttcttcgctatggagatggttctcaagatggtagctttaggcatcttcggaaaaaaatgctacctgggtgacacctggaatagattggacttctttattgtgatggcagggatggttgagtactctctagacctgcagaatatcaatctgtcagccatccgcactgtgcgggtccttcggcctctgaaggcaattaaccgggtgccaagcatgagaatactcgtcaacctgcttctggataccctgcctatgcttggaaatgtgctgctcttgtgcttcttcgtgttttttatattcggaatcatcggcgtacaactctgggccggactcctgcgtaatcggtgttttctggaggaaaattttaccatccagggtgatgtcgccctgcccccttattaccagcctgaagaggatgacgagatgccctttatatgctccctgagcggagacaacggaatcatgggctgtcacgagattccgcctctcaaggaacaagggcgtgaatgttgcctttctaaggacgatgtgtacgacttcggagccggtcgccaggacctgaatgcttccgggctctgcgtgaattggaaccggtactacaatgtatgtagaactggctccgccaaccctcataaaggagccattaactttgataatataggatacgcctggatcgtgatcttccaggtgattactctcgaaggttgggtggagatcatgtattacgtcatggacgcacactcattttacaactttatctactttattctccttatcattgttggttcatttttcatgatcaacctgtgtttagtagtcattgccacccagttctcagagaccaagcagcgcgagcaccggctgatgttggagcagaggcagcggtacctttcttcgtctactgtagctagctacgcggagcctggcgattgttatgaggagatcttccaatatgtctgtcatatcctgcggaaagctaagcgaagagcgcttggtctgtatcaggctctgcagagtcggagacaggctctgggacccgaagctccggcacctgccaagcccggaccccacgccaaggagccccgtcattaccaattgtgcccccaacattcgccactagatgccacaccacacaccctcgtccagccaatacctgctaccctcgccagcgatcccgctagctgcccctgttgccagcacgaagacggacgcagacccagtgggctcggaagcacggacagcggtcaggagggatctggttcaggcagctctgccggtggcgaagatgaagccgatggtgacggggcaaggagttccgaggacggagccagctccgaactgggtaaagaggaggaagaggaagaacaagcggatggcgctgtttggttgtgcggcgatgtgtggcgagagaccagggctaaactgagggggatagtcgattccaaatactttaacagggggataatgatggcgatcttagtgaacaccgtgagcatgggcatcgagcaccatgagcaggctacagaactgacaaatatcctcgagatatgtaatgtcgtattcacctctatgtttgctctggaaatgatcctcaaactggccgcatttggcctgttcgattatttgcgcaacccttacaatatctttgactccataattgtgatcatcagtatctgggaaattgttgggcaagcagacggcggtttaagcgtcttacgtacctttagactactgagggtcttgaagttggtgaggtttatgccagctctgaggcgccagctagtggtgctgatgaagaccatggacaatgtggctaccttctgcatgctcctgatgctgtttattttcatattttcaatccttggaatgcatatcttcgggtgtaaattctccctcagaactgacaccggtgataccgtacctgaccgcaaaaacttcgattcactcctatgggccattgtgacagtgttccagatccttactcaggaagactggaatgtggtcctgtataatggtatggctagtaccagcccctgggcctcgctgtactttgttgctcttatgactttcggtaactatgttctatttaacctgttggttgctattctcgtggaaggctttcaagccgaaggggatgccaaccgcagttatagtgatgaggatcagtcaagttctaatattgaggagtttgacaagctgcaagagggcctcgattcctccggcgacccaaagttatgcccaatacccatgacacccaacggacatcttgatccctctctgccattgggaggccacctgggccctgccggagctgcaggacctgcgcctagactgtccctacagcccgacccaatgttggtggctctgggatctagaaagtcatcggttatgagcttggggaggatgtcgtacgatcagagatccttgagttcatccagatcctcctactatggcccatgggggaggtccgctgcatgggccagcaggcgcagtagctggaatagcttaaaacataagcctcccagcgccgagcatgaaagcctgcttagcgccgagagagggggtggagccagggtgtgcgaagtcgccgctgatgaaggtccccctcgcgcagcaccacttcataccccgcacgcacatcatatccatcacggccctcatttagcccaccgacatagacatcaccgcagaaccctctcgttagataatcgggacagcgtggacctggcagaactggtgcccgctgtaggcgcacaccctcgggctgcatggcgcgctgctgggcctgcccctgggcacgaagattgtaacgggcgtatgccatcaatagctaaggacgttttcacgaagatgggagatcgaggtgaccgcggtgaagatgaagaagagatcgattacacactgtgtttcagggtaaggaagatgatcgacgtctacaagcctgactggtgtgaagtccgtgaagattggtccgtgtatcttttttcccctgagaatcgcttccgagtgctgtgtcaaaccatcattgcgcataaattgtttgattatgtggtgctagccttcatctttctgaactgtatcaccatcgcactcgagaggccacagattgaggccggatcgacagagaggatcttcctcacggtctctaattacatcttcaccgcaattttcgtcggggagatgaccctaaaagtagtgtcgctggggctgtattttggagaacaggcatacctgaggtcttcttggaacgttcttgatgggttcctcgtcttcgtgtcaatcatcgatattgtggttagcctggctagtgccggaggcgcaaagatcctgggggtgcttagggttcttcggttgctcagaactctgcgacctctcagagttatcagccgcgctcctggactcaaactggtagtggaaacactgatctcttccctcaagcccattggcaacatcgtgctcatctgctgtgcgtttttcatcatcttcggaatcctcggagtccagctgtttaaagggaaattctaccactgtcttggagtcgatacgagaaacataaccaaccgaagcgactgtatggccgcaaattataggtgggtgcatcacaaatataactttgacaacctgggtcaggcgctgatgtctttgtttgtgctggcctcgaaagacggctgggtgaacattatgtacaacggacttgacgctgtggccgtggatcagcagcccgtcaccaaccacaatccctggatgctgctgtatttcatctcctttctactgatagtgagcttttttgtcctgaacatgttcgtcggcgtcgtggttgaaaatttccacaagtgtcggcagcatcaggaggccgaggaggcacggcgacgagaggaaaagagacttagacgcctagaaaagaagcgacggaaggctcaaagactcccttattacgccacctactgccatacacgcctgctgatacacagcatgtgtacctcgcattaccttgacatttttataacatttataatttgtctcaacgtcgtgacaatgagtctggagcactacaaccaaccgacaagcctcgagactgcactgaaatattgcaattacatgtttaccaccgtcttcgtgttggaggctgttctcaaattggtcgcttttggcctgcgacgcttcttcaaagaccgctggaaccagctcgacctggccattgtactcctcagtgtgatgggtataacccttgaagagattgaaatcaatgccgctcttccgatcaatccaacaatcattcggattatgcgcgtgctaagaattgctagagtgctgaagttacttaaaatggccaccggcatgagggctctcctggacaccgtggtccaggccctgccgcaggtcgggaatctcggcctgctgtttatgctcctcttctttatctacgcagccctaggcgttgaattgtttggcaagctagtgtgtaatgatgagaatccctgtgaaggcatgtccagacatgccacattcgaaaacttcggcatggctttcttgacgttattccaggtgagcaccggagacaattggaacggcattatgaaggatactctgagagactgcacgcacgacgaaaggtcgtgcttatcttccctgcagtttgtgtctcctctgtacttcgtcagctttgtcctgaccgctcaatttgtgctgatcaacgtcgtagtagctgtgttaatgaaacacctggacgactcaaataaggaggctcaggaggacgccgagatggacgccgaactggagttagaaatggcccacgggcttggtcctgggcctcggctgcctaccggctctccaggggctccaggcagaggcccaggtggggcaggcggaggcggagacacagaaggtggactgtgtagacggtgctatagccctgcgcaggagaatctgtggctcgatagcgtgtcactgataataaaggatagcctagagggggagctgactattatagacaacctgagtggtagcatttttcaccactatagctctcccgcaggatgcaagaagtgtcaccacgacaaacaggaggtgcagcttgctgaaactgaggcgttttctctcaactctgaccgctcaagttcaattttacttggggacgacctttcactggaggacccgacggcatgtccaccaggacggaaagactcgaagggagagctggaccccccagaacccatgcgggtcggggatcttggagaatgcttttttcccctctctagtaccgctgtttccccggaccccgaaaattttctatgtgaaatggaggagattccgtttaatccggttcggtcttggctgaagcatgattcatcacaggccccacctagcccctttagtcccgatgcgagcagtccgctcctccccatgcccgcagaattttttcacccagccgtctccgccagccagaaaggcccagagaagggcaccggtacaggaacgctcccgaagattgctctgcagggctcttgggcgtccctccggagtcccagggtgaattgtacacttctgagacaggcaacaggcagcgataccagtctggacgctagtccctcatcatcagctggctcattacagaccacattggaggactctttgacactatcagattctccccgacgggctcttgggcctccggcacccgctccaggacctagagctggactatccccagctgccaggagacgtctgagcctgcgcggtcgaggcttgttttcactcagggggttgcgggcacaccagcgctcacactccagcggaggttcaacttcacctgggtgcactcaccacgactctatggatccatcagacgaagagggcagaggaggagccggaggcggaggagccggatcagaacatagcgagacactgtcgagcctgagcctgacttccttattctgcccccctccgcctccgcctgcccctggtctcacacccgctaggaagttctcttctaccagctcactcgccgcaccaggtcgccctcatgcggctgccctggcccacggcctggcacggagtcccagttgggcagcagacagatcgaaggaccctcctggcagggcccctctgccaatgggcctaggccctctcgcccctccaccccagccgctgccgggagaactcgagccgggagacgctgcgagcaaaagaaagagata

SEQ ID NO: 216669 - DNA, 6050 bp, synthetic construct
  misc_feature 1..6050: note = Description of Artificial Sequence: Synthetic coding sequence
  source 1..6050: mol_type = other DNA
atggcggagagtgcttcacctccgtcaagtagtgctgctgccccagcagccgagccaggagttacgaccgagcaaccgggaccacggagtccccctagctctccaccaggcctggaagagcctctggacggggctgacccccatgttcctcaccccgacctagcccctatcgccttcttctgtcttagacagaccacctcccctcgaaactggtgtataaagatggtgtgcaacccttggtttgagtgcgtcagtatgctggtgatcctcctgaattgcgtgaccctaggtatgtaccagccctgtgatgatatggactgtctgtccgatcggtgtaagatactacaagtgtttgatgattttatattcatcttttttgccatggaaatggtgctaaaaatggtggcccttgggatttttggaaagaagtgttacttaggcgatacgtggaacaggctggattttttcattgtaatggccggaatggtagagtactcgctggatctgcaaaatattaatctgtctgccatcaggaccgttagggtgctgagaccactcaaagccatcaaccgggtacctagcatgcgtatactggttaatctgctcttagatacgttgcccatgctgggaaatgtgctgttactctgcttttttgtgttcttcatcttcggtattatcggtgtgcaactgtgggccggactgttgcgaaatcggtgcttcctagaggaaaactttacaattcagggggacgtcgccctgccgccttactatcaacctgaggaagatgatgagatgccattcatttgttcactctctggtgataatggcattatgggctgtcacgagatccccccattaaaagagcaggggcgtgaatgctgtttatccaaagacgatgtgtacgattttggcgctggccgtcaggatcttaatgcatctgggttgtgcgtcaactggaaccgatactacaatgtgtgcagaaccggctcagcaaacccccacaaaggagctatcaacttcgacaatattggatacgcatggatcgtgatcttccaggtgatcactttagaagggtgggttgagatcatgtactacgtcatggacgcgcattccttctataatttcatatatttcatcctgctgatcatcgttggttcattcttcatgatcaatctctgcctcgtggtcattgcaacacagttcagcgagacgaagcagcgagagcataggctgatgttggagcaaagacagagatatctttcatccagtactgtagcttcctatgccgaaccaggcgattgttacgaggagatctttcaatacgtctgccacattctgcgaaaagccaagagacgggcactgggactttaccaagcactccaaagtcggcgtcaggccctcgggccagaagcccctgctcctgctaagcctggccctcatgcgaaagagcctagacattaccacggaaaaaccaaaggacagggtgacgagggacgccacttaggcagtagacattgtcagacactacatgggccagccagccccggaaatgaccatagcggtagggaactctgcccacagcattcacccttggacgctactccacacaccctggtgcaacccatcccagctacactcgcgtcagatcctgccagctgcccttgctgtcaacatgaagatgggagaaggcccagtggcctgggcagcactgatagtggacaggaagggagtggttctgggagctccgccggaggcgaagacgaggccgacggcgatggggctaggtctagcgaagatggcgcatcttctgaattgggaaaggaggaggaggaggaggaacaggccgacggagctgtatggctctgcggcgatgtctggagagagacaagagccaagctgcgaggtatcgtagatagcaaatacttcaatcgcggaattatgatggcaatactggtaaataccgtgagcatgggcatcgagcatcacgagcaacccgaagaactcacaaacatcctggagatttgcaacgttgtgttcacatccatgtttgcgcttgagatgatcctgaaactcgctgccttcggccttttcgattacctgagaaatccgtacaatatcttcgacagtataatcgtgataatctctatttgggaaatcgtgggacaggcagacggagggctatccgtcctgaggacttttcgtttgctgcgggtgctcaaattggtccggttcatgcctgccctgaggagacagctggtggtgctgatgaaaacgatggacaacgtcgccaccttctgcatgctcctgatgttattcatctttatcttcagtatcctgggaatgcacattttcgggtgtaagttctcactccgcaccgataccggtgacactgtaccagatagaaaaaattttgatagtctgttgtgggccatcgtaactgtgttccaaattttaacacaagaagactggaacgtggtgctgtacaacggcatggcatcaacatccccatgggccagtctttatttcgtcgctcttatgacgtttgggaactacgtgctgttcaacctactggtggctatcctagtcgagggctttcaggccgagggcgatgcaaataggtcctacagcgatgaagaccagagtagcagcaatatagaggagtttgacaaattacaagaaggcctggactcgtccggagatcctaaactttgccctattcctatgacgcccaatggccacctggatccctcgttgccgctgggcggacacttaggacccgctggagcagcaggcccagcgcctcggctctcactgcagcccgaccccatgctcgtggccctaggaagtcggaaatcatcagtgatgtctctgggcagaatgagttacgatcagcggtctctgtcaagctctaggtcttcctactatgggccatggggcagatctgcagcttgggcaagccgtaggagcagctggaactctctgaagcacaaaccccctagcgctgaacacgagtctctgttgtccgctgaacgaggaggcggtgcaagggtatgcgaagtggccgcagacgaaggtccaccacgcgctgcgcctctccatactccccatgcccatcatattcatcatggtccccacctggcacatcgacatcgacaccatcgcaggaccctgtctctcgacaatagagactctgtcgaccttgctgaattagtgcctgccgtcggcgctcatccaagagctgcatggagagccgcaggacccgcacccggtcacgaggactgcaatggccgtatgccaagtatcgccaaggacgtcttcacaaagatgggagacagaggcgatcgaggggaagatgaagaagaaattgattatacattatgtttcagggtcaggaagatgattgatgtgtacaaacctgactggtgcgaggtcagggaagactggagcgtttacttgttttcccctgagaatcgatttcgggtcctgtgtcagactattatagctcataagctgtttgattacgtcgttttagcgttcattttcctgaattgtatcactatcgccttagaaaggcctcagatcgaggccggatccacagaacgcatttttctgacagttagtaactacatcttcacagctattttcgttggtgaaatgacactgaaggtggtcagtctgggcctgtatttcggtgagcaggcatacctgcggagctcttggaacgtcctggatggctttctagtgtttgtgtcaattatcgacattgtggtgtctttagcttctgccggaggtgccaagattctcggcgtgcttcgggtgcttagactactgcggactttgcggccattacgagtgatttcccgggctcctggcctgaaactcgttgtggagacactgatctcctctcttaaacccattgggaatattgtcttaatatgctgcgcttttttcattatctttggcattctgggtgtccagctgtttaagggcaagttctaccactgcctcggggttgacactaggaatatcacaaatagaagcgactgtatggccgctaattacagatgggtccatcacaagtacaacttcgacaacttaggacaggccctgatgagcctgttcgtcctcgctagcaaggacggctgggtaaacataatgtataatggcttggatgcagttgccgtcgaccagcaacccgtcaccaatcacaatccttggatgctgttgtattttatcagtttcctgctgattgtgtccttcttcgtgctgaatatgttcgttggagtggttgtggaaaattttcacaaatgccgacagcaccaggaggcagaagaagctcgcaggcgagaggaaaagagattgagacggcttgagaaaaagcgtaggaaagcccagagactgccctattacgccacgtactgccataccaggctgttgatacactccatgtgcacatctcattacctcgacattttcataaccttcattatttgcctgaacgtagtaacaatgagccttgagcattacaaccagccgacaagcctcgaaacagcactgaaatattgtaattatatgtttactactgtgttcgtacttgaggccgtgctgaaactcgtggctttcggcctgagacggttcttcaaggaccgatggaaccagctcgatttggcaatagttcttctgagtgtgatgggtatcacccttgaggagattgaaatcaatgctgctctgcctatcaatccaacaatcataagaatcatgcgggtgctccgtattgccagggttcttaaattgctcaagatggcaaccgggatgagggccctgttggacaccgtagtgcaagccttgccacaggtgggcaacctgggcctgttgtttatgttgctgttctttatttacgctgcgctgggggtggaactgttcggcaaacttgtttgcaatgacgagaatccctgtgaggggatgtccagacatgccacctttgagaatttcggtatggccttcctcacactgttccaggtttctacaggagacaactggaatggtatcatgaaggataccttaagggactgtacccacgacgagcggagctgcctgagctcccttcagtttgtgtcgcccctgtatttcgtgtcttttgtcctgacagctcaattcgtgcttataaatgtggtcgtagcagttctcatgaagcacctagacgatagcaacaaagaggcccaagaagacgcagaaatggacgctgagctcgaactggaaatggcacatggactgggccctggtcccaggttgccaactggcagtcccggagcgccaggtcgaggaccagggggagcaggaggtggtggagataccgagggtggcttatgccgacgctgctattctccagcccaagaaaacttatggctagacagtgtaagtcttattattaaggactctttggagggtgagctcaccatcatcgacaacctgagtggaagcatcttccaccactacagctcaccagctggctgcaagaaatgtcatcacgacaaacaggaggttcagttggcggagaccgaggctttcagtctgaactcagaccgcagttcgtcaatcctgctgggagacgacctgagccttgaggacccaaccgcctgcccaccaggacggaaggactccaagggggagttagacccacccgagccaatgcgcgttggtgatctgggggagtgctttttcccactatcctcaaccgccgtgagtcccgatcccgaaaacttcctctgtgagatggaggaaatcccatttaaccccgtgcgcagttggctgaagcacgactcctctcaagctccgcctagccccttttcccctgatgcctctagcccactgctacccatgccggctgagtttttccaccctgcggtgtccgctagtcagaagggcccagagaaagggaccggcaccggcacattgcccaagatagccctccaggggtcctgggcttccctacgaagccccagggtcaactgcacacttcttcggcaggttccgaccccgccaagaccata

SEQ ID NO: 216670 - DNA, 6671 bp, synthetic construct
  misc_feature 1..6671: note = Description of Artificial Sequence: Synthetic coding sequence
  source 1..6671: mol_type = other DNA
atggcggagtctgccagccccccaagctccagtgccgctgctccggcagcagaaccaggagtgacaacagagcagcccggaccgcgaagtccaccaagctcccctcccggactggaggagcctttggatggcgctgatccacatgtaccacatccggacttagcccctatcgcatttttttgcctccggcaaacaacgagtccacgcaattggtgcataaagatggtgtgtaacccctggtttgaatgtgtgtctatgctagtcatcctgctcaattgtgtaaccctaggcatgtaccagccatgtgacgatatggattgcctctccgatagatgtaaaattctacaggtcttcgacgactttatcttcatcttttttgcgatggagatggtgctcaagatggtagcacttggcatatttggcaagaagtgctatcttggagacacctggaacaggctcgatttctttattgtaatggcgggaatggtggagtacagcctcgacctgcagaacataaacctctctgccatccggacagtcagggttcttcgtcccctcaaagcaatcaatcgagtgccttccatgcggatactggtgaaccttctgctggacacccttcccatgctcggcaatgtgctactactttgcttcttcgtgttcttcatatttggcattattggcgtacagctttgggctggcttgctcaggaatagatgcttcctggaagaaaacttcaccatccagggggacgtggccctgccaccgtactatcaacccgaagaagacgacgaaatgcctttcatctgctcgctgtcaggagataacggtattatgggctgccacgaaatacccccactgaaagaacagggacgagagtgctgcctcagtaaggatgacgtgtatgatttcggggctggacgacaggaccttaacgcttccggcttgtgcgtaaattggaacaggtactataatgtctgccgtacagggtccgccaatccacacaagggcgctataaattttgataacatcgggtacgcttggatcgtcatctttcaagtaattacccttgagggctgggtcgagataatgtattatgtaatggatgcacatagcttctacaactttatctatttcatcttgctgattattgttgggtctttcttcatgatcaatttatgcttggtggttatcgccacacagtttagcgaaaccaaacagcgggagcacagactcatgctcgagcagagacagagatacctctctagctccacagtggcctcatacgcagaaccaggcgactgttatgaagaaatcttccagtacgtgtgccatatcctccggaaggccaagcgacgagccttgggtctgtaccaagcattacagagtaggaggcaggccctggggcctgaagccccagcgcctgccaaacccggaccacatgccaaggagcctcgtcactatcacggaaaaacaaaggggcaaggtgatgagggcagacatcttggcagcaggcactgtcaaacactgcatgggccagcttcgcccggaaacgaccactcgggtagggagctgtgcccgcagcacagtccgctggacgccacacctcatacactggtgcaacccattccagccactcttgcctcagatcccgcttcttgcccctgctgccaacatgaggatggccgacgccctagcgggttagggtctactgatagcggacaggagggcagtggctcaggaagtagcgccggtggagaggacgaggcagacggcgacggcgcaagaagttccgaagacggcgctagttcagagctcggaaaggaggaagaagaggaggaacaagcagacggggctgtatggctgtgcggggatgtatggcgggaaacccgagccaaactgaggggaattgtcgattctaagtatttcaatagaggaattatgatggctatactggtgaacaccgtgtctatgggcattgagcaccacgaacaaccagaggagttaactaatatccttgaaatatgtaacgtggtcttcactagtatgttcgcgcttgaaatgatcttaaagctggctgcattcggactgtttgattaccttcggaacccctataatatattcgattccatcatcgttatcatcagcatctgggagattgtgggacaggccgatggaggtttgagcgttctccgaacgtttagattactcagggtgctgaagcttgtccgcttcatgcccgctctgagaagacagttggtggtgctgatgaaaactatggataatgtggctacgttttgtatgctcctgatgctcttcatcttcattttttccattctggggatgcacatcttcggctgcaagttcagtctcaggacggacaccggagacaccgtccccgacagaaagaacttcgactccctgctatgggctattgtgaccgttttccagatcctcactcaggaagattggaacgtcgtcttatataacggcatggccagtacctcaccttgggctagcctttatttcgttgcacttatgaccttcggtaattatgtgctttttaatttgcttgtcgccatcttagtcgaaggctttcaagccgagggcgatgcaaaccggtcctatagtgatgaagatcagtcctcttccaacattgaggaatttgacaagcttcaggaagggctggattcctctggagatcctaagctatgccccattcctatgacacctaatggtcatctggacccatcccttcctctggggggacacttggggccagcaggtgctgccggacccgcaccacggctttcactgcagccggatccaatgttggtggctctgggaagccgcaaaagcagcgtgatgtcactgggccgtatgtcctacgatcagagatccctgagttccagccggagttcctactatggcccttggggcaggagtgcagcgtgggcaagtcgtcggtcttcctggaattccctgaaacacaaaccaccctccgcggaacacgaatccctcttgtccgccgaacgcggagggggagcgagggtgtgcgaagtggccgctgacgaagggcctccgagagccgcaccattgcataccccacacgcccaccatatccatcatgggccacacctggcgcacagacaccgccaccatcggcgaaccttgagcctagacaacagagattccgtggatctcgccgagctggtgcccgctgtgggggctcaccccagagccgcatggagggcagccggtcctgctccaggccatgaggattgcaacggtagaatgccttcgatcgcaaaggacgtgttcacaaagatgggggacaggggcgatcggggtgaagacgaagaagagatcgattacaccctctgttttcgcgtacggaagatgatcgacgtctataaacctgactggtgcgaggttcgcgaagactggtccgtctatcttttctcccccgagaataggtttagggttctgtgccaaacgatcattgctcataagcttttcgactacgttgtgctggcatttatcttccttaactgcattacaatagcactggagcggccacagatcgaagccggaagcacagagcgcattttccttactgtatcaaactatatcttcaccgctattttcgtgggcgaaatgactcttaaggtggtctctctggggctctattttggcgagcaggcatacctgaggtcttcttggaacgtactggacggctttctagtgttcgtgtccatcatcgacatcgtagtctcactggcatcagccggtggggctaagatactgggtgtgctccgtgtgctccggttattgcggacccttcggccactgagggtgattagccgggctccgggattgaaacttgtcgtcgaaacactgatatcctccctcaaaccgattggcaatatcgtgttgatttgttgtgcattcttcatcatcttcggaatccttggagttcagctgtttaaggggaagttttaccactgtttgggagtcgataccagaaacattaccaaccggtctgactgtatggctgcaaactacagatgggtgcaccataagtacaactttgataatctgggccaggcacttatgagcttgtttgtgctagcttcaaaagatggttgggtgaatatcatgtacaatggcctggatgcagtggcagtcgaccaacagccagtgactaatcacaacccctggatgcttctctattttatcagtttcttgctgattgtttcctttttcgtgctcaatatgttcgtcggggtggtcgtggagaatttccataagtgccgacagcatcaggaggctgaggaagccagaaggcgtgaggaaaaacggctacgaaggctggagaagaaaagaagaaaggcacagagactgccatattacgcaacatactgtcacacacgcttgctgattcattcaatgtgcacaagccactacctcgacatcttcattacattcatcatctgtctcaatgtggttacaatgagcctcgagcactacaatcagcccaccagccttgagacagcgctgaagtattgcaactatatgttcacgaccgtcttcgtcctggaagctgtgctgaaactagtggcctttggcctgcggcgattcttcaaagatcgttggaatcaacttgatctggctatcgtcctgctttctgtgatgggtataacgctcgaagagatcgaaataaatgcagccctgccaataaaccccacgatcattaggattatgcgagttctgagaatcgctcgggtgttaaaattgttgaagatggctacagggatgagggcactgctggacaccgtggtgcaggccctgccacaggtggggaacttgggcctactgtttatgctcctgttctttatctacgctgctctcggcgtggagctctttggtaagttagtttgcaacgatgagaacccgtgcgaagggatgtcacggcacgctacctttgaaaatttcgggatggcttttttgacattgttccaggtgagcactggagacaattggaatggcatcatgaaggacacattacgtgattgcacacatgatgagcgatcatgcctgtcatcactgcagttcgtctctccgttatactttgtgtcgttcgtcctgacagcccaatttgtactcatcaatgtggtggtggctgtgcttatgaaacacttggatgattctaataaggaagcacaggaagatgctgagatggacgccgagctggagttagagatggcacacggtctggggcctggaccacgactgccgactgggtcccccggagctcctggcagaggcccaggtggagctgggggaggcggtgacactgaaggcggactgtgcagaagatgttacagccccgctcaggagaatctgtggcttgattcagtgtcactaatcattaaggactccctagagggagaattaaccatcattgataatctgtcggggtccatcttccaccactattcatccccagcgggatgtaagaagtgccatcacgataagcaggaagtgcaactcgccgaaacggaggcattcagcctcaactccgacaggtcctccagcattttgctgggcgatgatctcagcctcgaggaccccacggcatgccctcctggcagaaaagattcgaagggagagctggacccccctgaaccaatgcgggttggggatctgggggagtgcttctttcccctttcttccacggcagtctcacccgatcctgaaaacttcctgtgcgagatggaggaaataccattcaatcccgtacgatcctggctgaagcatgatagtagccaggcgcctccaagtccttttagtcccgacgccagtagcccactgctcccaatgcccgcagagtttttccacccggctgtgtcagcttcccaaaagggccctgagaaaggtacgggcaccggtacattaccaaaaatcgcccttcagggcagctgggctagcctcagaagtcctagagtcaactgtacattgctaaggcaggccaccggttcagacaccagcctcgacgcaagcccatcaagctctgcaggtagcttgcaaaccacgcttgaagattctctcaccctgagcgatagccccagacgagcccttggccctccagcacctgcacccggtccacgcgctggactcagtccagctgctcgcagacgattgtcactaagaggtagaggactgttctccctaagaggacttcgtgcacatcagcggtcacactcatcggggggttccaccagtccgggatgtactcaccatgactccatggatcctagcgatgaggaaggcagaggcggtgccggagggggaggcgcagggtccgagcatagcgaaacacttagcagcctgagcctcacctctctgttctgcccgcctccccctcctcctgcacccggactgacacccgcaagaaagttctctagcacctcttcccttgcagcaccaggcagaccccacgcggcagcacttgctcacggacttgctcgaagcccatcctgggcagcagatcgcagtaaggaccctccgggtagagccccattgcccatggggctggggcctctggctccaccccctcagcccctgcccggtgagctcgaacctggggatgccgcaagcaagaggaagaggta

SEQ ID NO: 216671 - DNA, 6566 bp, synthetic construct
  misc_feature 1..6566: note = Description of Artificial Sequence: Synthetic coding sequence
  source 1..6566: mol_type = other DNA
atggccgagagtgcctctccccctagtagtagtgcagcggcacccgcagccgaacctggggttacaaccgagcagcccggaccacggtctccaccttctagtccacccggattggaggaaccacttgacggcgctgacccacacgtaccccaccctgacctagccccaattgcttttttctgtctacgtcagaccacctctcccaggaattggtgtatcaagatggtctgtaacccctggttcgagtgcgttagcatgctggtcattcttctcaattgcgtgacattgggcatgtaccagccgtgtgacgacatggattgcctgtccgatcgctgtaaaattcttcaggtgtttgatgattttatcttcatcttctttgccatggagatggttcttaaaatggttgctctgggcatctttggaaagaagtgctatctgggggatacctggaatcggctagatttttttatcgtgatggcaggaatggtcgagtactccctggaccttcagaatattaacttgtcagccatccgaacagtgagagttctgcggcctctgaaagccattaaccgagtccccagcatgcggattctagttaaccttctccttgatactctgcctatgctgggcaatgtgctgctgctgtgcttctttgtattcttcatctttggcatcattggtgtgcagttatgggccggtctgttgcggaacagatgtttcctggaggagaatttcaccattcagggtgacgtggcactcccaccttattaccagccggaagaagacgacgaaatgcctttcatatgctcactttctggcgacaacggtatcatggggtgccacgagattcccccactgaaagaacaaggccgagagtgttgcttaagtaaggatgatgtctatgattttggcgcaggcaggcaggacctcaacgcctcagggttatgtgtgaattggaaccgatattataacgtctgcaggaccggtagcgctaatcctcacaaaggagcgatcaatttcgacaacattggctatgcctggatcgttatttttcaggtaatcacgctagagggctgggttgaaataatgtattatgtaatggatgctcactccttttataatttcatttattttattctgttgataatcgtaggatcctttttcatgatcaacttgtgcctggttgttattgcgactcagttctccgagacaaaacagagggagcatagactaatgcttgagcagcggcagcgctacctgtcctcgtctacagtggcatcctacgcagaacctggagattgttacgaagagatattccagtacgtctgccacatactccgcaaggctaaacgacgagctcttggtctctatcaagcccttcaatcccggcgacaggctctgggccctgaggcacctgctccggcaaaacccggaccccatgcaaaggagcctaggcactaccagctgtgtcctcagcattctccattggacgctacaccccataccctggttcagccaattcccgcaaccctggctagcgacccagcttcctgcccctgttgtcagcacgaggacggtagacggccaagcggtttaggaagcacagattcaggacaggaggggtcaggcagtggcagttctgccggaggcgaggacgaggccgatggggacggtgccagaagctcagaagacggcgcatccagcgaactgggtaaagaggaagaagaggaagagcaggccgatggcgcagtctggttgtgtggcgacgtgtggagggagacgcgggcaaagctgagggggattgttgatagcaagtactttaaccggggtataatgatggcgattctggtgaatactgtatctatgggaattgaacaccatgagcagcctgaggagttgacaaatatacttgagatctgcaacgtggtatttactagtatgtttgctctggaaatgattttgaagctcgccgctttcggcttgtttgactacctacggaatccatacaacatctttgactccattatagttattatttctatctgggaaatcgtgggtcaggcagacggaggcctctcggtcctaagaacatttcgcctccttagagttctcaagcttgtgcggtttatgcccgctttacgcagacagctcgtggtgttaatgaaaaccatggataacgttgctaccttctgtatgctactgatgttgtttatctttattttctcaattctggggatgcacatctttgggtgtaagttctctctgcgaaccgacactggggacactgtccccgacaggaagaacttcgacagtttgctgtgggcaattgtaaccgttttccagattcttacccaggaggattggaatgtggtcttgtacaacggcatggcctcaacaagcccctgggcgagtctgtactttgtagcgcttatgacattcgggaactacgtgctgttcaatctgctcgtggccatactggttgaagggtttcaggcagagggtgatgccaatcggtcttacagtgacgaggaccaaagttcctctaatattgaggaatttgacaagctccaagaaggtctggactcatccggggaccctaaactgtgtcctatacccatgacgcctaatggccacctggatccaagtctgccgctgggagggcacctcggccctgctggagccgctggccctgctccaagattatctctccagccagatccaatgctagtggccttggggtctaggaagtcaagcgtgatgtcacttggaaggatgtcatacgaccagagatccctgtcatcgagcaggagcagctactacggcccttggggcagatccgccgcttgggctagccgcagaagctcttggaactcactgaagcacaaaccccctagtgccgagcacgagagcctcctgtcagccgaaaggggtggcggagcaagggtatgtgaagtcgcggctgatgaaggcccaccgagggccgcaccgcttcacacacctcatgcccatcacatccaccatggccctcatctggcccatcggcataggcaccacaggcggactctgtcactggataatagagactcagtcgacttggcggaactggtgcccgctgtcggtgctcacccccgagctgcatggagggccgcaggcccagctccaggccacgaggattgtaacgggaggatgccttcaattgccaaagatgttttcactaagatgggggacaggggcgatcgcggtgaggacgaagaggaaatcgattacacgctatgctttagggttcgcaagatgatagatgtatataaaccggactggtgcgaggtacgcgaagactggtcagtgtacctgttttctccagaaaataggttccgggtcctctgtcagacaatcattgcacataagcttttcgattacgtggtactcgcttttatcttcctgaattgtatcacgattgccctggagcgcccacagatagaggcgggttctactgaacgcatttttttaacagtgtcgaattacatttttaccgctatcttcgtgggtgagatgaccttgaaggtagtgagcctgggattatattttggcgaacaggcctacttgagatcttcctggaacgtgctggatggctttctggtgtttgtgtcgataatcgatatcgtggtctccctggcgtcagcaggcggtgccaaaattctaggggtgctgcgtgtactgcgattgctgcggaccctgcgccctctccgcgtaatatcccgggctccaggcctgaaactggttgttgaaaccttaatttcaagcttaaaaccaatcgggaatatagtgctgatatgttgtgctttttttattatcttcggtattcttggtgtgcagctctttaagggcaaattctaccattgtctaggagtggacacccggaatattactaaccgctctgattgcatggcggcaaactatcgctgggtgcaccataagtataacttcgataatttgggccaggccctcatgagcctcttcgtgctggccagtaaggatggatgggtgaacattatgtataacggactcgatgcggtagccgtagaccaacaaccagtgacaaatcataatccctggatgttactgtatttcatatcatttttgcttattgtctcgtttttcgtgcttaatatgttcgtgggggttgtagtcgagaatttccacaagtgccgacagcaccaagaggccgaagaagcaagaaggcgggaggagaagcgcctgaggaggctcgagaagaaacggaggaaagctcagcgtctgccatactacgccacctattgtcatactcggctgttaattcattccatgtgcacaagtcattatctcgatatcttcatcacttttattatttgcctcaacgtggttaccatgtcacttgaacactataatcagcccacttcactcgaaaccgctctaaaatactgtaattacatgttcacgactgttttcgtgctggaggcggtactcaagctggtcgcctttggccttcggagatttttcaaggatagatggaaccagctggatttggcaattgtgctgttgtctgtgatgggaatcacactcgaggaaattgagataaacgccgcactacctattaatcctactatcatccgcattatgagagtgctgcgcatcgctcgtgtgcttaagttgcttaaaatggccacaggaatgcgcgctctgctcgacacggtcgttcaggcattgccacaagtgggaaatcttgggctcctattcatgctgttgtttttcatctatgccgctctcggcgtcgagctgttcgggaaactggtgtgtaatgatgaaaatccttgtgagggaatgagcagacacgctacctttgaaaacttcggcatggctttcctcactctgtttcaggtctcaacaggagacaactggaacggcatcatgaaggacacacttcgtgattgtacccacgatgagcgctcctgtctatccagtttgcagtttgtgagcccgctctattttgtatcgtttgttctgactgcccagtttgtgcttattaacgtggtagtagcggtattaatgaagcatctggacgatagcaacaaggaggctcaagaagatgccgagatggacgctgagcttgagctcgagatggcccacggcctgggcccaggccctaggctgcctactggctctcctggcgcaccaggcaggggccctggcggtgccggtggcggtggcgacactgagggaggactttgtaggagatgttactcaccggcacaggagaatctgtggttggatagcgtgtctttgataattaaggacagcctggaaggggaactcacgattattgacaacctgagtggatctatctttcaccattatagttcccccgcagggtgtaagaaatgccaccatgataagcaggaagttcagctggcagaaaccgaagcattttctctcaacagtgaccgatcctcgtccatattactgggcgacgacctatccttagaggatcctaccgcttgtccaccaggcaggaaggactcgaagggcgagctcgatcctcctgagccaatgcgggtcggtgatcttggcgagtgcttctttcccctgagctctacagccgtgtctcccgatcccgaaaactttttgtgtgaaatggaagaaatccccttcaaccctgtgagatcctggcttaaacatgattctagccaggccccaccatccccattcagcccggatgcaagctcaccactccttcccatgcctgctgagttctttcaccccgctgtttccgctagccagaagggcccagagaaaggcacaggcaccgggactctgcccaaaattgctttgcagggaagctgggcctccctgaggtcacctcgcgtgaactgtacactcctccgccaagctacaggttccgatactagcttggatgccagtccatctagtagtgcaggaagcctgcagactacactagaggatagcctcacgttgtcagacagcccgaggagggcactggggccaccagccccagcccctggaccaagagctggattgtcccccgctgcgcgtcgtcggctctccttgagggggagggggctgtttagcctgagggggttaagggcccaccagagaagtcactcctccggaggtagtacatcaccaggctgcacgcaccatgactccatggatccttctgatgaggaaggcagaggcggagctggtggcggaggcgcaggctcagaacactctgagacgctcagttctctgagcctcaccagtctcttttgtccccctccacccccacccgcaccagggctgacgcctgctaggaaattctccagtactagcagcctggctgccccagggcgaccccacgctgccgcactggctcatgggctggcaagaagtccttcttgggctgccgacaggtctaaagatccaccgggacgggctcccctgcctatgggcctcgggcctctggcccctccgcctcagcctctgcctggagaattggagccgggtgacgctgctagcaagagaaaaaggta

SEQ ID NO: 216672 - DNA, 5945 bp, synthetic construct
  misc_feature 1..5945: note = Description of Artificial Sequence: Synthetic coding sequence
  source 1..5945: mol_type = other DNA
atggcggagagcgcctcaccgcctagttcatcagctgcggctcccgcagcggaaccaggcgtgaccactgagcaacccggtcctaggagcccacctagctcaccacccggattggaagaacccttggacggggctgatccacatgtaccccatccagatctggccccaatagcgttcttctgcttaagacagaccacgtccccacgtaattggtgcattaagatggtctgcaatccgtggtttgaatgtgtctcaatgcttgtgatactgctcaattgcgtaacactcggcatgtatcagccctgcgacgatatggactgtctgtctgaccgatgcaaaattctccaggtctttgacgatttcatatttatttttttcgcaatggagatggtgttaaaaatggtggcacttggaatctttggtaagaaatgttatctcggagatacatggaatcggctggattttttcattgtaatggcaggtatggttgaatattccctggacctgcagaatattaatctctctgctatccggactgtccgggtgttacgcccactgaaagctatcaacagagtgcccagcatgcgaatcctagtcaacctcctgctggacaccctgcctatgttggggaacgttctgctactctgttttttcgtatttttcatatttggcatcattggcgtgcagctctgggccggattgttgcgtaatcggtgttttttagaggaaaacttcaccattcagggagatgtcgcacttcccccatattatcagcctgaggaggatgatgagatgccatttatttgctcactttctggtgataacgggattatgggctgtcacgaaattccaccgctgaaggagcagggtcgggaatgttgtctttccaaagacgatgtatatgactttggcgcaggacgccaagatctgaacgccagcggactctgtgtgaattggaatcgctattacaacgtctgcaggaccggctcagctaatccacacaaaggagccattaacttcgacaatatcggctacgcttggattgtgatcttccaagtgattaccctcgagggatgggtggaaattatgtattatgttatggatgctcacagcttctacaattttatatacttcatcctccttattattgtcgggagtttctttatgatcaatctgtgcctggtggtgatcgcaacgcagttctccgagacaaaacagcgggagcacaggcttatgctcgagcagcgtcagagatatctgagctcatctactgtggctagttacgcggagcccggagattgttatgaagagatctttcagtacgtttgtcatattttgcgaaaggcaaaacgacgcgctctcggcctataccaagccctgcaatctcgtagacaggctctaggaccagaggccccagcccctgccaagccagggccacatgccaaggaacctcgtcactaccaactgtgtccccagcactccccattagatgctacaccccataccctagtacagccaatcccggcaacgctggcgtccgatccagcctcgtgtccctgctgtcagcacgaagatggccgaagaccctccggactcggcagcacagatagcgggcaggagggcagcgggagcggatcaagcgccggaggggaagacgaagctgacggtgacggagcgagatctagtgaggatggcgctagctccgagttggggaaggaggaggaggaggaagagcaggctgacggggctgtgtggctttgcggtgacgtttggagggagaccagagccaaactacgtggcatcgtggactccaagtacttcaaccgtggcatcatgatggcgattttagtgaacaccgtgagcatggggatagaacatcatgagcaacctgaggagttgacaaatatattggaaatctgcaacgtcgtgttcaccagtatgttcgccttggagatgatactgaagttagcagcctttggcctatttgattaccttcgaaatccctacaacatctttgacagtatcattgtgattatctccatctgggaaattgtggggcaggcggatggcggactcagcgtgttaaggaccttcagattgctacgcgtcttgaaactagtgcgcttcatgcccgcactgagaaggcagttagtcgttctcatgaagacgatggacaacgtggctactttctgtatgctattaatgctgtttattttcattttttccatcctcggcatgcatattttcggatgcaaattcagtcttcggaccgatactggagacaccgtgcccgatcgcaaaaatttcgactccctcctttgggccatcgtgaccgtgttccagatcctgactcaggaagactggaacgtcgttttgtacaacggtatggcgtcaacctccccatgggcaagtctatattttgtcgccctgatgacattcggcaactacgtgctcttcaacctactcgtggccattctggtggagggcttccaggcagaaggcgacgcgaaccgctcttactctgacgaagatcagagtagctccaatatagaggaattcgacaaattgcaggaagggctggactcctctggcgatcccaagctgtgccctatcccaatgacgcccaatgggcaccttgatccttccctaccattgggcggacacctggggcctgcgggagccgcaggaccagcccctaggcttagtttacagcctgatcccatgttggtggcactcggctccaggaaatcaagtgtgatgtctctggggaggatgagttacgatcagcgctccttgtcctcctcccgaagtagttactatggaccttggggaaggtctgctgcctgggcctcacggcgttcctcttggaattctctgaaacacaagcccccttccgccgaacacgagtcactcctatccgccgaaaggggaggcggtgcacgcgtgtgtgaagttgccgcagacgagggacccccacgggctgcaccactgcacaccccacacgcacaccacatccaccatgggccacacctcgcccacagacaccgccaccatcggagaacactgagcctcgataatcgggatagcgtggatctcgcagagctagttcctgctgtgggcgctcatcctagggcagcctggagagccgcaggtcccgcacccggacacgaggattgtaatggacgtatgccttcaatagctaaagacgtgttcacaaaaatgggcgatagaggcgaccgcggagaggacgaggaagagatcgactatacgctgtgcttcagggtgcgcaagatgatagatgtgtataagcccgactggtgtgaggtgagagaggactggtcggtgtatctcttcagcccagaaaaccggttccgggtgctgtgtcagacgatcattgcccacaagctgttcgattatgtcgtgcttgcctttatcttcttgaattgcattaccatagcgctggagcgtccccagatcgaagccggtagcacagagaggatctttctgactgtatccaattacatcttcacagcaatcttcgtgggggaaatgacgttaaaggtggtctccctgggtctctattttggggagcaggcttatctcaggtcttcttggaatgttcttgatggttttctggtgttcgtgagcattattgacatcgtagtgtccttggcctcggctggaggggctaagatcctcggagtgctccgggtacttcgactgcttcgtaccctcaggcctttgcgtgtgatcagtcgggcaccagggctgaaactcgtcgtggaaactctgatctcttccctgaaacctataggcaacattgttctaatttgttgtgctttcttcatcatttttggtatcttaggcgtccagctcttcaaaggcaagttctatcattgcctgggagtggacacgagaaatattactaatcgctctgactgcatggcggctaactatagatgggtccatcacaagtacaacttcgataatctgggtcaggcattgatgtcgttatttgtgctggcctcaaaggacggatgggtaaacatcatgtacaacggtctggatgcagttgctgtggatcagcagccagttaccaaccataatccctggatgctcctctattttatctccttcctgttgatcgtcagcttctttgttctgaacatgtttgtgggagtggttgtcgagaacttccacaagtgtagacagcatcaggaggccgaagaggcccgacgcagggaggagaagcggttgcgcaggcttgagaaaaagcgaagaaaggcccagcgactgccatactacgcaacgtactgccacacccgactgctgatacatagcatgtgcacctcccattatctcgacatctttattactttcatcatctgcctcaacgtggtcacaatgagcctggagcactataaccagccaacgagtctggaaacagccctcaaatattgtaattatatgttcaccacagtgttcgtgctggaggcagtgctgaaactggtggcgttcgggctgcgcagattcttcaaggatcggtggaatcaactcgacctcgctatagtcttattgtcagtgatgggaatcacattggaagagattgaaattaacgccgctttgcctatcaaccccaccatcattcggattatgagagtgcttcggatcgcccgtgtcctgaagctgctcaaaatggccaccgggatgcgcgctctgttagataccgtcgttcaggccctgccccaagtggggaacctaggtctcctcttcatgctgttattctttatttacgcagctctgggcgtggaattattcggaaagttagtctgcaacgacgaaaacccctgtgaaggcatgtcccggcatgctaccttcgagaactttggcatggcattcctcacgctttttcaggtgtcaactggtgacaactggaatggcatcatgaaggatacgttgcgtgattgcactcatgacgaaagatcttgcttaagcagtctgcagttcgtgtctccattatattttgtctctttcgtacttacggcccaattcgtcctgatcaacgtagttgttgctgtcctcatgaaacatctggacgacagcaataaggaggcccaggaggatgcggaaatggacgcagaattggaactggaaatggcccatggcctcgggccaggccctcggctgcctacaggatctccaggagcgcctggaagaggtccaggcggagctggaggcggaggagacaccgagggtggcctgtgtcgcaggtgctatagccccgcacaggaaaatctttggctcgatagcgtgagcctgattattaaagactctctagagggggaactcactataatcgataatctcagtggatcaatctttcatcattatagctctcccgctggttgcaagaagtgtcaccatgacaagcaggaggtgcaactggctgaaactgaagcattcagtctgaattcggatagaagcagtagtatcttgttaggagatgacctgtctcttgaggacccaaccgcctgccctccagggagaaaggactccaagggagaactggacccacctgagcctatgagggtgggagatctgggagagtgtttttttcctctttcatctactgccgtatctcccgaccccgaaaatttcttgtgcgagatggaagagatcccgttcaatccagtgaggtcttggttgaagcacgattcctcccaggcccctccatcacctttcagtccggacgcaagttctccgttactgcccatgcccgcagagttttttcatccagccgtgtctgcctcccagaaaggacccgagaagggaaccggcactggcactttgccaaagattgcactgcagggcagttgggctagcctcagatcaccgcgtgtcaactgcactctgcttcggcaggttcctaccccacctcgaccata

SEQ ID NO: 216673 - DNA, 1041 bp, synthetic construct
  misc_feature 1..1041: note = Description of Artificial Sequence: Synthetic coding sequence
  source 1..1041: mol_type = other DNA
atgatggacaagttccggatgattttccagtttctgcagtctaaccaggaaagtttcatgaatggcatctgcggaatcatggccctcgcttccgcacagatgtattctgcatttgatttcaattgtccttgcttgccaggatataacgccgcatacagcgctggcatcctcctcgccccacctcttgtgttgtttctcctgggactggtgatgaataacaatgtctccatgctagctgaggagtggaagcggccactgggacgaagggccaaagaccctgcggtgctccgctacatgttctgctccatggcccaaagagcactgattgcccctgtggtgtgggtggctgtaacattattggatggaaagtgctttttgtgtgctttttgcacagccgtgcctgtatcagcgctggggaatggttcactggcccctggcctacccgctcccgagttagcgagattattggcgagagtgccctgtccggagatttacgacggggattggctgttggcccgagaagtggcagtccgctacttgcgatgtatttcccaggccttaggatggtcattcgtcttgctgaccacacttctggcattcgtcgttagaagcgtcaggccctgttttacccaggctgcttttctgaaatccaaatactggtcccattacatcgacatagaaagaaaattgtttgacgaaacgtgtacagagcacgccaaggccttcgctaaggtctgcatacaacaatttttcgaggctatgaaccacgacttggagcttgggcacacccatgggaccctcgcgaccgccccagcctcagctgctgccccaacaactcctgacggggctgaagaggagagagaaaagctgcgtggcataaccgaccagggtacaatgaaccgcctgctcacgagctggcataaatgtaagcctcccctgcgtctgggccaggaagagccacccttgatgggcaacggatgggcaggtggcggacctcggccacctcgcaaagaggtggccacctattttagcaaagtgtag

SEQ ID NO: 216674 - DNA, 972 bp, synthetic construct
  misc_feature 1..972: note = Description of Artificial Sequence: Synthetic coding sequence
  source 1..972: mol_type = other DNA
atggcggctttgatcgctgagaactttaggttcctttccctgtttttcaaatcaaaggacgtgatgattttcaacggtctcgtggcgctaggtactgtcggtagccaggagctgttttctgtggtggcctttcattgtccgtgttcgcctgccaggaattacctttacggtctggccgcaatcggtgtgccagcactggtgctcttcattattggtattatcctgaacaatcatacatggaacctcgtggccgagtgtcaacaccgtaggaccaagaattgtagcgctgcacccaccttcctcctgctgagctctatcctgggcagagccgctgtggcccctgttacatggtcagtgatctctctgcttagaggcgaagcctacgtctgcgctttgagtgagttcgtcgaccccagctccctcacagcacgggaagagcactttccatccgctcacgctactgaaatactcgccagattcccctgcaaggaaaacccggataacctctcagactttcgggaggaggtctctagaagactaagatacgagagccagctgttcggatggctgctgatcggcgttgtggctatcctcgtgttcctcaccaagtgcttaaagcactattgttcaccattgtcgtataggcaggaggcctactgggcacagtacagagccaatgaggatcagctcttccagcgtactgccgaggtgcactcacgcgtgctcgcggctaataatgtgcggcgattctttggatttgttgctctaaataaggatgatgaggaactgatcgcgaatttcccagttgagggaacccaaccacgccctcaatggaatgccatcacaggtgtgtatttatatagagaaaatcaggggctgcctctttacagccgtctccacaaatgggcacaaggcctggccggaaatggggctgcacccgataatgtggagatggctcttctgccttcctag

SEQ ID NO: 216675 - DNA, 972 bp, synthetic construct
  misc_feature 1..972: note = Description of Artificial Sequence: Synthetic coding sequence
  source 1..972: mol_type = other DNA
atggctgccctcatcgctgaaaactttcggttcctgtcgcttttctttaagagtaaagatgtgatgatctttaatggcctggtggccctgggcactgtgggatcacaggagttgttttccgtcgtggcttttcattgtccttgttctcctgcgaggaattacttatatggcctagcagcgatcggtgttcccgcacttgtactttttataattggaattattctaaataaccatacttggaatctagtcgccgagtgccagcatagaagaacaaagaattgctccgcggctcctacctttctgttgctgtcatcaatattagggcgagctgcagtggccccagttacttggagcgtaatttccctcctgagaggagaggcatacgtgtgcgccctgagtgagtttgtggatcccagtagcctgactgccagagaagagcattttcctagtgcacacgcgacggagatcctggctcgattcccatgcaaggaaaatccagataacctgagcgatttcagagaggaagtatctaggcgcctgcgctacgaaagccagctgtttggttggttacttatcggcgtggtggctatccttgtttttttgaccaaatgtttaaaacactactgcagcccactgagctaccgacaggaggcctactgggcccaataccgggcaaacgaagatcagctgttccagcggacagccgaagtccactcccgcgtcttggcggcaaacaatgtcagaagattctttggattcgtagcgttgaataaggacgatgaggagcttattgctaattttccggtcgagggaacccagcccagaccccagtggaacgccatcaccggagtgtacctgtaccgtgaaaaccagggactgccattatatagtcgccttcacaaatgggcccaagggctggccggaaatggcgcagctcccgacaacgtagagatggctcttcttcccagctag

SEQ ID NO: 216676 - DNA, 657 bp, synthetic construct
  misc_feature 1..657: note = Description of Artificial Sequence: Synthetic coding sequence
  source 1..657: mol_type = other DNA
atggctgccctgatcgcagagaacttccgtttcctcagcctgttcttcaaatcaaaagacgtgatgatctttaatggcctggtagctctcggtacggttggcagtcaggagctctttagtgtggtggccttccactgcccctgtagtcctgctcgtaactatctgtacgggttggctgccattggcgtgcctgcactggtgctgtttatcatcggaatcatattgaacaaccatacttggaaccttgtcgccgagtgtcagcataggagaacgaagaactgctccgccgctccaacttttctgttgctgagttcaatcttagggagagccgcagtcgccccagtcacctggtccgttatctcattattgcgaggcgaagcttacgtgtgtgcactgtccgagttcgtcgatccaagcagcctaacggctagagaggagcactttccgtctgcacacgcaacagaaattttggcaagattcccgtgcaaagagaaccctgacaacttgtctgacttcagggaagaggtgagccgacgcttgaggtatgaatcgcaggtacgcagctgcgctaagggaagctcttcctccctggttgttgctggggagcgcagcggagacggtctcgtgctgaaactgggcttagttctgaggggatag

SEQ ID NO: 216677 - DNA, 891 bp, synthetic construct
  misc_feature 1..891: note = Description of Artificial Sequence: Synthetic coding sequence
  source 1..891: mol_type = other DNA
atggagagtatggccgtggctacagatggaggtgaacgtccaggcgtgcccgctgggtctggcctgtcagcatcccaacgcagggctgagttacgtcggcgtaagcttctgatgaactccgaacagcgtataaatcgtattatgggatttcacaggccagggtcaggagcggaagaggaatcacagactaaaagtaagcagcaggattctgataaactgaatagcctctctgtgccttccgtgagcaagcgagtggtattgggcgacagcgtttctaccggcaccaccgatcagcagggcggtgttgctgaggtgaaaggtactcagttgggcgacaaacttgactcctttataaaaccgcctgaatgtagctccgatgtgaaccttgaacttagacagagaaaccgcggagacctgaccgccgactccgtacaacggggtagcaggcatggcttggaacagtatctatctaggtttgaggaggccatgaaactccgaaaacagcttattagcgagaagccatctcaggaggacggcaacactactgaggaattcgattcctttagaattttcagattagtgggctgtgctctgcttgcgttgggtgtgcgagcatttgtttgcaaatatctctccatcttcgcgccttttctgactctccagctcgcttatatgggactctataagtacttccccaagagcgaaaaaaaaatcaagaccaccgtcctgaccgctgccctgctgctctcgggcattcccgctgaagtgatcaatcgatcaatggacacctactccaagatgggggaggtcttcacggacctgtgtgtttactttttcaccttcatcttttgtcacgagctgctcgactactgggggagcgaagttccctag

SEQ ID NO: 216678 - DNA, 1113 bp, synthetic construct
  misc_feature 1..1113: note = Description of Artificial Sequence: Synthetic coding sequence
  source 1..1113: mol_type = other DNA
atgctgggagctgtggaaggcccaagatggaagcaggccgaagacattcgggatatctacgattttagggatgtattaggaaccggagccttctctgaggtgatcctggccgaagacaagcgaacgcagaagctcgtggcaatcaaatgcattgccaaggaagctttggagggcaaggaaggcagcatggaaaatgagattgctgtcctgcataagatcaaacacccgaacatcgtggctctcgacgacatctatgaatccggaggacatctgtacctcatcatgcaattagtgtccgggggagagttgttcgatcggatagtcgaaaaagggttttataccgagagggacgcctcgaggttgatttttcaggtgctcgacgccgttaagtatttgcatgacctagggattgtacatcgggacctcaaaccagagaacctcctctattattctcttgatgaggactccaagatcatgatctcagattttgggctgtcaaaaatggaggacccaggatccgtgcttagcacagcgtgcggcacaccaggctacgtggcacccgaagtgctagcccagaaaccatattctaaggctgtggattgctggtctattggcgttattgcatatattctgctctgtgggtacccgcctttttatgatgaaaatgacgcaaagctgttcgaacaaattctgaaagcagagtacgaattcgatagcccctactgggatgatattagtgactctgctaaagacttcatccgccacctgatggagaaggaccccgagaaacggtttacttgcgaacaagcgttgcagcatccctggatcgccggagatacagccctcgacaagaatattcaccaaagcgtctcagagcaaatcaagaagaacttcgcgaagtcgaaatggaaacaggctttcaacgccacagcagtggtgcgacacatgagaaaattacaactcggtacctctcaagaaggacagggacagacagcctcccacggggaactgttaacccccgttgcaggtggccctgctgccggatgttgctgccgcgattgttgcgtggaacctgggaccgagttgagcccaacacttccccatcaactatag

SEQ ID NO: 216679 - DNA, 1437 bp, synthetic construct
  misc_feature 1..1437: note = Description of Artificial Sequence: Synthetic coding sequence
  source 1..1437: mol_type = other DNA
atggcaaccatcacatgcactcgctttacggaggaataccagctgtttgaagagctggggaagggggcattttccgttgtcagacgctgtgtgaaagtgctcgccggacaggagtacgccgcaaaaatcataaataccaaaaaacttagcgccagagatcatcagaaattggagcgcgaggcccgaatatgccgactcctcaaacacccaaacattgtgcggcttcacgattcgatttccgaggagggccaccactacttgatcttcgacctggtcactggaggagagttgttcgaagacatcgtagcacgggagtattactcggaggctgacgcctctcattgtattcaacagatactcgaggccgtactgcattgccatcaaatgggtgtggtgcaccgcgatttgaaaccagaaaacctgttgctggcaagtaagctgaagggagctgctgtgaaactcgccgattttgggttggccatagaagtagagggggagcagcaggcttggtttggcttcgccggtaccccgggatacctcagtccggaggtcttacgaaaggatccatacggaaaacccgtcgatttgtgggcttgcggtgtgatactctatatattgctcgtgggctatcctccattctgggatgaggaccagcatcgcctgtatcagcagatcaaggcaggcgcttatgatttcccctcccctgagtgggatactgtgacgccggaagccaaagatctcatcaacaagatgttgaccataaaccctagtaagcgaataactgcggcagaggccctgaaacatccttggattagtcataggagtacagtggcctcctgtatgcaccgccaagagacggttgactgcctcaagaaattcaatgcaaggaggaaactcaagggggctatcttaaccacaatgctcgctacccggaactttagcggtggtaagtcgggtggtaacaagaagtcagacggtgttaaagagtcatcagaatcaaccaacacgactatagaggacgaggatacaaaagttaggaagcaggaaataatcaaggtaacagagcagctcatcgaggctatttctaatggagattttgaatcctacacgaagatgtgcgatccaggcatgacagcattcgaacccgaggccctcggtaatctggttgaaggactggacttccatcgattttatttcgaaaacttgtggagcaggaatagcaagcccgtccacactaccatcttaaaccctcacatacacctgatgggcgacgagtccgcttgcattgcttatattaggatcacccagtatctcgacgcagggggaattccaaggacggcccagtctgaagaaaccagggtgtggcaccggcgagatgggaaatggcaaatcgtccactttcaccgctccggcgctcctagcgtgctgccacactag

SEQ ID NO: 216680 - DNA, 1470 bp, synthetic construct
  misc_feature 1..1470: note = Description of Artificial Sequence: Synthetic coding sequence
  source 1..1470: mol_type = other DNA
atggccaccattacgtgcacaaggtttacagaagagtaccagctttttgaggagttaggtaaaggggctttttctgttgtgcggcgatgtgtgaaagtactcgccggacaggaatacgctgccaagattattaataccaagaagctgtcagctagagaccaccaaaaattggagagggaggcacgaatctgccgtctgcttaagcatccgaatatcgtgcgtctgcacgactctatatctgaagaaggacaccattatctgatatttgacctcgtaaccggtggtgaactgttcgaggacattgtggcaagggagtattactctgaagccgatgcatcccactgcatccagcagatcctggaagcagtgctccactgtcatcaaatgggcgtggtgcacagggacctgaagccggagaatctcctgcttgcttctaaactgaaaggagccgcagtcaaactggctgatttcggactcgccattgaagtggagggagagcagcaggcttggttcggcttcgcaggaactcccggatacctgtcgcccgaggttttgcggaaggacccgtatgggaaacccgttgatctgtgggcctgtggcgtgatcttatacatcctgctggtggggtatcctccgttttgggatgaagaccagcatcggctttaccagcagataaaagcaggggcatacgacttcccctccccagaatgggacacagtcactcccgaggcaaaagaccttataaacaagatgctcacgattaacccctccaagcggatcacagcggcagaggctctcaaacacccctggatcagccaccgtagcacagtggcctcatgtatgcaccggcaggagaccgtggactgcctgaaaaagttcaacgcgagacgcaagctgaagggagcgatattgactactatgcttgcaacgaggaacttctctggcggtaagtctggcggaaacaagaaatcagatggagtaaagaaaagaaagagtagcagctctgtgcagctgatggagagctcagagagtactaacacaacgattgaagacgaggacacaaaggtgcgcaagcaggaaataataaaagtgaccgagcagcttattgaagccatctcaaatggagatttcgaatcctatacaaaaatgtgcgacccaggcatgacagcttttgaacccgaagccctgggcaacttggtggagggcctggatttccaccgcttctatttcgagaacttatggtcgaggaatagcaaacccgtccacacaaccattctcaacccacacatccatctgatgggggacgagagcgcctgtatcgcttacataagaataacgcagtatctggacgccggagggattccgcgaacagcccagtcagaggaaacccgagtatggcatagacgcgatggaaaatggcagatcgtccacttccatcggtctggtgctccttcagtgctgcctcactag

SEQ ID NO: 216681 - DNA, 276 bp, synthetic construct
  misc_feature 1..276: note = Description of Artificial Sequence: Synthetic coding sequence
  source 1..276: mol_type = other DNA
atggcaaccattacttgtacacgattcaccgaagaataccagctctttgaggagttaggaaaaggcgcattttccgtggtgcgtcggtgcgtcaaagtactggctggacaggagtacgccgctaagataattaacacaaaaaagctgagtgccagggaccaccagaagctggagcgcgaagcaagaatttgccgcttgctcaagcaccctaacatcgttagactccatgactccatctcagaagagggacatcactacctaattttcgacctgtag

SEQ ID NO: 216682 - DNA, 1554 bp, synthetic construct
  misc_feature 1..1554: note = Description of Artificial Sequence: Synthetic coding sequence
  source 1..1554: mol_type = other DNA
atggccacaaccgtgacatgcacgcgattcaccgacgagtatcagctgtacgaagacattggaaaaggggcttttagtgtggtccgcagatgcgtgaagctttgtaccgggcacgagtacgctgccaagattatcaacaccaaaaagctgagtgctcgggatcatcaaaagctagagcgcgaagccagaatttgtcgtttactgaaacacagcaatatcgtgcggttgcacgactccatttctgaagaaggttttcactacttagtgtttgacctggttactgggggagaactgtttgaggacatcgttgccagggagtattactcggaagcagatgcctcacactgcatacagcagattcttgaagctgtcttgcactgccatcagatgggggttgttcatcgggatctgaaacccgaaaacttgctgttggccagtaagtgcaaaggtgccgcagtgaagctagcagattttggactagccattgaggtgcagggcgatcagcaggcttggttcggattcgccggtactcccggatacctgtcccctgaggtcctgcgtaaggaagcatacgggaaaccagttgacatttgggcctgcggagttatcctctatatactgctggtgggatacccccctttttgggatgaagatcagcacaagctgtatcagcagatcaaagccggagcttacgactttccgtcacctgagtgggataccgtgactcctgaggctaagaatctgataaaccagatgctgacaatcaatcccgcaaaaagaataaccgcccatgaagccctcaagcacccttgggtttgtcagagaagcactgtggcatccatgatgcataggcaggaaaccgtagagtgcttgaaaaaattcaacgcaaggagaaagttgaaaggcgctatcttgacaacgatgctggccactcggaacttctccgctaaaagcctgctcaacaagaaggctgacggtgtgaaacctcagactaattccacaaagaactcagcagcagcaacaagccccaaagggactctgccccctgccgctctggaaccacagaccactgtgatccacaacccagtagatggcattaaagagagtagtgactctgcaaacacaacgatagaagatgaagacgcaaaggccagaaagcaggagattatcaagacgacagaacagctgattgaagccgtgaataacggggactttgaggcctacgccaagatatgcgaccccggactgacatccttcgaacccgaggcccttgggaatctggtggagggaatggactttcacaggttctacttcgaaaacctcctagccaaaaattcaaagcctatccatactaccatcttgaatccacacgtacacgttatcggagaggatgctgcatgcatcgcttatatccgattaactcagtacatcgatgggcagggaaggcctcgcacaagccagtctgaagagaccagggtgtggcaccggagagatgggaaatggcagaatgtccacttccactgctccggcgcaccagtcgctccgctccagtag

SEQ ID NO: 216683 - DNA, 1350 bp, synthetic construct
  misc_feature 1..1350: note = Description of Artificial Sequence: Synthetic coding sequence
  source 1..1350: mol_type = other DNA
atggccaccacagttacatgcactagattcaccgatgagtaccaattgtacgaggatatcggcaagggcgcattctctgtcgtacgtaggtgcgtgaagctgtgcaccggacacgaatatgcggcaaaaatcataaataccaagaagctgtccgcccgagatcatcagaaactcgagcgcgaggcacggatttgcagactgcttaaacatagcaatattgtaagactgcacgactccatttccgaggagggatttcactatctggtcttcgaccttgtcactggtggagagctctttgaagacattgtggctagagaatactactccgaagctgatgcatcccactgtattcagcagatcctcgaagccgttctgcattgccatcaaatgggcgtggtgcacagagacctgaagcccgaaaatttgttattagcctccaaatgcaaaggtgccgctgtgaaactagcggattttggcctggcaattgaggttcaaggggaccagcaggcgtggtttggttttgcaggtactccaggatacttgtcacccgaagtcctgcgcaaagaggcctatggcaagccagtggatatatgggcatgtggagtcattctgtatatcttgctcgtgggctaccctcctttctgggacgaagaccagcacaagctgtaccaacagatcaaagctggcgcatacgactttccctctcctgaatgggacactgttaccccagaggccaagaatctcataaatcagatgctgacaattaacccagctaaacggatcaccgcccacgaagcactaaagcacccttgggtttgtcaacgctcaactgttgcgagtatgatgcaccgtcaagagaccgtcgagtgcctaaaaaaattcaatgcccgtaggaagctcaagggggctatccttacaaccatgttggctactagaaatttcagcgccagaaaacaagaaatcattaagacaactgagcagttgatagaggcagtaaataacggtgactttgaagcgtacgcgaagatttgcgaccctggtcttacctcctttgaaccagaggcactaggaaaccttgtcgaggggatggatttccacagattttatttcgagaatctgttggccaagaatagcaaaccgatacacaccacaatcttaaaccctcacgtgcatgtcattggggaggacgcagcctgcatcgcatacatccggctgacacagtacattgatggtcagggcaggccaagaacttcccaaagtgaggaaactcgggtttggcatagaagagatgggaaatggcagaacgtgcacttccattgctccggcgcacctgtcgccccacttcagtag

SEQ ID NO: 216684 - DNA, 1479 bp, synthetic construct
  misc_feature 1..1479: note = Description of Artificial Sequence: Synthetic coding sequence
  source 1..1479: mol_type = other DNA
atggcaaccactgttacatgcacaaggttcacagacgagtaccagctgtatgaggacattggaaaaggagcatttagtgtggtacgacggtgtgtgaagctttgtactggccacgagtatgccgcaaagataatcaatactaaaaagctgagtgcccgagatcaccagaaactcgaacgagaagccagaatttgcagactgctgaaacatagcaatatcgtgcgtctgcatgattccatttcagaggagggctttcattatctggtcttcgacttggtgaccgggggtgaactgttcgaagacatcgtagcccgagagtactactcagaagccgatgctagtcattgcattcaacagatacttgaggccgtgctgcattgtcatcaaatgggcgtggttcacagggacttaaagcccgaaaacttattgctggcctcaaaatgcaagggagcagctgtgaagctagccgactttggcctcgctatcgaggtacagggtgaccagcaggcatggtttggctttgccggaacacccggttatctatctcctgaggtgttgcgaaaagaggcctacggcaagcccgtggatatttgggcatgtggagtaattctctacatcctccttgtgggctatcctcccttttgggacgaggatcagcacaaactgtaccagcagattaaggccggagcttatgattttccatcccctgagtgggacactgtgacccctgaggcaaaaaaccttattaaccagatgctaaccatcaatcctgctaagcgaatcactgctcatgaggctctgaagcacccctgggtttgccagagatctaccgtcgcttctatgatgcacagacaggagacagttgagtgcctaaaaaaatttaacgccaggagaaagctgaaaggcgcaatcttgacgacgatgctggcaacacgcaatttctccgttgggcgtcaaaccacggcccctgccacaatgagtactgcagcgtcaggaaccacaatgggtcttgtcgaacaagccaagagtttactgaacaaaaaagcggacggagtcaaggagcctcagactacagttatccacaatcctgttgacggcatcaaggaaagctctgattccgccaataccaccattgaggacgaagacgccaaagcaagaaagcaggaaatcatcaaaacaactgaacagctcatcgaggccgtgaataacggagattttgaggcatacgctttctactttgagaatttgctggcgaagaacagcaagcccatccacacaacaatcctaaacccacacgtgcatgtgatcggagaggacgccgcttgtatcgcatacattcgtctgactcagtacatcgacggacagggtaggccaagaactagccagtccgaggaaaccagagtctggcacaggagagatggcaagtggcagaacgtgcattttcactgctcaggggctcctgtcgcccctctacagtag

SEQ ID NO: 216685 - DNA, 1629 bp, synthetic construct
  misc_feature 1..1629: note = Description of Artificial Sequence: Synthetic coding sequence
  source 1..1629: mol_type = other DNA
atggcgacgaccgtgacctgcacaagattcactgacgagtatcaattgtacgaagatattggaaaaggagctttttcagttgttaggagatgtgtgaagttatgcaccggtcacgagtacgcagccaaaatcatcaatacgaagaagctgagtgcacgcgatcatcagaaactagagcgagaggcaaggatttgcaggctgctaaaacattccaatatcgtacggttgcatgatagcatcagcgaagagggatttcattatcttgtgtttgacttggtgacaggcggtgaactgtttgaggatatcgtggcacgggaatattacagcgaggccgacgcctcccattgtatacaacagatcctcgaagcagtgctccactgccaccagatgggcgtagttcatcgcgatttgaagcctgagaacctgctcctcgcatcgaaatgcaagggcgctgcggtaaagctggccgactttgggctcgctatcgaggtgcaaggggaccagcaggcctggtttggcttcgcagggacacctggctatctgtcaccggaagtcctgaggaaagaggcctacggaaaacctgtggacatatgggcttgtggcgtcattttgtacattctcctggtcggctacccccctttctgggacgaagatcagcacaagctgtatcagcagattaaagccggagcctacgacttcccctctccggaatgggacacagttaccccagaggctaagaatctgataaatcagatgttgaccattaaccctgctaagcgcataacggcccatgaggcattaaaacatccctgggtctgccagaggtccaccgtggctagcatgatgcataggcaggagacggttgagtgtctgaaaaagtttaacgctcgacgcaaactgaagggcgctatcctgaccactatgcttgccacccgcaatttcagcgtcggccgtcaaactacagcacctgccaccatgtccactgccgctagtggaacaacgatggggcttgtggaacaagctaagagcctacttaataagaaagccgacggtgtgaagcctcagactaacagtaccaaaaacagtgccgctgcaaccagccccaaggggaccctgcccccagctgccctggaaccacaaacaactgtgatccataatcccgtagacggaattaaggagtctagcgacagcgctaatacgacaatcgaggacgaagacgctaaggccaggaagcaggagatcattaaaacaacggagcagctgatcgaagctgttaataatggggattttgaggcctacgccaagatctgtgacccaggcctgacctctttcgaacccgaggcactgggtaacctggtcgaagggatggactttcacagattttacttcgaaaacttgctggcaaagaactctaagccaattcatactactattttaaacccccacgttcacgtaatcggggaagacgccgcttgtatcgcttatattcggcttacccagtacattgacggccaagggaggcctagaaccagtcaaagtgaggagacacgggtttggcatcgccgagatggcaagtggcagaacgtccactttcattgctccggcgcaccagtagccccactccagtag

SEQ ID NO: 216686 - DNA, 1440 bp, synthetic construct
  misc_feature 1..1440: note = Description of Artificial Sequence: Synthetic coding sequence
  source 1..1440: mol_type = other DNA
atggctaccacagtgacttgtacgcggtttaccgacgagtatcagttgtatgaggacatcggcaagggggcatttagtgtggtacgaaggtgcgtgaagttgtgcaccggccacgaatacgccgcaaagatcattaacactaagaagctcagtgctagggaccatcaaaagctcgagagggaagctcgaatttgcagactgttgaaacactcaaatatcgttaggctccacgacagcattagtgaggagggttttcattacctggttttcgatcttgtgactggcggagaactgttcgaggacatcgtagctagggaatactacagcgaagcggatgcatctcattgtattcagcagattctagaggccgtattgcattgccaccagatgggagtcgtccaccgagatctcaagccggaaaacttacttctggcatccaagtgcaagggtgctgctgtgaagctggccgacttcgggttagccatcgaagtgcagggcgatcaacaggcctggttcggcttcgctggcacacctggatatctgtccccagaggtgctgaggaaggaagcctacggtaagccagtagatatctgggcatgcggagtcatcttgtatatcttgctggtagggtacccccctttttgggatgaagaccagcacaagctatatcaacaaatcaaagcaggggcttacgactttccatctccagaatgggataccgtgactcctgaggccaaaaacctgattaaccagatgctgacaattaatcccgcaaagcggattacagcacatgaagcccttaaacatccatgggtgtgccagcgctccacagtggccagcatgatgcatcgccaagaaacagtggaatgtctgaagaagtttaacgccagacgtaaactgaagggagccatcctgacaaccatgctcgccacccggaactttagcgcggcaaaatctttactgaataaaaaagccgacggcgtcaaggaatcttcagattctgcgaatactaccatcgaggacgaagacgccaaggcgaggaagcaggagatcatcaagacaaccgagcaactgatagaagcggttaataatggtgactttgaggcatacgcaaaaatttgtgaccccggactgacaagctttgagccagaagcactgggaaatcttgtggaaggaatggactttcatagattctattttgaaaatctgctcgctaagaacagcaagcctattcacacaacaattctcaaccctcacgtccacgtaatcggggaagacgcagcctgtatcgcctacattcgcctgactcagtacattgacggtcaaggccgaccacggacctcccagtctgaagaaacacgggtgtggcacagaagagatgggaaatggcagaatgtgcactttcactgctccggtgcgccagtagcacctctgcagtag

SEQ ID NO: 216687 - DNA, 1512 bp, synthetic construct
  misc_feature 1..1512: note = Description of Artificial Sequence: Synthetic coding sequence
  source 1..1512: mol_type = other DNA
atggctactacagttacctgcacaaggttcacagatgaatatcagctgtatgaggatatcggtaagggcgcattctcagtagtgcgaagatgtgttaagttatgcacaggccacgagtatgcagctaagattatcaataccaagaaactgagtgcgagggatcaccagaaattggagagggaagccagaatctgccgactgctgaaacacagtaacatcgtccgcttgcatgactctatttcagaagaggggttccactacctggtattcgacctggtgacaggcggtgaactgtttgaagacatagtagcccgagaatactactcagaggcggatgcctctcattgtattcagcagatacttgaagctgtgctccactgccatcagatgggagttgtgcatagagacttgaagcccgaaaatttgctcctggcctccaagtgtaagggtgctgcagtgaaactggctgacttcggcctggcgatcgaggtgcaaggtgaccagcaggcctggtttggatttgcaggcactcctggttatctctctccggaagtgctacgtaaagaagcctatggcaaaccggtcgatatttgggcatgcggggtgatcctgtatatccttctcgtgggttacccccctttttgggacgaggaccaacacaagctgtatcagcagatcaaagccggagcatacgacttcccctcccccgagtgggacaccgtcacgcctgaggccaagaacttgatcaaccagatgcttactattaaccctgctaaacgaattaccgcgcacgaggcactgaagcatccttgggtgtgtcagaggtcaactgttgcttctatgatgcatcggcaagaaacggtggaatgcctcaagaagtttaacgccaggagaaagctaaagggtgccatactgactactatgctggctaccagaaacttctccgctgccaaatcacttcttaataaaaaagccgatggggtaaagccccaaactaattctaccaagaacagtgcggctgctacttcacctaagggcaccctcccacccgctgcacttgaatcttctgattccgctaatacgacaatcgaggacgaagacgcaaaagccaggaagcaggagattatcaaaacaactgagcaactcattgaagccgtgaacaatggcgatttcgaggcctatgccaagatttgtgaccccggactgactagctttgagccggaagccctgggtaacttagtggaagggatggacttccacaggttttactttgagaacctgctcgccaagaacagcaaacctattcacacaacaattttgaacccacacgtacatgtgataggggaagacgccgcttgcatagcttacattcggttgacacaatacatcgatggccaaggccgtccgcgaaccagccagtctgaggagaccagggtctggcaccgtcgggatggtaagtggcaaaatgttcactttcattgttccggcgctcccgtggctcctctgcagtag

SEQ ID NO: 216688 - DNA, 1557 bp, synthetic construct
  misc_feature 1..1557: note = Description of Artificial Sequence: Synthetic coding sequence
  source 1..1557: mol_type = other DNA
atggcaacgacagttacctgcactcgctttacggacgaataccagttatatgaggacatcggaaagggtgcattcagtgttgtccgaaggtgcgtgaaattatgcacagggcatgaatatgccgctaagattattaacaccaagaaactcagcgctcgcgatcaccagaagctcgagcgagaagcccgtatttgtaggcttcttaaacacagcaatatcgttaggctgcacgactccatttccgaggaagggtttcattacctcgtttttgacttggtgaccggaggcgagctgtttgaggatattgtggccagggaatactacagcgaggctgatgcgtcccactgcatccagcagatcctggaggcggtgttgcattgtcaccagatgggagtggttcacagggacctgaaacctgaaaatctccttctggcgtctaagtgtaagggcgctgccgttaaattggccgattttggtcttgccattgaagtgcaaggtgatcagcaggcctggtttggctttgccggaacccccggttacctgtcccctgaagtcctgcggaaagaggcctacggtaagccggtggacatttgggcttgtggagtcattctgtatattttacttgttggctacccacctttctgggatgaggaccaacataaactgtatcagcaaattaaagccggagcgtatgatttcccctcccctgagtgggatactgtgacccccgaagccaaaaacttaatcaaccagatgttgactatcaatcccgctaagcgaattacggctcatgaggccctgaagcatccatgggtgtgccagcgttcaacagtggctagtatgatgcatagacaagaaactgtggaatgcttaaagaagtttaatgctcgtcgcaaactgaagggcgcaatattgacaaccatgctggcaacacgtaacttcagcgctgctaaatccttactgaataaaaaagccgacggcgtgaaacctcagactaactctacaaaaaatagcgccgcagccacatccccaaagggcaccctgccacctgctgctctggaaccacagactacagtgatacacaatccagttgacggtataaaggaatctagcgattcagcaaatacaacaatcgaggatgaggacgcgaaggctaggaaacaggagatcataaaaaccacagagcaactaatcgaggctgtgaacaacggagacttcgaggcctatgccaagatctgtgatccaggacttacatcttttgagcctgaggccctgggaaacctagtagaagggatggattttcaccggttttacttcgagaacctccttgcaaaaaactcaaaaccaattcacacgaccatattgaatcctcacgtgcacgtgattggtgaggacgcggcttgcatcgcctacattcggctcacccagtatatcgatggacaggggaggcctcggaccagtcagtccgaggagactcgcgtctggcatcgtcgggacggtaaatggcaaaatgtacattttcactgtagcggagccccagttgccccattgcagtag

SEQ ID NO: 216689 - DNA, 2001 bp, synthetic construct
  misc_feature 1..2001: note = Description of Artificial Sequence: Synthetic coding sequence
  source 1..2001: mol_type = other DNA
atggccacgaccgtgacgtgcactagattcactgatgagtaccagctgtatgaagatatcggaaaaggagcattttccgtggtccgacggtgcgtcaaactatgtacgggccacgaatatgcagccaagataattaataccaaaaaactctcggcgagggatcaccagaagttggaacgggaagcccgtatatgccgactgttgaagcacagcaacatagtccgcctccacgattctatttcagaggaagggttccattatctcgtgtttgacctcgtgaccggcggagagttatttgaggacattgtggctcgtgagtactactcagaggctgacgcgtcgcactgtatccaacagattcttgaggcagtgctgcattgtcaccagatgggggtggtacatagggacttgaagcccgaaaacctgttattagcgtcaaagtgcaagggcgctgctgtcaaactcgctgattttgggcttgctatcgaagtgcagggcgatcagcaggcctggttcggctttgctggaacgcctggatacttatcccctgaggttttgagaaaggaggcttatggaaaacctgttgatatctgggcttgtggcgttatattgtacatcctgctcgttggatatcccccattctgggacgaggatcagcataaattatatcagcagattaaagctggggcttatgacttccctagccccgagtgggataccgtaactcccgaggctaagaacctgatcaaccaaatgctcactatcaatccagccaagaggatcactgcgcacgaggcattgaaacacccttgggtttgtcagagaagtaccgttgcctctatgatgcacagacaagaaaccgtggagtgtctaaaaaaatttaatgccagaaggaagctcaaaggtgcaatcctgactaccatgctggccacccgtaacttctctgtgggccgtcagacaacggccccagcaaccatgtcaacggctgctagtggcacaaccatgggtctggtagagcaggcgaagagcctgttgaataagaaagccgatggggtgaaaccacagactaacagtacgaaaaactcagcagcggctacatccccaaagggtaccctccccccagcggctcttgagcctcaaaccaccgtaattcacaatccggtagatgggatcaaggaatcaagcgacagcgcaaacacgactattgaggatgaggacgctaaagctccccgagtccccgacatcctttctagtgtacgtagaggatcaggagcaccggaggcggagggcccacttccctgcccaagtcctgccccattctctcctcttcccgcaccatcgcctagaatctctgatattctgaactctgtgcgcaggggatccgggaccccggaggcagaaggccctctgtcagccggaccgccaccttgtttgtctccggctctcctgggtcccctttcgtccccatcgcccaggattagcgacatattaaatagtgtgcggcgtgggagcgggacccccgaggccgagggtccatcacccgtggggcctccgccttgtccaagccctacgatccctgggcctcttcctaccccctcaagaaaacaggagattattaagactactgagcaacttatagaggccgtcaacaatggcgactttgaagcatacgctaaaatctgtgatccagggctgacatcgtttgaaccagaggccctcggcaacctcgtcgaaggcatggatttccaccgcttttacttcgagaacttgctggccaaaaactccaagcccatccacacaacaatcctaaacccgcacgtgcacgtcataggggaagacgccgcttgtattgcatatataaggctaactcagtacatcgatgggcagggcaggcctaggacttcacagtctgaagaaacaagagtatggcatagaagggacggaaaatggcagaacgtgcattttcactgcagcggagcccctgtcgcgcctctccagtag

SEQ ID NO: 216690 - DNA, 1629 bp, synthetic construct
  misc_feature 1..1629: note = Description of Artificial Sequence: Synthetic coding sequence
  source 1..1629: mol_type = other DNA
atggccacaacagtcacatgcacacgctttactgacgagtatcagctctatgaggacatcggcaaaggagccttctccgttgtgaggcggtgtgtgaagctctgtacagggcacgagtacgctgctaagatcataaacactaagaaactcagcgcacgagaccaccagaagctagaacgtgaggccagaatttgtcggctccttaagcatagcaacatcgttagactacacgactccatcagtgaagagggcttccattacctagtgttcgacctggtgaccggcggtgagctcttcgaggacatcgtggctcgagagtattacagtgaggccgacgctagccattgtatccagcagattctagaagcagtgctgcactgccatcaaatgggcgtagtgcatcgggatctgaagcctgaaaatttactgctcgctagcaagtgcaaaggcgctgcagtgaagctcgcggactttgggcttgccattgaagtgcagggggatcagcaggcttggttcggcttcgcagggaccccgggatatctgagccccgaagtgctgagaaaggaggcttacgggaaacccgttgacatctgggcatgtggtgtgattctttatatcctgctggtgggttaccctccattctgggatgaggatcagcataagctgtaccagcagatcaaagctggggcatatgacttcccaagccccgagtgggacacagtaacccccgaagccaaaaacctcattaaccaaatgctgaccatcaatcctgccaaacggattacggctcatgaagcactcaagcatccatgggtctgccagcgaagtacagttgctagcatgatgcataggcaggaaactgtggagtgcctgaagaagttcaatgcgaggagaaagctgaagggggcaattctgaccacaatgctggctaccagaaactttagcgtaggcagacagactactgcaccagccaccatgtctaccgccgcatcagggacaacaatggggcttgtagaacaggccaagagcctcctcaacaaaaaggcggacggtgtcaaaccccaaaccaactcaactaaaaatagtgcggctgctacgtcacccaaaggaactctccctcctgcggcactggagccacagactacagtgattcataatccagtcgacggcattaaggagtcatctgacagcgcaaacaccaccatagaggacgaagatgccaaagcacgcaagcaagaaattattaagactacggagcagttgatcgaggctgtaaacaacggagattttgaggcgtatgctaaaatctgtgaccctggtctcacttcttttgaaccagaggcgttggggaaccttgtggagggcatggatttccataggttttacttcgagaacctcctcgccaaaaactcaaagcctatccacactaccattctgaatccccacgttcacgtcatcggggaggatgcagcatgcattgcatatattagactgacacaatatattgacggacaggggcgtcccagaacttcccagtctgaagagactcgcgtgtggcatcgccgagatggaaagtggcaaaacgtccactttcattgcagcggcgctcccgtggcccctcttcagtag

SEQ ID NO: 216691 - DNA, 1557 bp, synthetic construct
  misc_feature 1..1557: note = Description of Artificial Sequence: Synthetic coding sequence
  source 1..1557: mol_type = other DNA
atggctactaccgtaacgtgcacccggttcaccgatgagtatcaactttatgaggatattgggaagggtgccttttcagttgtccgaagatgcgtaaaactatgtaccgggcacgagtacgccgctaagatcattaatacaaagaagttgtcagcgagggatcatcagaagcttgagagagaagcgaggatttgtcgactcctaaagcatagcaacatcgtccgcctgcatgacagtatttcagaggaaggtttccactatctagtgttcgatctagtaactgggggagaactcttcgaagatattgtcgctcgcgaatactacagcgaagccgacgccagccattgcattcagcagattttggaggctgtccttcactgccatcagatgggggtcgtgcacagagatcttaagcctgaaaacctccttctcgcatcaaagtgcaagggtgccgctgttaagctggcagacttcggactagctatcgaggtgcagggtgaccagcaggcttggtttggttttgctggcacccccggatacttatcccctgaagtgctgaggaaagaggcatacggaaagccagtggatatttgggcatgcggagttatcctatacattctgttggtcggctatccaccattctgggatgaggatcagcataaactctatcagcaaatcaaagcaggagcctacgatttcccaagcccagagtgggacactgtcacacctgaagctaagaatctcattaatcaaatgctgaccataaatccagccaagaggatcaccgcccacgaggctctgaaacatccttgggtgtgtcagcggtcaactgtcgcgtccatgatgcaccggcaggaaacagtggagtgtttaaagaagttcaatgccaggcgcaagttgaaaggcgctatcttaacaaccatgctcgctacaagaaattttagcgccgcaaagagcctcctcaacaagaaagccgatggggtgaaaccacagacgaacagtactaaaaactctgctgccgctactagtcctaagggaacgcttccacctgccgctttggaacctcagactaccgtgatacataacccagtggatgggattaaagagagctcagactccgctaataccacgatcgaggatgaggacgcaaaagctagaaaacaagagattataaaaacaactgagcaacttatagaggcagtgaacaatggagatttcgaggcttatgctaagatttgcgatcccggtctgacatcctttgaacctgaagcattagggaacctggtagaggggatggattttcacagattttactttgagaatcttttggcaaaaaactccaagccaattcacaccaccatacttaatccccacgtgcacgtgattggagaggacgcagcctgtatagcttatatcagattaacccagtatatcgacggccaagggaggcctcgtacatctcaaagtgaggaaactagggtctggcataggagggacggaaaatggcagaacgtgcacttccactgctcaggcgctccggtggctcctttacagtag

SEQ ID NO: 216692 - DNA, 918 bp, synthetic construct
  misc_feature 1..918: note = Description of Artificial Sequence: Synthetic coding sequence
  source 1..918: mol_type = other DNA
atgggtgtcgtgcatagggacctgaagcccgaaaacctgctcctcgcatccaaatgcaagggagccgctgtgaaactggcagattttggcttggcgattgaagtgcagggtgaccagcaggcgtggttcggtttcgccggtacacctggttatctctctccagaggtgcttcgcaaggaagcttatggtaagccagtggacatctgggcttgtggagtgattctgtatattctgctcgtgggctatcccccattctgggatgaggatcagcataaactataccagcagatcaaggccggagcttacgattttccctcacccgaatgggacaccgttacccctgaagccaagaatttaatcaatcaaatgttgaccattaacccagccaagcggatcactgcccatgaagccctgaaacacccatgggtatgtcagcgttccactgtcgcctcaatgatgcatcgccaggagacagtggaatgcttgaagaaatttaatgcgaggaggaaactcaaaggagccatcttgacaaccatgctggcaacaaggaatttcagcgtcgggaggcagacaaccgccccagctacaatgagcaccgccgcttcgggcaccacgatgggattggtggagcaagccaaatccctgcttaacaagaaagctgatggcgtcaaaccccagaccaatagcaccaagaacagtgctgccgcaacttcacccaaagggaccttacctcccgctgcactggaaccccaaacaactgtgatccacaatccggtagatggcatcaaggagtcttccgacagcgcgaacactaccattgaggacgaggacgccaaagctcgaaagcaggagattattaagacaacggagcaattgatcgaggctgtgaataacggggatttcgaagcatatgcttag

SEQ ID NO: 216693 - DNA, 1437 bp, synthetic construct
  misc_feature 1..1437: note = Description of Artificial Sequence: Synthetic coding sequence
  source 1..1437: mol_type = other DNA
atggcttctacaacgacatgtacgcgtttcacagatgagtatcagctcttcgaggaattgggcaaaggagccttctcggtggttaggcgctgcatgaagataccaactggtcaggaatacgctgccaaaatcattaacacaaagaaactgagcgcccgtgatcatcagaaactggaacgagaggcgcgaatctgtcggctgctaaaacatcccaacatcgtccgattgcatgacagtatcagcgaggagggatttcattatttagtgttcgatctggttaccgggggagaactgtttgaggacatagtggcgcgtgaatattactcagaggccgacgcttcccactgtattcagcagatcttggagtccgtgaaccactgccacctaaatggtatcgtgcatagggatctgaagcccgaaaatcttcttctcgccagcaaatcgaagggtgcagccgtgaaattggcagacttcggcctggctatagaggttcagggcgatcagcaggcatggtttggtttcgctgggacaccaggctatctctcacctgaagtactgaggaaagacccctacgggaaacctgttgacatgtgggcctgcggtgttatactctatatcttgcttgttggctatccccctttctgggatgaggatcagcaccgtctttatcaacagatcaaagctggcgcttacgatttcccatcgccggaatgggacacagtgacaccggaggcaaaggacttgatcaataagatgctcaccatcaacccggctaagaggatcacagcctcagaggccttgaagcacccctggatctgccagaggtccaccgtagccagcatgatgcaccgacaggagaccgttgactgtctgaaaaagttcaatgcaagacgaaagttgaagggagcaattctcacaaccatgttagccactcgaaatttcagcgccgctaagagcctgcttaagaagccggacggagtcaaggagtcaaccgagagctccaatacaacaattgaagatgaggacgtgaaggcccgaaaacaggaaattataaaggtcaccgaacagctcattgaagccattaacaatggcgattttgaggcctacaccaaaatctgtgatcccggactcaccgcattcgaacccgaggccctgggcaacctggtggaagggatggattttcacaggttttatttcgagaacgcgttgtcgaagtccaacaaacccattcacactatcatcctcaatccgcacgtgcacctggtcggagatgatgcagcttgtatcgcatacatacgccttacacagtacatggatggtagcggcatgcccaagaccatgcaatccgaggaaactcgagtgtggcacaggagagatggcaaatggcagaacgtccatttccaccggagcggatcccctactgtgcccatcaaatag

SEQ ID NO: 216694 - DNA, 1500 bp, synthetic construct
  misc_feature 1..1500: note = Description of Artificial Sequence: Synthetic coding sequence
  source 1..1500: mol_type = other DNA
atggccagcactactacttgcacacgctttacagatgaatatcagcttttcgaagagctggggaaaggggctttcagcgtcgtaaggcgctgtatgaagatacctaccggacaagagtacgcagccaaaattatcaacacaaagaagctcagcgcgagagaccatcagaagttggagagggaggctagaatatgccggctgctgaagcacccgaatatcgtgaggctgcacgacagcatctctgaggaaggattccactacctagtctttgacctggtaacaggcggtgagctattcgaggatattgtggcaagagaatattactctgaggccgacgcttctcactgtattcagcaaatactcgaaagcgtaaaccattgccacttgaatgggatagtgcacagagacttaaagcccgagaacctactactggccagtaagagtaagggcgcagcagtgaagttagcagacttcggcctggctattgaggtccagggggatcagcaggcgtggtttgggttcgccggaacaccaggctacctcagccccgaggttctgaggaaggacccgtatggaaagccagtcgatatgtgggcttgtggtgtgattctgtatatcctgcttgtggggtatccccctttttgggatgaggaccagcatagactctaccagcagatcaaagccggagcttacgacttcccctcgccagaatgggacacagtgacgcctgaagccaaggacctgatcaataagatgctgactattaacccagctaagcgaatcactgcaagtgaggccctgaagcatccttggatttgccagcgctccactgtcgctagtatgatgcaccggcaggagacagtggattgcctcaaaaagttcaacgcgcgaagaaagttaaagggcgctattttgactacaatgctggctactaggaatttcagtgccgcaaagtcactcctgaaaaaacccgacggggtgaaagagtccacagaaagcagcaatacaacaatcgaggacgaagacgtgaaggctagaaagcaggaaataattaaggtcactgagcagctgattgaggcgattaacaacggcgatttcgaggcatacacgaagatctgcgatccaggcctgaccgctttcgaacccgaagcgctcgggaatttggttgaaggcatggactttcacagattttattttgaaaacgctttgagcaagtcgaacaagcctattcatacaataattctcaatccccatgtgcacctggttggagacgacgcggcatgcattgcttatatccggctgacccagtacatggatggatccggaatgccaaaaacgatgcaatcagaagaaacaagggtttggcaccggagggacggcaagtggcagaacgttcactttcatcgttctggctcccccacagtgcccatcaaacccccttgtatccctaacggcaaggagaacttctccggcggaacctctctgtggcaaaacatctag

SEQ ID NO: 216695 - DNA, 1437 bp, synthetic construct
  misc_feature 1..1437: note = Description of Artificial Sequence: Synthetic coding sequence
  source 1..1437: mol_type = other DNA
atggcctctacgacgacctgtacaagatttaccgacgaataccagctgttcgaggagctgggtaaaggcgctttcagcgttgtgagaaggtgcatgaagattccgaccggtcaggaatacgctgccaaaatcatcaatacaaaaaaactcagtgcccgagatcaccagaagctggagagagaggccagaatctgccgtcttctcaagcaccccaatatcgtaaggctacacgatagcatctccgaagagggttttcactacctggtatttgatcttgtgaccggtggtgagttgttcgaagatatcgtcgcgagggagtactattcagaagccgatgcaagccattgtatacaacagatccttgagagtgtcaaccattgtcatttgaatgggatagtgcacagagatttgaaacccgagaatcttcttctggcaagtaaaagcaaaggagccgcagtcaaactggccgatttcggcttggctatcgaggtccagggggaccagcaggcgtggttcggtttcgccggtaccccaggatacctgtctcccgaggtcctacggaaagacccttacgggaaaccagtcgacatgtgggcgtgtggagtaatcctgtacatcttactagttggatatccgccattttgggacgaggaccagcatcgactgtaccagcaaataaaggccggtgcttacgacttccccagtccggaatgggacactgtgacgccggaggccaaagacctaatcaacaagatgcttactatcaacccggctaagaggataacggccagtgaggccctgaagcacccatggatttgtcagaggtctaccgtggcgtcaatgatgcacaggcaagaaactgtggattgcctgaagaaatttaacgccagaagaaagctgaagggcgcaattctcaccaccatgctcgctaccaggaacttttcggccgcaaaatccctgcttaagaagcctgacggcgtgaaagaaagtactgagagcagtaataccaccattgaggatgaagacgtcaaggcccgaaaacaggaaatcatcaaagtcaccgaacagttgatagaagctatcaataacggggactttgaggcgtatacaaaaatctgtgatcctggactgactgcattcgaaccagaggccctgggcaatctggtagaggggatggatttccacaggttttattttgagaatgcgctttcgaaaagcaataaaccaattcacacgatcatcctcaaccctcacgtccacctggtcggcgatgatgcagcttgtatagcttatattcgtctgacacagtacatggacgggagtggtatgccaaaaaccatgcagagcgaagagacacgggtatggcatcgcagagatggcaaatggcagaacgtgcactttcacaggtccggatcacccaccgttcccatcaagtag

SEQ ID NO: 216696 - DNA, 1479 bp, synthetic construct
  misc_feature 1..1479: note = Description of Artificial Sequence: Synthetic coding sequence
  source 1..1479: mol_type = other DNA
atggccagcactaccacatgcactcggtttacggatgaataccagctgtttgaagagttgggtaaaggcgctttcagcgtggtccgcagatgcatgaaaattccaaccgggcaggaatatgccgcaaagatcattaacacgaaaaagctaagcgcacgggaccaccagaaactcgaaagggaagcgcgaatctgtcgcctgttaaaacacccaaacatcgttcgccttcacgactctatttcagaagaaggatttcattatctagtgttcgatctcgtgacagggggtgaattgtttgaagatattgtggccagggagtactacagcgaagctgatgcatctcattgcatacagcagattttggaaagcgtgaatcattgccacctcaacggcattgtgcacagggacctgaaaccggaaaacctgctgctggcttccaaatctaagggggcagcagtgaaactcgctgatttcggactggctatcgaagtccagggcgaccagcaggcctggtttggattcgccggaacacctggttatctcagccctgaggtgttgcggaaagacccctatggcaagcctgttgatatgtgggcctgcggggtgatattgtacatcctgctcgtgggttatcccccattttgggacgaggatcaacacagactgtaccagcaaattaaggctggtgcatatgactttccctcaccagaatgggataccgtcacccccgaagctaaagatcttataaataaaatgctgactatcaatccagcaaaacgcataaccgcttctgaagcactcaagcatccctggatttgccagagaagcacagttgcctctatgatgcatcggcaggagacagtggactgcctgaaaaagtttaatgccaggcgcaaactcaaaggtgcgattctgactacgatgctggctacaaggaattttagcgctgctaaatcactgttgaagaaacccgatggcgtgaaagagccacaaaccaccgtaatccacaacccggatggcaataaagaaagcacggagtcttcaaataccacaattgaggacgaggacgtgaaggctaggaagcaggagatcataaaagttactgaacagttgattgaggcgattaataatggtgacttcgaggcttatactaagatctgcgatccaggacttaccgcgttcgaacctgaagcgcttggaaatttagtcgaaggaatggatttccatcgcttttactttgaaaacgccctttcgaagtccaataagccaatacacaccatcatcctgaatccacacgtgcacctggtgggagacgacgccgcttgtattgcatatatccgcctgacccagtacatggacggctccgggatgccgaaaaccatgcagagcgaggagacgcgtgtctggcaccgtagagatggcaaatggcagaatgtgcactttcaccggagcggctctccaaccgttcctatcaagtag

SEQ ID NO: 216697 - DNA, 1533 bp, synthetic construct
  misc_feature 1..1533: note = Description of Artificial Sequence: Synthetic coding sequence
  source 1..1533: mol_type = other DNA
atggcaagcaccacgacttgtactaggttcaccgacgaataccagctgttcgaggaactgggcaaaggtgcattttctgtggtacggaggtgtatgaaaatccctaccggccaagagtatgctgcgaagatcatcaacactaagaagctgtccgcacgcgatcaccaaaagctggagcgcgaggccaggatttgtcgactgctgaagcaccccaatatcgttaggctgcacgatagcatcagcgaagagggttttcactatctcgtatttgatttagtcaccggtggtgaattattcgaggatattgtggcccgtgaatattactctgaggcagacgcctcgcactgcatccagcagatcctcgaatcagtgaaccactgccatcttaatggaattgtgcacagggatctgaaacccgagaacttactcttggcatccaagtccaaaggagcagccgtcaaattagctgattttggacttgccatcgaggttcaaggagatcaacaggcttggttcggcttcgccggaaccccaggctatctgtcacctgaagtgctgaggaaagacccctatgggaagcccgtggatatgtgggcctgtggggtcatcctgtacattctcctagttggttacccgcctttctgggacgaggaccagcatagactgtaccaacagattaaggctggggcatacgactttccgagccccgaatgggacactgtgaccccagaggccaaagacctgattaataagatgttgaccatcaatccggcaaaaagaataactgccagtgaagccctgaagcacccctggatttgtcagcggtcaacagttgcttccatgatgcatagacaggaaaccgtcgattgtctgaagaaatttaacgcaagacgaaagttaaagggtgctattttaaccacaatgcttgctactcgaaattttagcgccgcaaagagcctcctgaagaagcctgacggagttaaaaaaaggaagagtagtagctctgtgcagatgatggaaagcaccgaatccagtaacacaactatcgaagacgaagatgttaaagcgcgtaaacaggaaattattaaggtgacagagcagttaatcgaggctataaataacggtgactttgaagcttataccaagatttgtgatcccggactaactgcctttgagccagaggccctgggaaatcttgtggaaggcatggacttccacagattctactttgagaacgcgctcagcaaaagtaacaagcctatccatactattatcctcaatccacacgtgcatctggtgggagatgacgcagcctgtattgcatacattagactcacacagtacatggacggatccggaatgccgaagactatgcagtctgaagaaacccgtgtttggcatcggagggacggaaagtggcagaatgtgcatttccaccgctcagggagccccaccgtgccaatcaagccgccatgtattcccaatggaaaagagaacttctccggcggaaccagtttgtggcaaaatatctag

SEQ ID NO: 216698 - DNA, 1542 bp, synthetic construct
  misc_feature 1..1542: note = Description of Artificial Sequence: Synthetic coding sequence
  source 1..1542: mol_type = other DNA
atggcctctacaacgacctgtacccgcttcacagacgaatatcagctctttgaggagctcggtaaaggagcgttctcagttgtgcggaggtgtatgaaaatacccactggccaggagtacgcggcaaaaatcataaacaccaagaagttaagtgcccgagatcatcaaaagttagaacgggaagccagaatttgccgcttgctcaaacaccctaacattgtccggctccatgactctatcagcgaagaaggcttccactatcttgtgttcgatctggtgaccggaggagagctctttgaggatatcgttgccagggagtattatagcgaagcagacgcctcgcactgtatccaacagatactcgaatccgtcaatcattgccacttaaatgggatcgtccacagggacctgaagccagaaaacctgctcctggcgtccaagtcgaaaggtgctgccgtaaagctggccgatttcggcctcgcgattgaggttcagggagatcagcaagcatggtttggcttcgccggtaccccgggatacctgtcacccgaggtcctgaggaaggacccttatggcaagcccgtcgatatgtgggcctgtggcgtaatactttatatcttactggtgggatacccccctttttgggatgaggaccagcacagactgtatcagcagatcaaggctggggcttacgacttcccatccccagaatgggacaccgtaaccccggaggcaaaagatctaattaacaagatgctgacaataaatccggcaaaacggattacagcttctgaagccctgaagcatccctggatttgccagagaagcacagtggctagcatgatgcaccggcaagaaaccgtggactgcttaaaaaagtttaatgcacgccgtaaacttaaaggcgctattctcaccacaatgctggcaactcggaacttcagcgcagcaaagtcgctcctaaaaaagcctgatggagtcaaagagccacagacgacagtgattcacaatcctgatggtaacaaggaatccacggaatcatcaaataccaccatcgaggacgaagacgtaaaggctaggaagcaagagatcatcaaagtcacagaacagctcatagaagcgatcaacaacggcgacttcgaggcttatacaaagatctgcgatcccggactgactgcattcgaacctgaggccctgggaaatctcgtcgagggaatggatttccacaggttttatttcgaaaatgcgctgtcgaagagcaacaaacctatccatacaatcattctaaacccacatgtgcacctcgtgggcgatgacgccgcttgtatcgcatatattcgtttgacacaatatatggacggatctggcatgcccaagacaatgcagtctgaagagacacgggtgtggcacagacgggatgggaagtggcaaaacgtccattttcatcgcagcggctccccgacagtacccattaagccaccatgtattcccaacggaaaggagaatttcagcggagggacctctctgtggcagaacatctag

SEQ ID NO: 216699 - DNA, 1560 bp, synthetic construct
  misc_feature 1..1560: note = Description of Artificial Sequence: Synthetic coding sequence
  source 1..1560: mol_type = other DNA
atggcttccacgaccacgtgcacacggttcacggatgagtatcagctgttcgaagagttgggcaaaggcgcttttagcgtcgtgaggcgctgcatgaagattccaaccggccaggagtatgcagctaaaattatcaacactaaaaagctctccgccagggaccaccaaaaattagaacgagaggcaagaatttgccgacttctgaaacatccaaacatagtaaggttacatgactctatctccgaagagggctttcattatttagtctttgatttagtaaccggcggagaacttttcgaggacattgttgccagggaatactactcagaagcggatgcctcacactgcatccaacagattttggaaagcgtgaatcactgccacctcaacggtattgtccaccgcgacttgaaacctgagaacctgctgcttgcatcaaagtccaagggggctgccgtgaagttggcagacttcggactggccatcgaagtacagggtgaccagcaggcgtggttcggttttgcaggcactccaggctatctaagccccgaagtgcttcggaaggatccttacggcaagccggtggatatgtgggcatgcggagtgatactttatattttgctggtaggctacccaccgttctgggatgaggaccagcaccggctgtaccagcaaatcaaagctggggcttacgattttcccagtccggagtgggatactgtgaccccagaggcgaaggaccttattaataaaatgctgaccatcaacccagccaaaagaattaccgcgtctgaggccctgaagcacccgtggatatgtcagaggtctacagtggcatctatgatgcaccgtcaggagacagtagactgtctaaagaagtttaacgctaggcggaagttaaaaggggctatactcacaacaatgctggccaccaggaatttcagcgctgcgaaatcccttctgaaaaagcctgatggtgtgaagattaacaataaagcgaatgtggttacaagccccaaggaaaatattcccacacccgctttggaaagtactgagtcttcgaacaccaccatcgaggacgaggacgtaaaggcgaggaagcaagagattattaaggtgaccgagcagcttattgaagctattaacaacggtgacttcgaagcctatacaaagatatgcgacccaggactgactgcatttgaaccagaggcgctaggaaacctggtggagggaatggatttccaccgcttttattttgaaaacgccctgtcaaaatccaacaagcctatacatacaataattctaaatcctcacgtgcatctcgtcggcgacgacgcggcatgcattgcttacatcaggttaacgcagtatatggacggtagcggcatgccaaagaccatgcagtcagaggagaccagggtgtggcaccgtcgagacggaaagtggcagaacgtgcactttcatcgaagcgggtctcctaccgtgcccatcaaacccccttgcattcccaacggaaaggagaatttctccggcggtacaagcctgtggcagaatatttag

SEQ ID NO: 216700 - DNA, 1575 bp, synthetic construct
  misc_feature 1..1575: note = Description of Artificial Sequence: Synthetic coding sequence
  source 1..1575: mol_type = other DNA
atggcctcgacgaccacctgcacgcggtttactgatgagtatcagttgttcgaggaactggggaaaggggctttttcagtggtgagaaggtgtatgaaaatccctaccggccaggagtacgcggctaagatcatcaatacaaaaaaactatccgccagggatcaccagaaactcgagcgcgaggccagaatttgtaggctgctgaagcacccgaatatcgtgcgcttgcacgattccatctccgaggaggggtttcactatctggtctttgacctggttactggaggggaactgtttgaggacattgttgcgagggaatactactctgaggctgatgcttcgcattgcattcaacagatactcgagagcgtcaatcactgtcacttgaatggcatcgtgcatcgggatcttaaaccagaaaacctgctgttagcttccaaaagcaagggcgcagctgtgaagttggctgactttggcttggctatcgaagtgcaaggggatcagcaggcgtggttcgggttcgccggtacacccggttatttatcgcccgaggtgctaaggaaggacccctacggaaaaccagtggacatgtgggcctgcggcgtgattctgtacatcctgcttgttgggtatccccctttctgggacgaagatcaacataggctgtatcagcaaatcaaggcaggtgcctatgattttccctctccagaatgggacacagttacgccagaggcgaaggacctgatcaataaaatgctgactattaacccagccaagcgcatcactgccagcgaggctcttaagcatccctggatttgccagaggagtactgtggctagtatgatgcatcggcaagaaaccgtagactgcctgaagaagttcaacgctcgccgaaagctgaagggcgcaatcctgacaacaatgctggctactcggaacttttctgctgccaaatccctccttaaaaagccagacggagtcaagaaacgaaaatctagtagcagtgtgcaaatgatggagcctcaaacgacagtcatccacaatccggacggaaataaagagtctacagaatcctctaacacaactatagaagacgaggacgttaaggcccgaaagcaagagatcatcaaggtgaccgaacaacttatagaagcaatcaataatggggattttgaggcctacaccaagatctgcgacccgggactcacagctttcgaacctgaggcgcttgggaatctggtcgagggcatggactttcataggttctatttcgagaacgccctgagcaagtcaaataaacccattcataccattatcctcaatccacatgtccatctggtcggagatgacgccgcatgtatcgcctacatacgactgacgcaatacatggatggaagtggcatgcccaagactatgcagagcgaagaaacccgagtctggcaccgaagggacggtaaatggcagaacgtacactttcataggagcggatctccaactgtgcctataaagccaccttgcatacccaacggcaaggaaaacttttcaggcggaacctctctctggcagaatatatag

SEQ ID NO: 216701 - DNA, 1470 bp, synthetic construct
  misc_feature 1..1470: note = Description of Artificial Sequence: Synthetic coding sequence
  source 1..1470: mol_type = other DNA
atggcttctaccaccacgtgcactcggttcacggacgagtatcagcttttcgaagagctggggaagggtgcatttagtgtggtgcggaggtgcatgaaaattcctactgggcaggaatatgctgcaaagatcataaacaccaaaaagctgagcgcaagagatcatcaaaaactcgaaagagaggcaagaatctgtagattattgaagcaccccaatatagttcggctgcatgactcaatttctgaggagggtttccattacctcgtgtttgatctggtgactggcggtgagttattcgaggatatagtcgccagggagtactacagcgaggcagacgcgtcccactgcatccaacagatactagagtctgtgaaccactgtcatctgaacggcatagtccaccgagatcttaaaccggagaatttactgcttgcaagcaaaagcaagggcgcagccgtgaagcttgccgattttggtctcgctatcgaggtgcagggcgatcagcaggcctggttcggattcgcaggcaccccagggtatctgtcacctgaggtcctgcggaaagacccctatgggaagcctgtcgatatgtgggcttgcggggtgatcttatatatcctcctggtgggatacccacctttctgggacgaagaccagcatagattgtaccagcagatcaaagccggagcctacgactttccatctcccgaatgggatacagttacaccggaggctaaagacttgattaataaaatgttaactatcaacccagccaagcgaattactgctagcgaagccctaaagcacccctggatctgccaaaggtcaactgtggcgagcatgatgcacaggcaggagaccgtggattgcctgaagaagttcaacgccagacgcaaacttaagggagccatcctgaccactatgcttgctacccgcaacttcagcgccgctaagtccctcctgaaaaaacccgatggagtcaaaaaaaggaaaagctcctcctcagtgcagatgatggagagcaccgaatctagtaacaccaccatcgaagacgaggacgtcaaagctaggaagcaagagatcatcaaagttaccgagcagctgattgaggctatcaataacggcgacttcgaggcctatactaagatctgcgatccagggctcaccgccttcgaaccagaggccttaggaaatctggttgaggggatggatttccatcggttttattttgagaatgccctgtcaaaatcaaataaacccattcacactatcatccttaacccccatgtacatcttgtcggcgatgacgctgcctgcatcgcttacataagactcactcagtatatggacggaagcgggatgcctaagaccatgcagagtgaggagacccgtgtgtggcaccgacgtgacggaaagtggcaaaatgtgcactttcaccggagcggcagccccaccgttcccattaaatag

SEQ ID NO: 216702 - DNA, 549 bp, synthetic construct
  misc_feature 1..549: note = Description of Artificial Sequence: Synthetic coding sequence
  source 1..549: mol_type = other DNA
tgacgcaaactcaagggtgcaattctcactaccatgctcgctaccagaaacttctctgccgctaaatctctgctaaaaaaaccagatggtgttaaggaatccacagaaagcagcaataccactattgaggatgaggacgtgaaagccaggaaacaggaaatcatcaaggtgactgaacagctgattgaggctattaacaatggggattttgaagcatacacaaagatttgtgatccaggcctcacggcgttcgagccagaggccctggggaacctggtggaagggatggatttccaccgattttattttgaaaacgctctgtcaaaatctaacaagccaatccacactattatcctgaaccctcacgttcacctggtgggcgatgacgctgcatgtattgcctacataaggctcacacagtacatggatggctcaggcatgcctaaaaccatgcaatccgaggaaactcgcgtgtggcacagacgcgatgggaagtggcagaatgtacactttcatcgtagcggtagcccaacggtacctatcaaatag

SEQ ID NO: 216703 - DNA, 1437 bp, synthetic construct
  misc_feature 1..1437: note = Description of Artificial Sequence: Synthetic coding sequence
  source 1..1437: mol_type = other DNA
atggctagcaccacaacgtgcactaggtttaccgatgagtaccaactattcgaggaattagggaagggagccttttccgtggttagacggtgtatgaagatacctacagggcaagagtacgccgcaaagatcatcaatactaaaaaactctcagcaagagaccaccagaagctcgaacgcgaggccaggatctgtcggttattaaaacacccgaacatcgttcgcctccatgacagcatctcagaggaaggatttcactatctcgtgttcgacctggtgacaggaggagaactgtttgaagacatcgtcgcacgggaatattattccgaagctgacgcatctcattgcatacagcagatcttggaatctgtgaaccactgtcaccttaatggaatagtccatagagatctcaaaccagaaaatttactgctggcctcaaaatccaagggagcagccgtgaagctggcagacttcggcctagctattgaagtccagggcgaccagcaggcttggttcggctttgccggaacaccgggatatcttagccccgaggtcttacgtaaggacccatacgggaaacctgtcgatatgtgggcctgcggagtcatcctgtatatattattggtagggtatcctcctttctgggacgaggaccagcaccgactgtaccaacagataaaagctggggcttacgacttccctagtccagagtgggataccgtgacaccagaggctaaggatctcatcaacaagatgctgacaataaaccccgctaagcgcatcacggcctccgaggccctcaaacatccatggatctgccagcgctcaacagtggccagcatgatgcaccgacaagagacggtagattgtctcaagaagttcaacgctcgaaggaagctgaagggcgctatccttacaacaatgctggcaacacgaaacttttcggctgcaaagtccttgttgaaaaagcccgacggcgtgaaagagagtactgagtcaagcaacactaccatagaagatgaggatgtcaaagctcgtaaacaggagatcatcaaagtgaccgagcagttgatcgaggctattaataacggcgacttcgaggcatacacaaagatctgcgatcccggtctgaccgcctttgagcccgaggcactgggcaatttggttgagggcatggactttcaccggttttactttgaaaacgccctgagtaagtccaataagccaatccataccatcattttgaacccccacgtgcacctggtcggggacgatgccgcttgtattgcctatataagattaacacagtacatggacggtagcggtatgccgaaaaccatgcagagtgaggaaaccagagtctggcatcgacgagatggaaaatggcaaaatgttcactttcatcgctccggcagtccaacagtgcctattaattag

SEQ ID NO: 216704 - DNA, 1590 bp, synthetic construct
  misc_feature 1..1590: note = Description of Artificial Sequence: Synthetic coding sequence
  source 1..1590: mol_type = other DNA
atggccaccaccgctacttgcaccagatttaccgacgactaccaacttttcgaggagctgggcaagggcgcattctctgttgtgcgtaggtgcgtgaaaaaaacctcgactcaagagtacgccgctaagattattaatactaaaaagttatcagccagagatcaccaaaaattggaaagggaggcccgtatctgcagactgctgaaacatcccaatatcgtgaggcttcatgactctatcagtgaagagggctttcactacttggtctttgacctggttacaggaggagaactgtttgaggatattgtggctcgcgaatactacagtgaggcagacgcctcgcactgtatccaccaaattctcgaaagtgtcaatcatatccatcagcatgatattgtgcacagagatctcaaacctgaaaatctgctcctggctagcaagtgcaagggtgccgcagtcaagctagcagactttggactggccatagaggtgcaaggtgaacagcaagcctggtttgggttcgcgggaacccccggataccttagcccagaagtgttgcgtaaggatccctatgggaaacctgtggacatttgggcatgtggggtgatcctctatatcctgctcgtgggctacccacccttctgggatgaagaccaacacaaattatatcagcaaattaaggccggagcatacgacttcccttccccagaatgggacacagtgacacccgaggctaaaaacttgataaatcagatgctaacaatcaatcctgcgaagcgcataaccgcggaccaggccttaaagcacccctgggtctgccagcgatcaacggtcgcttctatgatgcaccggcaagagactgttgagtgcttgcgcaaattcaatgccaggaggaagttgaagggagcaatccttacaacgatgctcgtgtccagaaatttttctgccgctaaaagcttgttaaataagaagtccgacgggggagtcaagaaacgcaagagtagttcgtccgtgcatctgatgccccagtctaacaataaaaacagcttggtgtccccggcacaagagcccgcaccccttcagaccgctatggaaccacagacaactgtggtgcacaacgcgaccgatggtatcaaaggttctaccgaatcatgcaacactaccactgaggatgaagacctgaaagtgaggaagcaggaaatcatcaagatcaccgagcagttgattgaagctatcaataacggggactttgaagcctacacgaaaatctgcgatccaggcttaacttctttcgaacccgaggccctgggcaatcttgtggaaggaatggactttcataagttttacttcgaaaacttactcagcaagaactcaaaaccgatacatactactattctgaaccctcacgtgcacgttatcggagaggatgccgcatgtatcgcctatatccggctcactcagtatattgacggtcaggggcgtcccagaacaagtcaatcggaggagactagggtgtggcatcgcagggacggaaagtggctcaatgtccattaccactgttccggggctcccgctgcaccattgcagtag

SEQ ID NO: 216705 - DNA, 1584 bp, synthetic construct
  misc_feature 1..1584: note = Description of Artificial Sequence: Synthetic coding sequence
  source 1..1584: mol_type = other DNA
atggccacaacagcgacctgcacacgctttactgatgactaccagttatttgaagagctgggtaagggcgcattcagcgtggtgcggaggtgcgttaagaaaacctccactcaggagtatgctgccaaaataataaacactaaaaagcttagtgcacgggatcatcagaagctagagagggaggctcggatctgtagactcctgaagcatcccaacatcgtccgcttacatgacagtattagtgaagaagggtttcattacttggtgtttgacctggtcaccggaggcgaattatttgaagatattgttgctagggagtactacagcgaggccgacgcgtcccactgtattcatcagattttggaatctgtgaatcacattcatcaacacgatattgtgcatagggatttgaaacccgagaacctgctgctcgcatccaagtgcaagggggcagcggtaaaactggctgacttcgggttagccatagaagtccagggagaacaacaggcttggttcgggtttgctggaacgccaggctaccttagccccgaggtactcaggaaggacccctacggcaaaccagtggacatttgggcgtgtggggttatattatatatccttctggtcggctatcctccattttgggatgaagaccagcacaagctgtaccagcagataaaagcgggagcgtatgactttccaagtccagagtgggacacggtcactcctgaggccaagaacctgatcaaccagatgttgactatcaacccagcaaagaggattacggcagaccaagcccttaagcacccctgggtgtgccagcgatccacagtggcaagcatgatgcacagacaagaaaccgtcgagtgcttgagaaagttcaacgctcggagaaaactgaaaggcgcaattcttacgactatgctggtttcccgcaacttctcagtgggaagacaaagctccgcccctgcctcacctgctgctagtgccgcaggcttagccggacaagcggcaaaaagcctcctgaataagaagtccgatgggggagtcaaaaaaagaaaaagtagtagctccgtgcatctaatggaaccacaaaccactgtcgtccacaatgccaccgacggcatcaaaggctcaacagaatcatgcaatacgactactgaggatgaagatctgaaagtgcgaaaacaggaaattattaagatcactgaacagttgatcgaggcaatcaacaatggggattttgaggcgtatactaaaatctgtgaccccggtttgacatcctttgaaccagaagctttgggtaatctggtcgagggaatggacttccataagttctacttcgaaaatctcttgtccaagaatagcaaacctattcatacaaccatcctgaaccctcacgtacacgtgattggtgaagacgccgcttgcatcgcctacatccggctgacccagtacatcgacggacagggcaggccccgaacttctcagagtgaggaaacccgcgtgtggcatagacgcgatggcaaatggctgaacgtgcactaccattgcagcggggctccagctgctccgttgcagtag

SEQ ID NO: 216706 - DNA, 1671 bp, synthetic construct
  misc_feature 1..1671: note = Description of Artificial Sequence: Synthetic coding sequence
  source 1..1671: mol_type = other DNA
atggcgactacagctacctgcacacggtttacagacgactatcaattgtttgaggaactgggcaaaggtgctttcagcgtcgtgcgcaggtgtgtgaagaagacctctacccaagagtacgcagcgaaaatcataaatacgaaaaaactctctgctcgagaccaccagaaattggagagggaggccagaatttgcagacttctcaagcatcctaacatcgttcgactgcatgactccatctcagaagagggcttccactacctcgtgttcgatttagttaccggaggagaactctttgaggacatagtggccagagaatactattccgaagccgatgcctcccactgtatacatcagatacttgagagcgtgaaccacatacaccagcacgacatagtgcaccgggaccttaagccggaaaatctactgcttgcctctaagtgtaagggcgcagctgtgaaactcgccgatttcgggctcgcaatcgaagtgcagggcgagcaacaggcctggtttggctttgccggaaccccaggctacctttctccagaggtgctgcgcaaagacccatacggaaaaccagtagatatctgggcatgcggtgtgatcctgtacatcctgctcgtcgggtatccacccttttgggatgaggatcagcataaactctatcagcagattaaagcaggcgcttatgacttcccttcgccggagtgggacacagtcacacccgaagccaaaaatttgatcaaccagatgttgacgatcaatccagccaagagaattactgcagaccaggctctgaaacacccttgggtatgtcagagaagcactgtggccagtatgatgcacagacaggaaacagtggaatgcctgcgaaaattcaatgcaagacgcaaattgaagggagccatattgactaccatgctggtgtcgagaaatttttcggcggctaaaagccttctcaacaaaaagtccgacgggggtgtgaagccccagtcaaacaataaaaactcattggttagccccgcacaggagcctgctccactccaaactgcaatggaaccccagaccaccgtcgtccataacgccaccgatggtatcaagggaagcacagaaagttgtaataccaccacagaagacgaagacctgaaagccgctcctcttcggacaggcaatggatcttctgttcctgagggcaggtcttccagagaccggacagccccatctgccggaatgcagcctcagcctagtctgtgctcctccgccatgcgcaagcaggagatcattaagatcacagaacagttaattgaagccatcaataatggcgacttcgaggcttatactaaaatctgcgatccaggactgacaagcttcgagcccgaggctctggggaatctcgtggagggtatggacttccacaaattctattttgaaaacctgttgtccaagaactccaagcctattcatactactatactgaatccccacgtgcacgtaattggtgaagatgccgcatgcatagcctacatccgcctcacacagtatatcgacggacagggcagacctcggacatctcagagtgaggaaacccgagtgtggcataggcgggacgggaagtggcttaacgtgcactaccattgcagcggcgcacctgcagctccactccagtag

SEQ ID NO: 216707 - DNA, 1488 bp, synthetic construct
  misc_feature 1..1488: note = Description of Artificial Sequence: Synthetic coding sequence
  source 1..1488: mol_type = other DNA
atggctacaactgcgacgtgcacgcgctttaccgatgactaccagctgtttgaggaattagggaagggcgcattttccgtcgtgaggaggtgcgtaaagaagacaagcacccaggaatacgcggctaaaataataaatacaaaaaagctgtccgcgagagatcaccagaagctagagagggaggccagaatctgcaggctgctgaagcacccaaacatcgttaggcttcacgattccattagtgaagagggattccactacctagtgttcgacctcgtcaccggaggcgagctgttcgaggacatcgtggccagagagtattactccgaagctgatgcctcccattgtatccaccagatcctggaatccgttaatcacatacatcagcatgatatcgtccacagagatctcaagcccgaaaacctgttacttgcatcaaaatgcaaaggtgctgctgtgaagctcgcagacttcggtctggcgatagaggtccaaggcgaacagcaagcatggtttggattcgcaggaacacccggatatctctcccctgaggttctccgaaaggacccttatggcaagcctgtggatatatgggcttgtggcgttatactttatatcctcctggtagggtaccctcctttttgggacgaagaccaacacaagctttaccagcagattaaggctggggcttacgacttccctagcccagaatgggacaccgtgacccccgaagcgaagaatcttatcaatcaaatgctaacaattaatcctgccaagaggatcacagccgatcaagcacttaagcatccctgggtttgtcagagatctacagtggcttccatgatgcacagacaggagactgtggaatgcctgagaaagttcaatgcacgaagaaagctgaagggtgcaatactgaccacaatgctagtaagtagaaacttttctgccgctaaatcacttctaaacaagaaatctgatgggggagttaaggagccgcagacaactgtggtgcataatgcaactgacggtataaagggatccaccgagtcatgcaacactaccaccgaggacgaggatttgaaggtgagaaaacaggaaattattaagattacggaacagcttattgaagccataaacaatggagactttgaagcttacacaaaaatttgtgatcctggcctgaccagcttcgagccagaagcgctggggaacctggtggaagggatggactttcacaaattctacttcgagaatttactgtctaagaacagcaaaccgatccacacgacaatcttaaatccccacgtgcacgtcattggcgaggatgctgcatgcattgcttatattaggttgacccagtacattgacgggcagggtcgtcctcgaacctcccagtccgaggagacgcgcgtctggcaccgcagagacgggaagtggctgaacgtgcactaccattgcagtggggctccggctgccccattacagtag

SEQ ID NO: 216708 - DNA, 1551 bp, synthetic construct
  misc_feature 1..1551: note = Description of Artificial Sequence: Synthetic coding sequence
  source 1..1551: mol_type = other DNA
atggccaccacggctacctgtacccgttttacggatgattatcaactgtttgaggaattgggcaagggagccttttcagtcgtccgtcgatgcgttaagaagactagtactcaggaatacgctgcgaagattatcaacacgaagaagctatccgctcgagatcatcagaaactggagcgggaagccagaatatgccggctgctgaagcacccaaatatcgtaagacttcatgattcgatctcggaagaaggctttcactatcttgtgttcgacttggtgacaggaggggagctctttgaggatatcgtggccagggagtactattctgaagcggacgcgtcccactgcattcatcagatcttagagtccgtgaatcacatccatcagcatgacatcgtccatcgggacctgaagcccgaaaatctgctgttggctagcaaatgtaaaggcgctgccgtgaaactcgccgacttcggacttgcaattgaggttcagggcgagcaacaagcttggttcggcttcgctggaacacctggatatctgtcgcccgaggtgctgcgcaaggatccttatggaaaacctgtggatatttgggcctgcggggttattctctatattcttctggtgggttacccacccttttgggatgaggaccagcacaagctgtatcagcagatcaaggcaggagcctatgatttccccagccctgagtgggacaccgttacacctgaggctaagaacttgattaaccagatgctgacaattaacccagcgaaaaggattactgccgatcaggctctgaagcatccttgggtttgtcagcgatccacggtcgcttctatgatgcatcggcaggaaaccgtagagtgtttgcgcaaatttaatgcaaggcgaaaacttaaaggagccatcttaacaacgatgctggtctccagaaactttagcgtcgggcgacagtcttcggcaccagcatctcccgctgcttctgcggctggtctggccggtcaggccgctaaaagtctgttgaacaagaagtccgatggcggagttaaggaaccacagactacagtggtccataatgccacagacggtattaagggtagtaccgagagctgtaatacgaccacagaagatgaagacttgaaggtccggaaacaagagattatcaagatcacggagcagctgatagaggccatcaataatggcgacttcgaggcctacactaaaatctgcgatccaggattgacatccttcgaacctgaggcactgggcaacctggttgaaggtatggatttccacaagttctatttcgagaatctgctctccaagaattctaaacccatccacaccactatcctgaatccacacgtgcatgtcatcggtgaagatgccgcatgtatcgcctacatcagactcacccagtacatcgatgggcaaggtcgccctcgaacatctcagtctgaagagacccgggtctggcatagaagggatgggaagtggctgaatgtccactaccactgttctggtgcgcctgccgcacccctccagtag

SEQ ID NO: 216709 - DNA, 1602 bp, synthetic construct
  misc_feature 1..1602: note = Description of Artificial Sequence: Synthetic coding sequence
  source 1..1602: mol_type = other DNA
atggcaacaaccgccacatgtacaagatttacagatgattaccagctcttcgaagagttgggcaagggcgctttctctgttgtgcggagatgtgtcaaaaagacatctacgcaggagtacgcagcaaaaattatcaatactaaaaaattgtcagcaagagaccaccagaagctggaaagggaggcccgtatctgcagactgcttaaacatcctaacatcgttagactccatgactcaatatccgaggaaggattccactatctggtatttgatctggtgacagggggtgagctgtttgaagacatcgtagcccgtgaatactacagtgaggccgatgccagccactgtatccaccaaatcttagagtcagtgaaccatatccaccaacacgatatcgtgcacagagatctgaagccagagaaccttttgttggcaagcaaatgtaaaggtgcagcagttaaactggctgattttggactggcaattgaggtccagggggagcagcaggcttggttcggtttcgccggaaccccaggctacctcagtcctgaagtcctcaggaaagacccgtacggaaaaccagtggacatatgggcctgcggggtaattctctatatcttgctggtgggctacccgcctttctgggacgaggaccagcacaaactataccagcagatcaaggccggagcttacgatttccccagcccggagtgggacaccgtgactccagaggcaaagaacctcattaatcaaatgcttaccatcaaccccgctaagaggatcacggccgatcaggctctcaaacatccgtgggtatgccagagatccaccgtggccagcatgatgcaccgccaggagactgttgaatgccttagaaaattcaacgcacgccgaaagttaaaaggagcaattctgacaaccatgctcgtgtcaaggaacttttccgcagccaaatcacttctgaataaaaagtctgatggcggtgtgaaagagccccagactacagtcgttcataatgccactgacggcatcaaagggtcgacagaatcttgtaatactacaactgaagacgaagatctcaaagctgcccctctgaggactgggaatggctcctctgtgccggaggggagatcctctcgagaccgcactgcgccatctgcgggtatgcaaccacagccaagcctgtgtagttcagcaatgagaaagcaagaaatcatcaagattacagagcagcttattgaggccattaataacggggactttgaagcatataccaagatctgtgacccaggactcactagctttgaacctgaggcgctcgggaacctggtggaaggtatggacttccacaaattttacttcgaaaatctgctgtctaaaaatagcaaaccaattcataccaccattttgaacccgcatgtgcacgtgattggggaagatgccgcatgcatcgcatacatccgcctcacccaatacattgacgggcaaggacggcctcggacatcacagtctgaagaaacacgggtgtggcacaggagagacggtaagtggctgaatgttcactatcactgcagcggcgcaccggctgctccgcttcaatag

SEQ ID NO: 216710 - DNA, 1677 bp, synthetic construct
  misc_feature 1..1677: note = Description of Artificial Sequence: Synthetic coding sequence
  source 1..1677: mol_type = other DNA
atggcaaccacagcaacttgcaccagattcactgatgattatcagctctttgaggagctaggcaagggagcgttctcagttgtgaggcgctgtgtcaagaaaacatcaacccaagaatacgcagccaaaattataaacaccaaaaaactgtcagcccgagaccatcagaagctcgaaagggaggccaggatttgcagactactgaaacaccccaatattgtgcggttgcacgattccatatctgaggagggtttccattacctcgtctttgacttggtgacaggcggagagttgtttgaagacattgtcgccagggaatattattcagaggctgatgcgagccattgcatccaccagatactggagtcagtgaaccacatccaccagcatgatattgtccatagagatctgaaacccgagaatctgctactggcttcgaagtgtaagggtgcagccgtcaaactagctgacttcgggctcgctatcgaagtacagggggagcagcaggcctggtttggcttcgctggaacacccggatacttatctcccgaggttctcaggaaggacccttacggcaaacctgtagatatctgggcctgtggggttatcctctacattctcctggttgggtatccccctttttgggacgaagaccagcacaaattgtaccagcaaatcaaagccggagcatacgattttcccagcccagaatgggacactgtgacacctgaggcaaagaacctgattaatcagatgctgacaataaatccagcaaagagaatcactgctgatcaggcactgaaacacccatgggtttgccagcggtccaccgtcgcatccatgatgcaccgtcaggaaaccgtcgaatgcctgagaaagtttaatgctcgcaggaagctgaaaggggcaattctgaccaccatgctggtgagtcgcaattttagcgctgccaagtccctgctgaataaaaaaagtgacggcggagtcaagaaacgaaaatctagcagcagcgtacacctgatgccacaatcaaataacaagaattctctggtttccccagctcaggaacccgctccactgcaaacagctatggaaccacaaaccaccgtggtgcacaacgcgacagatggcatcaaagggtctacagaaagctgcaacaccaccaccgaggacgaggacttgaaaggatcagtaccagaaggccgaagtagccgggaccggacagcaccgagcgcaggcatgcaaccccagccatcactgtgctcttcagcaatgcgtaaacaagaaatcattaaaattacagagcaattaatcgaagcaattaataatggtgacttcgaggcatataccaagatctgcgacccaggcctgacatccttcgaaccagaagcccttggcaacctggttgagggaatggactttcataaattttattttgaaaatttgctctcaaaaaattctaagccgatacacaccaccatccttaatcctcatgttcatgttatcggagaagatgccgcttgcattgcatacatccgtttaacacaatacatcgacgggcaggggaggcctcgcacttcccaaagcgaagagaccagggtgtggcaccgacgggacggaaaatggctgaacgtgcattatcactgttcaggggcacccgctgccccactccagtag

SEQ ID NO: 216711 - DNA, 1767 bp, synthetic construct
  misc_feature 1..1767: note = Description of Artificial Sequence: Synthetic coding sequence
  source 1..1767: mol_type = other DNA
atggccaccaccgccacatgtacacgctttaccgacgattaccaattgttcgaagaattgggtaaaggcgctttcagcgttgtgcgtagatgcgtgaagaaaaccagcacgcaagaatatgctgcaaagatcatcaataccaagaagctgtccgcgagggatcaccagaagctagagcgcgaggctagaatatgcagactcttaaagcatcccaacatcgtaaggttacatgacagtatcagtgaggaaggctttcactacttggtcttcgacttggttaccggcggtgaactcttcgaagatattgtggctcgcgaatactactctgaggccgacgccagccactgcatccatcagatcctggagtctgtcaaccatatccaccagcatgacatcgtgcacagggacttaaaacctgaaaatctactgctggccagcaaatgtaagggagcagcagtcaaactggccgactttggcctggccattgaagtccagggcgagcagcaggcctggtttggttttgccggtactccaggctatctctcccccgaggtgctgcgcaaggacccctatggtaaacccgtagatatatgggcctgtggtgtcattctgtacattctgctggtgggctaccctcccttttgggatgaagaccagcataaactttaccagcagataaaagctggggcatatgatttccccagccccgagtgggataccgtgacccctgaagcgaaaaaccttattaatcaaatgctcaccattaacccagcaaaacgtataaccgcagatcaggcattaaaacatccttgggtctgtcaacgatccacagtagcttctatgatgcacaggcaggaaaccgtggaatgcctccgaaaattcaacgctcggcgaaagctgaaaggggctatcttaactacaatgctggtgtcacggaatttttcggtcggccgtcagtcctcagcccctgctagtcccgctgcatccgcggctggactggccggacaagctgccaaatcactgctaaataagaagagcgacgggggtgtaaagaagagaaaatcctcctcaagcgtgcatctcatgccccagagcaacaacaaaaattctcttgtgagccccgctcaggagccagctcctctacagactgcgatggaaccccagaccaccgtcgttcacaacgcaaccgatggcatcaagggcagtacagaatcctgcaacaccacgaccgaggacgaagatcttaaggcggctcctctcagaaccggaaacgggtccagcgtgcctgagggcagaagctcccgggatagaaccgccccatcagctggcatgcagccgcaaccgagtctctgttcatctgctatgcgtaaacaggaaatcatcaaaataacagagcagctcatagaagccatcaataacggggattttgaggcatacactaaaatctgtgaccccggtctcactagtttcgagccagaggccctgggaaatctggtagaaggcatggactttcataaattctactttgagaaccttctgtctaaaaactcaaaaccaatccataccaccattctcaacccgcacgttcatgtcataggggaggacgcggcttgtatcgcctatattagacttacacaatatatcgacggacagggcagaccgaggactagccagtcggaggaaaccagagtctggcatcggcgtgacggcaagtggctaaatgttcactatcactgttcaggggcaccagcagcacctttacagtag

SEQ ID NO: 216712 - DNA, 1362 bp, synthetic construct
  misc_feature 1..1362: note = Description of Artificial Sequence: Synthetic coding sequence
  source 1..1362: mol_type = other DNA
cggctacttaagcaccctaatatcgtcagactgcacgatagcatctctgaggaggggtttcactacctggttttcgacctcgtcaccggcggtgagttgtttgaagatatagtggccagagaatattatagtgaggccgacgcctctcactgtatccaccagattctggaatccgtcaaccacattcatcaacatgacattgtccaccgggacttaaagccagagaaccttctgctggcctctaagtgtaagggcgcagccgtaaaactggctgattttgggttggctattgaggtgcagggggagcagcaggcctggttcggatttgccggaactccagggtatctctcccctgaggttctcaggaaggacccttacggaaaacccgtggacatttgggcctgcggcgtgatcctttacattttgttagtcggatacccgcctttctgggatgaggaccagcataaactgtatcagcagattaaagcgggagcttacgacttcccaagtcctgagtgggataccgtcacacctgaggccaaaaacctgatcaaccagatgttgactattaacccggctaaacgtatcaccgctgatcaggccctaaagcatccttgggtgtgtcagaggagcaccgttgcaagtatgatgcacaggcaggaaaccgtggagtgcctgcgtaagttcaacgcgcgaagaaagctgaagggtgccattctcaccaccatgttggtatcacgcaacttctctgccgctaaaagcctgctgaataagaaatcagatgggggagtaaagccccaaagcaacaataagaatagtctcgtgtcacccgctcaggagcccgcacccctgcaaacggcaatggaaccccagactacagttgtgcacaatgctactgacggaatcaaaggaagcactgaatcttgtaataccacaacagaagacgaagacctgaaggtgcgcaaacaagagatcattaaaatcaccgaacagctaattgaggcgattaacaacggggactttgaggcctacactaagatctgtgaccccggactgaccagctttgaacctgaagctctgggtaaccttgtcgaaggaatggattttcacaagttctattttgaaaacctgttaagtaagaattccaagccaatccacacaaccatcttaaatccccacgtacacgtgattggcgaggatgctgcttgtatcgcctatatcaggctcacccagtatatagacgggcagggcagacctcgcacttctcaaagtgaggagacgagggtatggcacaggcgggacggtaaatggctgaacgttcactaccattgcagcggtgcacccgctgctccattgcaatag

SEQ ID NO: 216713 - DNA, 1008 bp, synthetic construct
  misc_feature 1..1008: note = Description of Artificial Sequence: Synthetic coding sequence
  source 1..1008: mol_type = other DNA
tgatatcagcagatcaaggctggtgcctacgacttcccttcgcccgagtgggacaccgtgactccagaggctaagaatctcatcaaccagatgcttaccattaacccagctaaaaggataacggcagaccaggcgctaaaacatccatgggtgtgtcagagaagtacggtggcctccatgatgcacagacaggaaaccgtggaatgtctccggaaatttaatgctagacgaaagttaaaaggcgcaatcctcaccacgatgctcgtgagcagaaacttctcggccgcaaaatcacttctgaacaaaaaatccgacggcggtgtgaaaccccagagcaataataaaaactccctggtgtccccagcccaagaaccggcaccactgcagactgccatggagcctcagactacggtggtccacaatgccaccgatggtataaagggttctactgaatcttgtaacaccacaaccgaggatgaggatttaaaggctgcacccttgcgcacagggaatggcagcagtgtcccagaaggacgatcctcccgggacagaacagctccatccgcagggatgcaacctcaaccatccctttgttcttcggcaatgcgaaagcaagaaattattaagattacagagcagttgatagaggctatcaataatggagactttgaagcttacactaagatctgtgacccaggtttaactagcttcgagcccgaagccctgggtaatctcgtggaaggcatggactttcataaattttatttcgagaacctgttgagcaagaattctaagcccattcatactacaattctcaatcctcacgtgcacgtcataggtgaagacgctgcctgcatcgcctacattcggttgacgcaatacatcgacggtcaaggcaggccacgcaccagtcagagcgaggaaactcgcgtttggcacaggcgggacggaaaatggctcaacgtgcattaccactgctccggcgcacccgctgcgcctctgcagtag

SEQ ID NO: 216714 - DNA, 543 bp, synthetic construct
  misc_feature 1..543: note = Description of Artificial Sequence: Synthetic coding sequence
  source 1..543: mol_type = other DNA
atggctacaaccgcaacctgcacacgatttacggacgattaccaacttttcgaagaattagggaagggcgcattttccgtggtgcgccgttgcgtgaagaagacctcaacccaggagtatgctgctaaaatcattaacaccaagaagctgtccgccagagatcaccaaaaacttgaacgggaagcaagaatatgtagactactcaaacacccaaacattgcgaccattcacggcggaatccacgatgctagctctggcgactgtggcgtttttgcccaagtgcagtgtcccgaaaaaaccgaaggctgtcacccccacgatcatgcttgtctccaggaactcctttcatgccagaagcccattgaacaggaggtgggctggcgttgtcaggcaactgagcagcagcagaagcagtcaaggaaaccttctccgagagcccgagccctggccgatggacatggagccaccaatcactgcggtacacagcggtaccgctgggaccagggtctgcacagggaactccagcatcatcaccggaggtag

SEQ ID NO: 216715 - DNA, 240 bp, synthetic construct
  misc_feature 1..240: note = Description of Artificial Sequence: Synthetic coding sequence
  source 1..240: mol_type = other DNA
atgagtgaaatcctgccgtatagcgaagataagatggggaggttcggcgctgatcccgagggtagcgacctttccttcagttgtcggctgcaagacactaattctttcttcgccggtaatcaggcaaaacggcctcccaaactcggccagatcggacgcgctaagagggtcgtgatcgaggacgaccggattgacgatgttctgaagggaatgggcgagaaaccacccagcggtgtctag

SEQ ID NO: 216716 - DNA, 1422 bp, synthetic construct
  misc_feature 1..1422: note = Description of Artificial Sequence: Synthetic coding sequence
  source 1..1422: mol_type = other DNA
atgttgaaggtcaccgtgcccagctgcagcgcatcttcttgctcttcagttacggcaagcgcagcccctgggactgcttccctggtaccggattactggattgatggctccaatcgagacgctttgtcagacttttttgaggttgagagcgaactggggaggggggctacatctatcgtgtaccggtgtaagcagaaagggacccagaaaccctatgctttgaaggtgctgaaaaaaactgtcgataagaaaattgtccgaactgaaatcggcgttctgcttcggctctcccaccccaacatcatcaaactgaaggaaattttcgaaaccccaactgagatctcacttgtgctggagcttgtaaccggaggggagctgtttgaccggatcgtggagaaggggtactactctgaacgcgatgctgccgacgctgtgaagcagatactagaggccgtagcgtacctccatgaaaacggcatcgtgcacagggatttgaaaccagaaaacttgctttacgcaactcccgcacccgatgccccactgaaaattgccgattttggactgagcaaaatagtggagcaccaggttctgatgaagacggtttgcggaactcctggatattgtgcccctgagatcttaagaggttgtgcttacggacctgaggttgatatgtggtccgttggtattattacttacattctcctgtgtggattcgaacccttctacgacgagagaggggaccagtttatgttccgtaggatcctgaattgtgaatattactttattagcccttggtgggatgaggttagtttgaacgctaaagatttggtgaggaaactgatcgtgttagatccaaagaagcggctgaccacctttcaggctcttcaacatccttgggtcactgggaaggccgctaacttcgtgcacatggacacggctcaaaaaaagcttcaggagttcaatgcaagaagaaagcttaaagccgcagtaaaggcggtggtggcaagttctcggctcggttcggctagttctagccacggcagcatccaggagagccacaaggccagccgggaccctagccccatacaggacggcaacgaggacatgaaggccattccagagggagagaagattcagggagacggagcccaggctgcagtcaaaggggctcaggctgagctcatgaaagtgcaggccttagaaaaagtcaagggtgctgatatcaacgcagaggaggcccctaaaatggtgccgaaagccgttgaggacggaataaaagtcgcagatctggagctggaagaaggactggcggaggagaaattgaagaccgtcgaagaagctgctgcaccgcgagagggacagggttcctctgcagtgggtttcgaagtgcctcaacaggacgtgatcttgccagagtattag

SEQ ID NO: 216717 - DNA, 429 bp, synthetic construct
  misc_feature 1..429: note = Description of Artificial Sequence: Synthetic coding sequence
  source 1..429: mol_type = other DNA
atgttgaaggtgactgtcccttcttgttctgcaagttcatgctcttctgtcacagcctccgccgcaccaggtactgcatccctggttccggattattggatcgacggctcaaacagagatgccctaagcgatttttttgaggtcgagtctgaactcggacgcggagccacttccatagtgtacaggtgtaaacagaaaggcacacagaaaccatatgccctgaaagttctgaagaagaccgttgacaagaaaatcgtccgaacagagataggagtcctgctgcgactgagccatcccaatatcattaagttgaaggaaatctttgaaacccctactgagatctccttagttcttgagttggtgaccgggggtgagctgttcgatagaatcgttgaaaaaggatactactcggagcgagatgccgcttag

SEQ ID NO: 216718 - DNA, 1422 bp, synthetic construct
  misc_feature 1..1422: note = Description of Artificial Sequence: Synthetic coding sequence
  source 1..1422: mol_type = other DNA
atgctgaaggtgacagtgccatcatgctcagcctcctcgtgcagttccgtgacagccagcgcagccccaggcaccgcttctcttgttcccgactactggatcgatggtagcaacagggatgccctgtctgacttcttcgaggtggaatcagagcttggccgaggggctaccagcatcgtataccggtgcaagcaaaagggcacccaaaagccatacgcactgaaagtcttaaagaagactgtcgacaagaaaatagtgcggaccgagattggagttttgttaaggttgtcccaccccaatattatcaagttgaaagagatcttcgaaaccccaacagagatctcactggtgctcgagcttgtgacgggcggagagctgtttgatcgtattgtggaaaaggggtactactctgagcgggatgctgccgacgccgttaagcagatccttgaagccgtagcgtaccttcacgagaatggcatcgtgcaccgagacctgaaacctgaaaatttgctctatgccacccctgcacccgatgccccacttaaaatcgctgactttggactctccaagatcgtggagcatcaggtgctaatgaaaaccgtttgtgggacacccggatattgcgcccctgaaatcttacgtggctgtgcctacggacctgaggtggacatgtggagcgtgggtataattacatatatcctcctgtgcgggtttgaacctttttatgacgaacgtggggaccagttcatgttcaggaggattctgaattgcgagtattatttcatcagtccttggtgggacgaagttagtttgaacgctaaggacctggtgagaaaactgatagtgctggacccgaaaaagcggttgactacattccaggctcttcagcacccctgggtgacaggcaaggccgcaaactttgtacatatggatactgctcagaagaagctccaagaatttaatgcacggaggaagctcaaggccgctgtgaaggctgttgttgcctcgagtcggttggggagtgcttctagcagtcacggaagcatacaggaatcccacaaggcctcaagggaccctagtccgattcaggatgggaatgaagacatgaaagctatcccggagggggaaaagatacagggcgatggtgcacaggccgctgtcaaaggcgcacaggctgagctgatgaaggttcaggctctggagaaagtaaagggagccgatattaatgcagaagaggctccaaagatggtcccgaaagcggtcgaagacggaattaaagtggcagacctggaacttgaagaaggacttgcagaagagaagctcaagaccgtagaggaggccgctgcaccacgggagggacagggtagttctgcggtagggttcgaggtaccccagcaggatgttattcttcctgagtactag

SEQ ID NO: 216719 - DNA, 2766 bp, synthetic construct
  misc_feature 1..2766: note = Description of Artificial Sequence: Synthetic coding sequence
  source 1..2766: mol_type = other DNA
atggccgacgacgacgtgctattcgaggatgtctacgagctgtgtgaagttatagggaagggaccattttcggtggtacgtcgctgcataaaccgcgaaactggccagcaattcgcagtgaagattgtggatgtcgccaagtttacatcctccccaggcctgtcaacagaagatttaaagcgggaagcctcaatttgccacatgctgaaacacccacacattgttgagttactggagacctactcatctgacggtatgctttatatggtgtttgaattcatggacggcgcagatctgtgtttcgagatcgtgaaaagggccgacgccggatttgtgtatagtgaggccgtagcctctcactacatgcgtcaaatcctcgaagcccttcgatactgccacgacaacaatatcattcaccgcgatgtaaagccgcattgcgtcctgctagcctcaaaggagaattcagcacccgtcaagctcggaggatttggggtggccatacagcttggggagagcggtctcgtcgctggcggaagagtcggcaccccacacttcatggcacccgaggtggtcaaacgggagccctatggcaaacccgtggacgtatggggctgcggagtcatcctattcatcctcctgagtgggtgtctgcctttttacggtactaaagagcggctttttgaaggaattattaaggggaaatacaaaatgaacccccgacagtggtcccatatcagtgagtctgcgaaagacctcgtgaggagaatgctgatgctggatcccgcagaacgcattaccgtttacgaagctctcaaccacccatggcttaaggagcgtgaccggtatgcctacaagatccatctgccagagactgtagaacagcttaggaaatttaatgcaagaaggaagctcaaaggcgcagtactggctgctgtcagctctcataaattcaattcattctatggcgatcctcccgaggaattgcccgattttagcgaggatcccacaagcagtgtgctactgattgtgtcacgtgcggtgagccaggttttagattccctggaggagatccatgcactcactgactgctccgaaaaggacctggattttctccatagtgtttttcaagaccagcatcttcacaccctgctggatctttatgacaagatcaacacaaagtcatccccgcagatccggaatcccccttccgacgcagtgcagcgcgcaaaggaggttctcgaggaaatctcctgttatcctgaaaataacgacgcaaaggagctcaaacgcatcttgacccagccccatttcatggctctgttgcagactcacgatgtggtggctcatgaagtctacagcgacgaggcactgcgggtgactcctccacccacttcaccttatctcaacggcgattctccagagtccgctaatggcgatatggacatggaaaatgtgacaagagtcaggctcgtccagtttcaaaagaacacagatgaaccaatgggaattaccctaaaaatgaacgagctgaatcactgtattgtcgcccgtattatgcacgggggaatgatccataggcagggcaccctgcacgtaggagacgagatccgggaaattaatggcatatctgttgctaatcaaactgtcgagcagctccaaaaaatgcttcgcgaaatgcgcggaagcatcaccttcaagattgtgccatcctacaggacacagtcatcatcttgtgagcgcgatagcccaagcactagtcgacagagcccagccaacgggcactcctccactaataattcggtaagcgatctcccatctaccacccagcccaaagggcgacaaatttacgttcgggcacagttcgagtacgaccctgcgaaagatgatctaatcccatgtaaagaagccggaattcgcttccgggtgggtgacattatccagatcattagcaaggacgaccacaattggtggcaaggcaaactcgaaaactctaagaatggaaccgccggactgatcccaagtcccgagctccaggagtggcgggtcgcttgtattgccatggagaagaccaagcaggaacagcaggcaagttgcacctggtttggtaaaaagaagaagcagtataaggataagtatttggccaagcacaatgctgacctggttacatacgaagaggttgtgaaacttcccgcatttaagaggaaaacactcgtgctgctgggtgcacacggtgttggcaggagacacatcaagaacactcttattacaaaacaccctgatcggttcgcctacccgatcccgcataccacaaggccacccaagaaggacgaagaaaatggcaaaaactactacttcgtcagccacgaccagatgatgcaggatatctctaacaatgaatatctcgagtacggttcccatgaggatgcgatgtacggaaccaagctggagaccattcgcaaaatccacgaacaggggttgattgctatcttggatgttgaacctcaggcattgaaagtgttgagaaccgcagagttcgcaccattcgtggtgttcattgccgcaccaacaatcacccccggtctgaatgaggatgagtccttacagcgtcttcagaaagagagtgatattcttcagagaacttatgcacattatttcgatctgactattattaacaacgagatcgacgagactatcagacatttagaggaagctgttgagctcgtgtgtactgcaccgcagtgggtccccgtgtcatgggtctactag

SEQ ID NO: 216720 - DNA, 2730 bp, synthetic construct
  misc_feature 1..2730: note = Description of Artificial Sequence: Synthetic coding sequence
  source 1..2730: mol_type = other DNA
atggctgacgacgacgtgctgttcgaagacgtttacgagctgtgtgaggtaattggaaaggggcctttttcggtggtgagacgctgtatcaatagagagacaggtcagcaattcgccgttaaaattgtggatgtggcaaagtttacctctagcccaggcttatcaacagaggatctgaagagggaggcctctatttgccacatgctcaagcacccccatatcgtggagttactggagacttattccagcgatggtatgctttacatggtgttcgaattcatggacggggctgacctctgcttcgaaatcgtcaagcgcgctgacgccggatttgtatattctgaggctgttgccagccattacatgcgccaaatcttagaagcattgagatattgccacgataataatataatccaccgcgacgtaaaacctcactgtgttctcttagcgtcgaaggagaactcggcccctgttaagttggggggattcggtgttgctatccagctgggagaatcaggcctggtggccggagggagggtaggcactccacacttcatggctcctgaggttgtcaaacgcgaaccttatgggaaaccggtggacgtatggggctgcggggtgatccttttcatcctcctgagcggctgtttgccgttctatggaaccaaggagcgcctctttgaaggtatcattaaaggtaagtataaaatgaacccaaggcagtggagccacataagtgaatctgctaaggatctcgtgcgccgtatgttaatgctagatcctgccgagcggattacagtgtacgaagcgctcaatcacccctggctcaaggaacgtgacagatatgcctataaaatacacctgccagaaacagtcgaacagctgcgcaagttcaatgccagaaggaaactgaaaggagccgtcctggccgctgtgagtagccacaaatttaactcgttctacggcgaccccccagaggaattgcctgatttctctgaggatcctacaagtagtgtccttctgattgtgtcacgcgcagtttcccaggtactggatagcttggaggaaatccatgctctgactgactgcagcgaaaaggatctcgatttcctgcacagtgtcttccaagaccagcatctgcatacactgttggatctctatgataaaatcaacacgaagtcctccccccaaatccgtaatcccccttctgatgctgtccagagagcaaaggaggttctcgaggagatctcatgctacccagaaaataacgatgctaaggaactgaagaggattctgacacagcctcacttcatggctctgctgcagactcacgacgtagttgctcacgaagtgtactccgacgaggccttgagagtcacaccccctcccacctcaccgtacttgaatggagactctcccgaaagcgccaatggcgatatggacatggagaacgtgactagagtccgactggtgcaattccagaaaaatacagacgagcccatgggcatcacgttgaaaatgaacgaactgaaccactgcatcgtcgcccgtataatgcacggcggaatgatccatcggcagggtacactgcacgtcggtgacgagatcagagaaataaacgggatctcagtcgctaaccagactgtggaacagctgcagaaaatgctgcgagagatgcggggatccattacatttaaaatcgttccaagctaccgtacccagtcctcctcctgcgaaagggatagtccctcgacgagtagacagagccctgccaatggtcatagctctacaaacaactcagtctcaatctacgttcgtgctcagtttgagtatgatccagctaaggacgatctcattccttgtaaggaggctggaatccggtttcgggtaggcgacatcatacagatcatctctaaggacgatcataactggtggcagggaaaactggaaaactccaaaaacgggacagcaggcctgattccctctccggaactgcaagaatggcgcgtagcctgcattgcaatggagaagacaaaacaagagcagcaggcctcctgcacatggtttgggaaaaagaagaagcagtacaaagacaaatacctggcaaagcataacgccgatctggttacatatgaagaggtggtgaagctgcctgcatttaagcggaagacccttgtgctgttaggggcacatggcgtgggacgacgccatattaaaaacacacttattacaaaacaccccgacaggttcgcataccctatcccgcataccactcgacccccaaaaaaggacgaggagaatgggaagaattattacttcgtgagccacgaccagatgatgcaagatatttcgaataatgagtacctggagtacggaagccatgaggacgccatgtacggaacaaaacttgagacaattcgtaaaattcatgaacaaggcctgatcgccatcctagatgtagagcctcaggccctgaaggtgctcagaacggccgaatttgcccctttcgtagtatttatcgcagcaccgacgatcacgcctggacttaatgaagacgagtcgctccagaggctccagaaagaatctgatatcttgcagaggacatacgcccactacttcgacctgaccatcattaataatgagatcgacgaaacgatccgccatctggaggaagctgtcgagctggtgtgtacagcaccccagtgggttccggtgagctgggtgtattag

SEQ ID NO: 216721 - DNA, 1773 bp, synthetic construct
  misc_feature 1..1773: note = Description of Artificial Sequence: Synthetic coding sequence
  source 1..1773: mol_type = other DNA
atggccgatgatgatgtgctgtttgaggacgtgtacgagctgtgtgaggtgatcggcaaaggacctttttctgtggtacggagatgcataaatcgggagacaggacagcagtttgcagtgaagatcgttgatgttgcgaagttcacatcaagccctggcctctccacggaagacctgaagcgcgaagcctctatctgtcatatgctgaagcacccccatattgtcgaactgcttgaaacttattcctctgatgggatgttatacatggtatttgagttcatggacggcgcagatttatgctttgaaattgtgaagagagcggatgcagggtttgtctatagcgaagccgtggcgagccactacatgagacagatattagaggcacttaggtactgccacgataataatattattcaccgtgacgttaagccccattgcgtgttgctggcaagcaaggagaacagcgcccctgtcaaactagggggatttggcgtggccatccagctgggagagtccggcctcgtggctggaggtcgagtgggcacaccccacttcatggcgcctgaagtcgtgaagcgggagccctatggcaaaccagtggacgtgtgggggtgcggcgtgatactgtttatattgctttcagggtgcctgcctttctacgggactaaggagaggctgtttgaaggaatcatcaaggggaaatataaaatgaatccgagacaatggagccacatatctgagtctgccaaggatctagtgcggaggatgttaatgctggaccccgctgaacgcatcaccgtatatgaggccctcaatcatccatggctcaaggagagggatcgctacgcttacaagattcacctgcccgaaactgtagaacagttacgtaagttcaacgccaggcgcaaactcaaaggtgccgtgcttgccgcagtttctagtcacaagttcaactccttctacggcgatcctccagaggaactgccagacttttctgaagaccctacttcgtcaggactgctggctgctgagagggccgttagtcaggttctggattctctggaggaaatccatgccctaactgactgctctgaaaaggatcttgatttccttcatagcgtgtttcaggaccagcacctgcacacattattagacttatacgataagatcaacactaaatcctcaccacagatcaggaatccaccatccgacgcagtccagcgtgcaaaggaagtgctggaagaaatcagttgttaccccgaaaataatgatgcaaaggagctgaaacggatcctgacacagccccacttcatggcactactgcaaactcacgacgttgttgcgcatgaggtgtactcagacgaggcactcagggtaactccaccaccgacttctccttatttgaatggagattctccggagtccgcaaatggcgacatggacatggaaaacgtcacacgggttcgcctcgtgcaattccagaaaaataccgatgagcctatgggcattacactgaagatgaatgagctcaatcactgcatcgtggccaggattatgcacgggggaatgatccacagacaggggaccctgcatgtaggcgatgagatcagagagatcaatgggataagcgtggccaatcaaactgtagaacagctgcagaagatgctgagagagatgagggggtcaattaccttcaaaatagtccctagttaccgcacacaatcatcctcttgcgaagtcatgacattgaccaatcaccctcatctgttgtag

SEQ ID NO: 216722 - DNA, 2730 bp, synthetic construct
  misc_feature 1..2730: note = Description of Artificial Sequence: Synthetic coding sequence
  source 1..2730: mol_type = other DNA
atggcggacgacgatgtgctattcgaagatgtgtatgagctgtgtgaggtgattggcaaggggccattctcagtagtcagacgatgtattaaccgggagactggccagcaattcgccgtgaagatagtagatgtggcaaagttcacttcaagtccaggactgtccaccgaggatttgaaacgggaagcctctatttgccatatgcttaagcatccccacatcgttgagttgctggagacttatagtagtgacgggatgctgtacatggtcttcgagttcatggacggagccgacctatgcttcgaaattgtcaagcgggctgatgcaggctttgtgtattccgaagccgtcgcaagccattatatgagacaaatactggaagccctgcggtactgccacgacaacaacatcattcatcgggatgttaagccacactgcgtgctgctcgcatcaaaagaaaatagtgccccagtaaagctgggcggatttggagttgctatacaactgggcgagagcggcttagtcgctggcggacgcgtggggacacctcattttatggcccctgaggttgtgaagcgggaaccttatggtaagcccgttgacgtgtggggatgtggagtgattctgtttattctcctaagcggctgcttacccttctatgggacgaaggaaaggctgtttgaaggcataataaaaggaaaatataagatgaacccacgccagtggtctcacatctccgaatccgccaaagacttagtgaggaggatgctgatgcttgatcccgctgagaggatcaccgtctatgaggctctgaatcatccttggctcaaagagcgagaccgctacgcatataaaattcatcttcccgaaaccgtggaacagctgagaaagttcaatgcccgtcgtaaacttaaaggagctgtactcgcagctgtctcatcacacaaattcaatagcttctacggcgatcccccagaggaattaccagattttagcgaggaccctacctcctccggcctgttggctgcggagagggcagtatcccaggtgctggattcacttgaagaaatccacgccctcaccgattgtagtgagaaggacctcgatttcctccattcagtgtttcaggatcagcatctgcataccctgctggacttatatgacaaaataaacaccaagtcaagccctcagatcaggaacccgccttccgacgccgtgcaaagggccaaggaggttttggaagaaatctcctgttaccccgaaaataatgacgcgaaagagctgaaacgcatcctgacccagccacatttcatggccctgctgcaaactcatgacgtggtggctcacgaggtgtactccgatgaagcattacgcgtaacgccccctccaacctctccctatctgaatggcgacagcccggaaagtgccaacggcgatatggacatggaaaatgttactcgggttcggttagtccagttccaaaagaacacggacgaacctatgggaataacactaaaaatgaacgagctcaaccactgcatagtcgcccgtatcatgcacggcggtatgattcacaggcaggggacgctgcacgtgggagatgagatccgggagataaacggaatcagtgtggctaatcaaactgttgaacagctgcagaagatgctgcgggagatgcgtgggtcaataacatttaagattgtaccatcttacagaacacagagtagcagctgcgaaagggattctcccagtacaagccggcaaagcccagcaaacggacactcttcaacgaataatagcgtgtccatttatgtgagagcccagttcgaatacgatcccgctaaggacgatctcataccctgtaaagaagctggtatccggttccgagtaggagacataattcaaatcatctccaaagatgaccacaactggtggcaaggaaagctggagaattcaaagaatggaaccgcaggactgattccctccccagagctgcaggaatggcgggtggcttgcatagccatggagaaaaccaagcaggagcagcaagcttcctgcacctggttcggaaaaaaaaaaaagcagtataaggataaatacttggctaagcacaatgcagacttagtgacctacgaagaggtggtcaaactaccggctttcaagagaaagaccctggttctgttgggcgcacacggagtcggacggagacatattaagaacacactgataaccaaacacccggatcgctttgcatatcccatcccacacacaacgagaccacctaaaaaggatgaagagaacggcaaaaattattatttcgtgtcccatgatcagatgatgcaggatatttccaacaacgagtatctggagtacggctctcatgaagacgctatgtacgggaccaagcttgaaaccataaggaagatacacgagcagggcttaatcgcgatactcgacgttgagccacaggccctgaaggtcttgagaacagctgagtttgctccattcgtcgtctttatcgctgcacctacaataacaccgggtctgaacgaggatgaatccctgcagcggctgcaaaaggagagcgacatacttcagcggacgtatgcccattatttcgacctcaccatcattaataatgagatagatgaaacaatccggcacttggaggaagccgtcgaacttgtgtgtacagcaccgcagtgggtaccagtgagttgggtgtactag

SEQ ID NO: 216723 - DNA, 2781 bp, synthetic construct
  misc_feature 1..2781: note = Description of Artificial Sequence: Synthetic coding sequence
  source 1..2781: mol_type = other DNA
atggcagatgacgatgtcttgttcgaggatgtgtatgagctctgtgaagtgatcggaaagggcccattctccgtcgtgcggcgttgcataaaccgggagacaggccagcaattcgccgtgaaaatagtggacgttgctaaattcacctcatcacctggcctctcaacagaggatctgaagcgggaggcctctatctgccacatgctgaaacatccccatattgtggagcttctggaaacctattcgtccgacggcatgctgtacatggttttcgaattcatggatggcgcagacctgtgtttcgaaattgttaaaagggcggatgccggattcgtgtactcggaggctgtggccagccactatatgcggcagatactggaagcacttcgctactgccacgataataacatcattcatcgggacgtcaaaccccactgcgtgctcctcgcctctaaggaaaattccgcgccagtgaaactgggtggctttggagtcgccatccagttgggggagtccggcctggtggctgggggacgtgttgggactcctcactttatggcacccgaggttgtaaagcgagaaccatatgggaaacccgttgatgtctgggggtgtggcgtcatcctgtttatcctcttgtcgggttgcctccccttttacgggacaaaggaaagactatttgagggtattatcaaggggaagtataagatgaaccccaggcagtggtctcacatttccgagagtgccaaagatctggttaggagaatgttgatgctggacccagctgagcgcataacggtttacgaggccttgaaccatccctggctcaaagaacgcgaccggtacgcctacaagatccatctcccagagactgtggagcaacttcgcaagttcaatgcgcgaaggaaactcaagggagctgtgcttgcagcggtttcaagccacaagtttaacagcttctacggagaccccccagaagaactgcccgacttcagcgaggacccaacgtccagcggtctgctcgctgccgaacgcgcagtgtcacaagttctggactcactcgaggagatccacgccttaaccgattgttcagaaaaagatctggattttctacacagtgtgttccaggaccagcacctccataccctcctggatctgtacgataagattaacaccaagagcagcccacagataagaaatcccccatccgacgctgtgcagcgggcaaaggaagtccttgaagagattagctgctatcccgaaaacaatgatgccaaagaactgaaacgaattcttactcagcctcatttcatggccctgctacagacccacgacgtagtagcacatgaggtgtactcagacgaagcacttcgggtcacacctcctcctacatccccttatctcaacggcgacagccctgaaagcgctaatggcgacatggacatggagaatgtgactcgtgttcgcctggtgcaatttcagaagaatacagatgaacccatgggcatcacactgaaaatgaacgagctcaatcactgcatcgttgcccgaatcatgcatggaggcatgatccatcgccaaggaacgctgcacgtgggcgatgaaatccgggagattaatggcataagcgtagccaatcagaccgtggaacagctgcagaagatgctgcgcgagatgcgcggaagcataacattcaaaattgtgccaagctaccgtacacagtcatcttcgtgcgagagggattctccctccacatccaggcaatcaccagcaaatggacattcttccacgaataatagtgtgtctgacttgccaagcacaacacagccaaagggacggcagatctatgtccgggctcaatttgagtatgatcccgcaaaagatgatctgattccttgtaaggaagctggcatcaggttccgggtgggggatatcatccagattatcagcaaggatgaccacaactggtggcagggcaagttagagaatagtaaaaacggtacagctggcctgattccgtcccccgagttgcaggaatggagggtagcttgcattgccatggaaaagactaagcaggaacagcaagctagttgcacgtggtttgggaagaagaaaaaacagtataaggataaatacttggctaagcacaacgcggtattcgatcagctcgacctcgtgacatatgaggaagtggtaaagcttcccgcattcaagcggaaaaccctagtgctgttgggagctcatggggtggggcgtcgccacatcaagaataccttgataaccaaacaccctgacagatttgcatacccaatcccccataccacccgccctccgaaaaaagacgaggagaacggaaaaaattactacttcgtaagtcacgaccaaatgatgcaggacatatccaataacgaataccttgagtatgggagtcatgaggatgcaatgtacggtaccaagctggaaacgatcagaaaaattcacgaacaggggctgatcgctattctcgatgttgaaccacaggctctcaaggttctccggactgctgaatttgctcccttcgtggtctttattgctgcacccacaataacacccggactcaatgaggacgagtctctgcaaaggctgcagaaagagagcgacatcctgcaacgtacttatgcccactacttcgacctcacgatcatcaataacgaaattgatgagaccattcgccacctagaggaggctgtagagctggtttgcacagccccacagtgggtgcctgtgtcgtgggtttactag

SEQ ID NO: 216724 - DNA, 2766 bp, synthetic construct
  misc_feature 1..2766: note = Description of Artificial Sequence: Synthetic coding sequence
  source 1..2766: mol_type = other DNA
atggccgacgatgacgtcctgttcgaggatgtttacgagctgtgcgaggtgatcggaaagggtcccttttctgttgttcggagatgcatcaaccgtgagaccggccagcaattcgccgtgaagattgtggacgtagccaaattcacctccagtcctggactgagcaccgaggacctgaagcgtgaagcctctatatgtcatatgctgaagcatccacacattgtcgaactgctggagacttattcctctgacgggatgctctatatggtgtttgagttcatggacggggcagatctatgcttcgaaattgtaaagagagccgatgcagggttcgtgtacagcgaagccgtggcttcccattatatgagacaaatcctggaagccctcagatactgccacgacaataatatcatccatcgagacgtgaagccgcactgtgtgctactggcaagcaaagaaaatagcgcccctgttaagctagggggtttcggtgtcgctattcagctgggcgaaagcgggctggttgctgggggacgggttgggactccacactttatggctcccgaagttgttaagcgggagccttacgggaaacctgtcgacgtttggggctgcggagtgatcctgttcattctccttagcggctgcttgccgttctacgggacaaaggaacggctctttgagggcattataaagggaaaatataaaatgaacccgcgtcagtggagccacatatcagagtctgccaaggacctcgtgcgtaggatgctgatgttagaccctgccgaaaggatcacggtctacgaggccctaaaccacccttggctcaaggaaagagatcgttatgcctacaaaatccatttacccgagaccgtcgaacagctgagaaagtttaacgctcggagaaaactgaagggcgcagttctcgctgccgtcagctcacacaagttcaacagtttttatggggaccctcccgaggaattgcccgacttctcggaagatcctacctcctccgggcttctagctgctgagcgcgctgtatcgcaggtactggactcactcgaagaaatacatgccttgacagattgctctgaaaaggaccttgacttcctgcactccgtctttcaagaccaacacctccacaccctgttggatctgtacgataaaatcaataccaaatcctctccacagattcgcaaccctccatcagatgcggtacaacgcgcaaaagaagtcctggaagaaatatcatgctatccagaaaataatgacgcaaaggagctgaaaagaatactcacccaaccccacttcatggccctgcttcagacccatgatgttgtggctcacgaggtgtactccgacgaagccctgagagtgacacccccacccaccagcccctatttgaatggcgacagtccagagtctgcaaacggggacatggacatggaaaacgttaccagggtcaggttggtgcagtttcagaagaacacagatgagccaatgggcattactctgaagatgaatgagctgaaccattgcatagtggctcgcatcatgcatgggggtatgattcataggcagggaactctccatgttggcgacgagatccgcgaaatcaatggaatatcagttgccaatcagaccgtggaacagcttcagaagatgctgagggagatgcgtggatctattaccttcaagattgttccatcctaccggacgcagtcctcatcgtgcgaacgagatagtccttctaccagccgacagagccctgctaacggtcactctagcaccaataacagtgtctccgatttgccgagcaccactcagcccaaaggaaggcagatttacgtcagagcccagtttgagtacgatcccgcaaaggacgaccttattccatgtaaagaagccggtatccgctttagggtgggcgacatcatccagatcattagcaaggatgatcataattggtggcaagggaaactggaaaactcgaagaatggtaccgcaggattgataccatcccccgagctccaagagtggcgggtcgcttgcatcgcaatggagaaaaccaaacaggaacagcaggcttcctgcacttggtttggcaaaaaaaaaaaacagtacaaagataagtatttggcgaaacacaacgccgacctagtgacctatgaggaagtggtaaagctgccggcttttaaacgtaaaacactggtcttgctgggcgcacacggggtgggaagaagacatataaagaatactcttatcaccaagcaccctgataggtttgcatatcccattccccacaccaccaggcctcctaagaaagacgaagaaaatgggaagaactattatttcgtgtctcatgaccagatgatgcaggatatctctaacaacgagtatctcgaatacgggtctcatgaagacgccatgtatggtacaaagctggaaacgattcgcaagatccatgaacagggcctgatagccatcttagacgtggagcctcaggcgctcaaggtcctgaggactgccgaattcgccccttttgtggtgttcatcgctgccccaaccatcacaccgggattaaacgaggacgagtcgctgcagcgcctccagaaggagtccgatatactccagcggacctatgcccactactttgacctgacaattatcaataacgaaattgatgaaacaatacgacacttggaggaggccgtggaacttgtgtgtacagcccctcagtgggttccggtgagctgggtgtattag

SEQ ID NO: 216725 - DNA, 1146 bp, synthetic construct
  misc_feature 1..1146: note = Description of Artificial Sequence: Synthetic coding sequence
  source 1..1146: mol_type = other DNA
gacgaaattagagaaatcaatggcatttctgtggcaaatcagacagttgaacagctgcaaaagatgctccgagaaatgcgcggatcaatcactttcaaaatcgtcccaagctacaggacacagtcgagttcatgtgagcgcgactccccctcgacctctcgacagtcaccagcaaacggccactcaagcacaaataactcagtgtctatttatgttagggctcagttcgagtacgatcccgctaaggatgaccttatcccttgtaaggaagccggtatcaggttcagggtgggtgacatcatccaaattataagcaaagatgatcacaactggtggcagggcaaactcgagaattcaaagaacgggactgctgggctgatcccctcccccgaattgcaggagtggagagtagcgtgtattgctatggagaagaccaagcaggagcagcaggcttcctgtacctggttcggcaagaagaaaaagcaatacaaggacaagtatctggctaagcacaacgccgtttttgaccagctggacctcgttacttacgaagaggtcgttaagctgcccgctttcaagcgcaaaacccttgtcctactgggtgctcatggagtgggcagaaggcatattaagaacacgctcatcacaaagcaccctgatcgttttgcatatcctatccctcacaccaccagaccaccaaaaaaagatgaggaaaatgggaagaattactactttgtgtcacacgatcagatgatgcaggatatcagtaataatgagtatcttgaatacggatcacacgaggatgctatgtacggtacaaaactggaaactattagaaagattcatgagcaaggccttattgccatcctcgacgtcgagccacaggcccttaaggtcttgcgcaccgctgagttcgccccatttgtggtgttcatagccgctcctactattacccctggcctgaatgaagatgagtctctgcagcgtctgcaaaaagaatctgatatccttcagcgtacctacgcccattactttgacctcacaatcatcaacaacgagatcgatgagacaatccgtcacctggaggaagcagtagaactcgtctgcaccgccccacagtgggtgccagtatcgtgggtttactag

SEQ ID NO: 216726 - DNA, 1557 bp, synthetic construct
  misc_feature 1..1557: note = Description of Artificial Sequence: Synthetic coding sequence
  source 1..1557: mol_type = other DNA
ttatatgacaagatcaacactaagagcagtccccaaatacggaatccaccaagcgatgccgtgcagcgtgccaaagaggtgctcgaggagatctcttgctacccggagaacaacgacgccaaggagctgaagagaattctgacgcagccccactttatggcactcctacagactcacgatgttgtcgcacacgaagtctattcagatgaagcgctgcgggtaacgcccccacccactagtccatatctgaacggtgattctcccgagtcagccaacggggacatggatatggaaaatgtgacaagagtcagactggtacaattccagaaaaataccgatgagccgatgggcataactttaaagatgaatgaactgaaccattgtattgtggccagaattatgcatggagggatgattcacagacagggaactttgcatgtgggcgacgaaatcagggaaattaacggtatctccgtggctaatcaaacggtggaacagcttcagaagatgctccgggaaatgagaggcagcatcacatttaagattgtcccttcttatcgaacccagagtagttcctgcgaggatctgccgagtacaactcagccaaaagggcgtcagatctacgttcgagcacagtttgaatacgatcccgcaaaagacgacctgattccgtgcaaggaagccggaatccgctttcgggtcggcgacattattcagataataagtaaggatgatcacaactggtggcagggcaagctcgagaattccaaaaatggcacggccggtttaataccttctcctgaactgcaggagtggagagtggcatgtatcgccatggagaaaaccaaacaggagcagcaggcatcctgcacgtggtttgggaagaagaaaaagcaatataaggataaatatctggctaaacataacgcggttttcgatcaactcgatcttgtcacttatgaggaggtggtgaagctaccagcatttaaacggaagacattggtgctgctgggagcgcatggcgtgggtagaagacacatcaagaacaccttgatcacaaagcacccagacagatttgcttaccctatcccccacacaactcgccctcctaagaaagatgaagagaacggtaagaactactatttcgtctcccacgatcagatgatgcaagatatctctaataacgaatacctggaatatggaagtcatgaggatgcaatgtatggtacaaagctcgagacaattcgcaagatacacgaacagggtctgatcgccattctcgacgtggagcctcaggccttgaaagtccttcggaccgcagaattcgcgccattcgtggtgttcattgcggcacctactatcacccctggtctgaacgaggatgagtccctacagcgccttcagaaagagagtgacatcctgcagagaacctacgcccattatttcgacttgaccataatcaacaacgaaattgatgagaccatccgccatctggaggaagccgtggaactggtttgtacggcgcctcagtgggtacctgtgagctgggtctattag

SEQ ID NO: 216727 - DNA, 2694 bp, synthetic construct
  misc_feature 1..2694: note = Description of Artificial Sequence: Synthetic coding sequence
  source 1..2694: mol_type = other DNA
atggccgacgacgacgttctcttcgaagacgtgtacgagttatgtgaggttatcgggaagggccctttcagtgtggtgcgcagatgcattaaccgggagactggacagcaatttgctgttaagatagtggacgttgccaagtttacttccagtccgggactctccacagaagatcttaaaagggaagcttccatttgtcacatgctcaaacatccccacattgtcgaacttctggaaacatacagttcggatggaatgttgtatatggttttcgagtttatggatggagctgacctgtgcttcgagatagtgaagagggccgatgcgggtttcgtttacagcgaggctgtagcatctcattatatgagacagatcctcgaggctttgagatattgccatgacaacaacattatccatagggacgtcaaaccacactgcgtcttactagccagcaaggagaactctgctccggtaaagttgggaggattcggtgtggccattcagctcggagagtcgggattagtcgccggtgggagagtggggacgcctcacttcatggcccctgaagtggtaaaaagagagccctacgggaaaccggttgacgtttggggctgcggcgtcattctcttcatccttctgtcagggtgtctgcccttttatggaacaaaggaacgactgttcgagggcatcatcaagggtaaatataagatgaaccctcgacagtggagtcacattagcgaatccgccaaggaccttgtccggcgaatgcttatgcttgatcctgccgagcgaatcacggtttacgaagcgttgaaccacccctggctcaaagaaagagatcggtacgcctacaagattcacctacccgagacggtggagcaactgcggaaatttaatgcaagaagaaagcttaagggggcagtgctggccgcagtcagtagtcacaaatttaattctttttacggagacccgccagaagaactgccagattttagcgaagacccaactagctcgggggcagtttctcaggtcctggacagtcttgaagagatacacgcactgactgactgtagtgaaaaggatttggatttcttgcatagcgtgtttcaggatcaacatctgcataccttactggacctgtatgacaaaattaacactaagtcttctccccagataaggaaccccccatccgacgcagtccagagagccaaagaggtgcttgaggaaattagctgttacccagaaaataatgacgcgaaggagttaaagagaatcttaactcaaccacatttcatggcactcctacaaacccacgacgtcgtcgcgcatgaagtgtacagtgacgaggcgctgcgggtcaccccaccaccgacaagtccctatctgaacggtgacagtccagagtccgccaatggggatatggacatggagaacgtcactcgagtgcggttggtgcagttccaaaaaaatacggatgagcccatggggattaccctgaagatgaacgagctgaaccactgcatcgtcgcaagaatcatgcacgggggaatgattcaccgacagggtactttacacgtaggcgacgagatccgggaaattaacggcatctccgtcgccaatcagacggttgagcagttgcagaagatgctgagggagatgcgcggttctattacatttaaaattgtgcccagctatcgcacccagagctctagctgcgaggacctcccgagtaccactcagcccaagggtaggcagatttacgtacgggcacagttcgagtacgacccagccaaggatgacctgataccttgcaaggaagccggtatccggtttcgtgttggtgacatcatccaaatcatctcaaaagacgatcacaactggtggcaggggaaattagagaattcaaaaaacggaaccgctggcctgatccctagccctgagctgcaggagtggagagtcgcctgcattgctatggagaaaacgaagcaagagcaacaagcttcttgtacctggtttggaaaaaagaaaaaacaatacaaggacaaatatctcgccaagcacaatgcagtgttcgaccagttagatcttgtcacatacgaggaggttgtgaagttgccggcatttaaacgaaaaacactggtgttgctcggtgcccatggcgtgggcaggaggcatatcaagaatactctgatcacaaagcatccagatcgttttgcctatcctataccacacaccactagaccacctaagaaggacgaagagaatggaaaaaactactattttgtctcccacgaccagatgatgcaggacatcagtaataatgagtacctggagtatgggtcacacgaggacgcaatgtacgggaccaagttggagacaatccgcaaaattcatgagcagggcctgatcgcaatcctggacgtcgagccgcaggcactcaaagtgctgagaacggcagaatttgcaccctttgttgtgtttattgccgcacctaccattacaccgggtttaaacgaggacgaatctcttcagagactgcagaaagagagcgacatattgcaacgaacgtacgcccactacttcgaccttaccatcatcaacaacgagattgacgaaacaatccgtcaccttgaagaagcagtcgaactggtctgcacagctccacagtgggtccccgtgagctgggtttactag

SEQ ID NO: 216728 - DNA, 2697 bp, synthetic construct
  misc_feature 1..2697: note = Description of Artificial Sequence: Synthetic coding sequence
  source 1..2697: mol_type = other DNA
atggcggacgacgacgtgctgtttgaggatgtgtacgagctctgtgaggttatcggcaagggtcccttcagtgtggtcaggcgatgtattaatcgagagacgggccaacaatttgctgttaaaattgtggacgttgccaagttcacttcatctccaggcctgagcacggaagatctgaagagagaggccagcatctgccatatgttaaagcatccacatatagttgagttgctcgagacctactcatcagatgggatgctgtatatggtcttcgagttcatggacggggctgatctctgttttgagatcgtgaagagagctgacgcgggatttgtctactccgaggccgtagcaagccactacatgcgccagatactagaggccttgcgctattgccatgataataacatcatccacagggacgtgaaacctcactgtgtcctgctagcgtcaaaagagaactcagcccctgtgaagctcggcggttttggggtggcgattcagctgggggagtctgggttggtggcaggcggacgggtggggacaccgcacttcatggctcctgaggtggtgaagagagaaccgtatggtaagccagtcgatgtgtggggctgcggtgtgatccttttcatcctgctcagtggctgcctgcctttttacgggacaaaagaacgccttttcgagggaattattaaaggcaagtacaagatgaaccccagacagtggtcgcacatcagtgagtctgcaaaagatctggtccgcaggatgctgatgctagacccagctgaacggatcaccgtgtatgaggcgctcaatcacccctggctaaaggaacgggataggtacgcctacaaaattcatctgcctgagacagtagagcagctgaggaagttcaacgccaggaggaagctgaagggggctgtgttggcagctgtttcctcccataaattcaattccttctacggggacccaccggaagaacttcccgacttcagcgaagatcctacctcctcagggctgctagccgcagaacgagcagtgtctcaagttctagattccttagaggaaatccatgctctgactgactgttctgagaaggatcttgatttcctgcatagcgtttttcaggaccagcatctccacacgctgctggacctatatgataagataaacacgaagtcatcaccacagattagaaacccaccgtcagatgcagtgcagcgtgccaaagaggtgttagaggagatttcatgctacccagagaataatgacgcaaaggaacttaaacgcatcctcacacagcctcactttatggccctgctgcagacccatgatgtggtggctcacgaagtttatagtgatgaggccctcagagtgacaccacctccaacttcaccatatctgaacggggatagtcccgagtccgccaatggcgatatggacatggagaacgtgacgcgggttcgtctggttcagttccagaaaaacaccgacgaacctatggggatcaccttgaaaatgaacgaacttaaccactgcatcgtagctaggattatgcacgggggaatgatacataggcaagggacattgcatgtgggggacgaaatccgggaaattaacggaatcagcgttgcaaatcagactgtcgagcagttgcagaagatgttgcgggagatgagaggctccattacattcaaaatcgtcccaagttacaggacacagtcttcgtcatgtgaagatttaccctcaaccacccagcctaaagggaggcagatctatgtgcgtgcgcagtttgaatacgaccccgctaaagatgacttgataccttgcaaagaagctggcatccgcttccgggtcggggacataatccaaataataagcaaggacgatcataattggtggcagggcaagctcgagaatagcaaaaacggcacggcaggtctgatcccctccccagagttacaggaatggcgggtggcttgcatcgcgatggagaagactaagcaggagcagcaggcaagttgtacttggttcggcaagaagaaaaagcagtataaggataagtacctcgctaagcataacgccgatctcgtgacctatgaagaggtagttaaactgccagcattcaagcgcaagactcttgtgctcctgggggcacatggagtgggtcgcagacacattaaaaatacattgattaccaaacatcccgaccgattcgcatacccaatacctcacacaacccggccacccaaaaaagatgaggaaaacggcaaaaactactactttgtgagccatgaccagatgatgcaggatatttccaacaacgagtacttagagtacgggtcccatgaggatgcaatgtacgggactaagctggaaacaatcaggaagattcacgagcagggcctgatcgccatcctggatgtggagccacaggcactgaaggtccttcgaacagccgagttcgctccgttcgtcgtgttcatcgctgcgccaacaattacaccaggcttgaacgaggatgaatcacttcaaaggcttcagaaggagagtgatatcctgcaaaggacttacgcccactactttgatctcaccataattaataacgagatcgatgagacaatccggcatttagaggaagcagtggagctggtgtgcacagcgcctcagtgggtgcccgtctcttgggtttactag

SEQ ID NO: 216729 - DNA, 3237 bp, synthetic construct
  misc_feature 1..3237: note = Description of Artificial Sequence: Synthetic coding sequence
  source 1..3237: mol_type = other DNA
atggcattttacagttgctgttgggttctcttggcactgacttggcacacatccgcatacggccctgatcaaagagcccagaagaaaggtgacattatcttgggtggactgttccctatccactttggggtagcagctaaagaccaggacctgaagtcgagacccgagtcagtggagtgtataagatataattttagaggattccgctggctgcaagccatgatcttcgctatcgaagagatcaactcatccccagcgttactgcccaacctgactctcggctatcggatcttcgatacctgtaataccgtatcgaaggctctggaagccacattgtccttcgtggcacaaaacaagattgactctctgaatctggatgaattttgtaactgctccgaacacatcccctcaactatcgcagtcgtgggggcaaccgggtcaggcgtgtccaccgcggtggctaacctgcttggactcttttatattcctcaggtgtcctacgcttccagcagcaggctgctgagcaacaagaatcagttcaagagcttcctccgaacaatccctaatgatgagcaccaggccacagccatggccgacataatcgaatactttcgttggaactgggtgggcaccatagctgctgatgatgattatggaaggccaggcatcgaaaagttccgagaggaggcagaggagcgcgacatatgcatcgacttcagcgagctcatcagccagtattcagatgaggaggaaattcagcacgtggtggaggtgattcagaatagtacggccaaggtcatcgtggttttctcctcggggccagatttggagcctctgatcaaagagatcgtcagacgcaatatcactggaaagatatggctggccagtgaggcttgggctagctccagcctcatcgccatgccccagtacttccacgtggtcggaggaaccatcgggttcgcacttaaagccggacagattcctggttttcgcgagttcctaaagaaagttcacccacggaaatccgtgcataatggctttgccaaagagttctgggaagagacgtttaactgtcatcttcaggaaggggcaaaaggcccattgccggtggacacatttttaagaggacatgaagagagcggggaccgctttagtaacagttcgacagcattcagaccgttgtgcaccggagatgagaatatatcaagcgtggaaacaccatatatcgactacacacatctgaggatttcgtacaacgtatatctggctgtgtattctattgcccatgcactccaagatatctacacatgtctcccgggaaggggactgttcactaacggctcctgtgcggacattaagaaggtggaagcctggcaggtgctgaagcatctccgtcacctcaacttcacaaacaatatgggcgagcaggtcacctttgatgaatgcggcgatcttgtgggcaattatagtatcattaactggcatctttcgcccgaggacggttccatcgtcttcaaagaagtcgggtattacaatgtttatgccaaaaaaggcgagaggttgtttatcaacgaagagaaaattctttggagcggcttcagcagagaggtgcccttttcgaattgttctagggattgtctagccggtacacgcaagggcatcatcgagggtgaacccacatgttgttttgaatgcgtcgaatgtccggacggcgagtattccgatgagactgacgcttctgcatgcaataagtgccctgatgacttctggagtaacgagaaccacacatcttgtatcgcaaaggaaattgagttcctctcctggactgagccgttcggtatcgctctgaccctgttcgcggttctgggaatttttttaacagcttttgtgctcggcgtgtttataaagttccggaacacacctattgtgaaggccaccaatcgcgaattatcttacctgctgctcttttctctcctatgttgcttctcatcatccctcttcttcattggggaaccccaggattggacttgtagactcagacaacctgccttcggaatctcgtttgtgctttgcatcagctgtattttagtcaaaacaaacagggtgctgctggttttcgaggccaaaatcccgacttcgtttcatcggaagtggtggggactaaatctccagttccttctggtgttcctctgcacattcatgcagattgtgatctgtgtgatctggttatatacagccccaccatcctcctaccgaaatcaggagctcgaagatgagatcatctttattacatgtcatgaaggcagcctgatggccctaggctttctgattggctatacctgccttctggctgccatctgtttctttttcgctttcaagtcccgcaaacttcctgaaaattttaacgaagccaagtttattaccttttccatgcttatcttttttattgtctggatatctttcattcctgcttacgcatccacctacggcaaattcgtctccgctgtcgaagtcatcgctatcctggctgcctcctttgggctgttggcctgcatatttttcaacaagatttacattatcttgtttaagccttccaggaataccattgaagaggtaagatgttctacggctgcccatgcttttaaagtggctgcaagggccaccctgagacgatctaatgtgagtcggaaacgcagttcctctttgggcggttccaccgggtctactcctagtagctctattagctcgaaatcgaactcggaagaccctttccctcaaccagagcgccaaaaacagcagcagcccctcgccctgacccagcaggagcagcagcagcagcctctaactctgcctcaacagcaacggagtcaacaacagcctagatgtaagcagaaagtcattttcggctccggcaccgttaccttcagcctgagttttgacgaaccgcaaaagaatgctatggctcatcggaacagcacacaccagaacagtctggaagcacagaaatcttcagacactctgacccgccacgagccgcttctgcctctgcagtgtggggagacagacctggacctcaccgtacaggagactggcctacagggccctgtgggtggagatcagagaccagaggtggaagacccagaagaactttctccagccctggtagtgtcctcttcccagtctttcgtgattagcggtggcggaagcaccgttacagagaacgtcgtgaatagttag

SEQ ID NO: 216730 - DNA, 3237 bp, synthetic construct
  misc_feature 1..3237: note = Description of Artificial Sequence: Synthetic coding sequence
  source 1..3237: mol_type = other DNA
atggcgttttactcatgttgttgggtgctcctggcgctgacctggcacacctccgcctacggtccagaccagagagcccagaagaagggggatatcatcctcggcggactgttcccgattcacttcggcgtcgcggcaaaagatcaggacctgaaatctagaccggaatctgtcgaatgtattcggtataacttccgaggctttaggtggctgcaggcgatgatctttgctattgaagagatcaacagctcacccgctctactgcccaacctgacattgggctaccggattttcgatacatgcaatactgtgagcaaagcgttggaagctactctgtcatttgtggcccaaaataaaatcgatagtctgaacttagacgaattctgcaattgctcagagcacattccaagcactattgccgtggttggggctactggaagcggagtgtctactgcagtggccaacctgctgggcctgttctacatccctcaggtctcttacgctagtagcagccgccttctttctaataaaaatcagttcaaaagctttctaaggaccattcccaatgacgagcatcaggctaccgcaatggcagatatcatcgaatattttaggtggaactgggttggaaccatcgctgcagacgacgactatggcaggccgggtatcgaaaaattccgcgaggaggcagaagagcgagatatttgcattgattttagcgaactgattagccagtatagcgatgaagaagagatacagcacgtggtcgaggtaattcaaaattctacagcaaaagtcatagtggtctttagctccggtcctgatttagaacccctgattaaggaaattgtccgccgaaacattactggtaagatttggctggcttcagaggcttgggcctcatcctccttgattgccatgccacagtatttccatgtggtcggcggaaccatcggcttcgctctcaaagcaggtcagatcccaggattcagagagttcctcaagaaggtgcacccccgaaaatccgtccataacgggttcgctaaagagttttgggaggagacttttaattgccatcttcaggagggagcgaaggggccactacccgtcgacactttcctgagaggccacgaggagagcggagatagattttccaactcaagcaccgccttccgcccactctgtaccggtgacgaaaatatcagcagcgtggagacaccatacattgattacacccatctgaggattagctacaacgtttatcttgcagtgtattccatcgctcacgctttgcaagatatttatacctgtctccctggccgaggcctctttaccaacggaagctgcgccgatatcaaaaaggttgaggcatggcaagtgctgaaacacctgaggcacttaaatttcactaataacatgggcgagcaagtcactttcgacgaatgtggcgacctagtaggaaattattcaatcataaactggcacctctcaccagaagacggtagtattgtgttcaaggaggtgggatactacaacgtgtatgccaagaaaggagaacgcctgttcatcaacgaggaaaagatcctctggtccgggttctctagggaggtaccatttagcaattgtagcagggactgccttgccggaacgcgtaagggtatcattgagggagaaccaacctgctgtttcgaatgtgtcgagtgtccagacggcgagtactctgatgaaaccgatgcatccgcctgtaataaatgccctgacgacttctggtctaatgagaaccacacgtcctgcatagccaaggaaattgaatttctttcctggactgaaccgtttggtattgccttgactctcttcgccgtgttgggcatttttcttactgcgtttgtgttgggagtgttcatcaaattcagaaatacccccattgtgaaagctaccaatcgtgaactgtcctatcttctgctgttctccctgttatgctgcttctcttcatcccttttcttcatcggggagcctcaggactggacatgcagattgcggcagcccgcttttgggattagcttcgtgctgtgtatcagctgtattctcgtgaaaacaaaccgggttctcctggtattcgaggctaagattccaacttcgttccacagaaagtggtggggtcttaatctgcagtttctgctggtctttctctgcacttttatgcaaatcgtaatatgcgtcatctggctgtatacagcacctccatcctcctatcggaatcaggaactggaggacgagatcatctttatcacctgtcacgaggggtctctgatggcactggggttcctcataggctacacgtgcctcctggccgctatctgctttttttttgctttcaagagtaggaagctgcccgaaaactttaacgaggccaaatttattacgtttagtatgctgatcttcttcattgtgtggatcagcttcatccctgcttacgcctccacctacggcaagttcgtctccgccgtcgaggtgatcgccatattggccgcaagcttcggcctgctggcgtgcatctttttcaataagatttatatcatcctgttcaaaccatcccggaatactatcgaggaggtgcggtgttccaccgccgctcatgctttcaaggtggccgctagagccacactgcggcgtagcaacgtcagtaggaagagaagtagttcgctgggaggttccacaggatctaccccatctagctcaatcagttctaagagcaattctgaagacccattcccccagccggagcgccagaagcagcagcagcccctcgcactgacacagcaagagcagcagcagcagcccctcaccctgccccagcaacagcgttctcagcaacagcctaggtgtaagcagaaggtgatcttcggctctggcacagtgaccttctcgctgagcttcgacgagcctcagaagaacgcaatggctcaccggaactcaacccaccagaattccctcgaggcccagaagtcttccgacacactgacacgacatgagccactcctacctctgcagtgtggggaaactgacctggacctgactgtacaggaaaccggactccaaggtcccgtcggcggtgaccaacgacctgaagtcgaagatcctgaagagctcagccctgccttggtcgtctcctcttctcaaagttttgtcattagtggaggaggatcaaccgtgacagagaacgtggtcaactcttag

SEQ ID NO: 216731 - DNA, 3267 bp, synthetic construct
  misc_feature 1..3267: note = Description of Artificial Sequence: Synthetic coding sequence
  source 1..3267: mol_type = other DNA
atggccttctattcctgttgctgggtgctcctcgcgttaacatggcacaccagcgcgtacggcccagatcagcgcgctcagaagaagggcgatattattctggggggactctttccgatacacttcggcgtggccgctaaggatcaggacctcaaaagtagacctgaatccgtagaatgtataaggtacaattttcggggtttcagatggctgcaagcgatgatcttcgccatcgaggaaatcaactcatcccccgctctcctgcctaatctcaccttggggtatcggatcttcgacacatgcaatactgtgagtaaagctttggaagcgacgctatcatttgtggcccagaataagattgattcattaaatctcgatgaattctgtaattgcagcgaacatataccctcaactatcgccgtagtaggggctacagggtctggagtctcaaccgctgtagcaaatttgttgggactcttctacataccccaggtctcctacgcttcttcctcaaggttgctgagcaataaaaatcagttcaaatctttccttcgcacaattccgaatgatgagcaccaggccaccgccatggccgatatcatagagtacttccgctggaattgggtcggcactatcgcagcagacgacgattacggtaggccaggaatcgagaagttccgcgaagaggccgaggaacgcgacatatgcatagacttcagcgaattgataagtcagtattcggacgaagaagagatccagcatgtagtagaagtgattcaaaacagtaccgcaaaggtgattgtggttttttcttctgggccagacttagagccactcatcaaggagattgttcggaggaacatcaccggcaagatctggctggcctctgaggcatgggccagctcatcccttatcgccatgccacaatacttccatgtcgtaggaggtaccatagggtttgctttgaaggcgggacagatcccaggcttccgagagttcttaaaaaaagtccatcccaggaagtctgtgcataacggattcgccaaggaattctgggaagagacatttaactgccacctgcaagaaggtgccaagggacctctgccagtcgatactttcctacgcggacacgaagagtcaggcgacaggttctctaattcctccactgctttccgacctctatgtactggcgatgagaacatctcaagcgtggagactccttacatcgattacacccacctgcgcatctcatacaacgtttatctggcagtgtattcaatcgcccacgcactccaggatatctacacttgtcttcctggacgcggtctgttcacaaacggaagctgtgcggatattaagaaggttgaggcctggcaggtgctgaaacacttgcgccacctcaacttcaccaacaatatgggcgagcaggtcacttttgacgagtgtggggacctggtcggaaactattctatcatcaactggcacctcagccctgaggatggaagtatcgtgttcaaggaagtcgggtactacaatgtgtacgcaaagaaaggagaaagacttttcatcaatgaggagaagatcctttggtccggattcagccgggagcctttaaccttcgttttgagtgtgctgcaggtgcctttttccaattgcagtagggactgccttgcgggtactaggaaggggattatcgagggtgaaccgacatgttgtttcgagtgcgttgagtgtcccgacggagaatactctgacgaaaccgacgcctctgcatgcaacaaatgccctgatgatttttggtcaaacgagaaccatacctcctgcatagcaaaagagatcgaattcctgtcctggaccgagccattcgggattgcactgactctcttcgccgtgctcgggatcttccttaccgcctttgtcctgggggtttttattaaattccgaaacactccaatcgtgaaagcaacaaatcgtgagctgtcttatctcctgttattttctttgttatgctgctttagcagctcactattttttattggagagcctcaggactggacctgtagattaaggcagccagctttcggaatttcctttgtactgtgcatctcctgcatcctggttaaaacaaatagggtgctgctggtgtttgaagccaaaattcccacctcatttcaccggaagtggtggggcttgaatctccaatttcttctggttttcctctgcacgttcatgcagatcgtaatctgtgtgatctggctgtacactgcccctccgagtagttaccggaatcaagagcttgaggacgagatcatttttatcacatgtcacgagggatccctgatggccctgggctttctaattggctacacttgtctccttgcggctatttgttttttctttgcctttaaatccaggaaacttcccgaaaatttcaacgaagccaaatttataacattcagcatgttgatattctttattgtctggatcagttttataccagcctatgcctcaacctacggtaagttcgtctccgctgtcgaagttatcgcaatcctcgcggctagctttggactgcttgcttgtatcttctttaacaaaatttacattattctgttcaaaccgtctcgcaacacaattgaagaagtacgctgcagcacagcagcccacgccttcaaggtggcagcacgcgcaacactgcgcaggtcaaacgtctctcggaaaagaagcagcagcctcggaggttctaccggatcaaccccttccagcagcatcagctcaaagagcaactctgaggatccttttcctcagccggaacgccaaaagcagcagcagcctctggcattgacccagcaggagcaacagcagcaaccactcaccctgccccagcaacagaggtcccagcagcagcctcgctgtaagcagaaggtgatctttggctcaggcacggttacgttctctctgtcatttgatgagccccagaaaaatgccatggcccatcgcaattctacccatcagaacagcctggaggcgcagaaatcatccgacactctgactagacacgaacctcttctgcctttgcaatgtggcgagacagatcttgatctcacggtgcaggagacggggctgcagggcccagtggggggagaccaaagacctgaggttgaagacccagaagaactgtcccccgctttggtggtctctagcagccagtcctttgtgattagcggaggaggcagcactgtgacggagaacgtagtgaactcatag

SEQ ID NO: 216732 - DNA, 978 bp, synthetic construct
  misc_feature 1..978: note = Description of Artificial Sequence: Synthetic coding sequence
  source 1..978: mol_type = other DNA
atggcccgacctgtgtcagacaggactcccgctccactgctgctgggaggcccagcagggactccccctggtggtggcgctctgctgggcctcaggtccttactgcagggaaccagcaaacccaaagagccagcctcttgcctgctgaaggaaaaggaaaggaaggccgcactgcctgccgctactactccagggcctggacttgagacagcgggacctgctgacgccccagcaggtgccgtcgtgggaggtggtagtccccgagggaggcctgggccagtgccagcccctggcctgcttgcaccactgctgtgggagcgcacactgcctttcggcgacgtggagtacgtcgatctcgatgcgtttctgctggaacacggactgccccctagccctcctccccctgggggaccttctccagagccttctccggcacggacccctgcaccgtcacccggaccagggtcttgcggatccgcatcacctagaagctcaccaggccacgctccagcgcgtgcagcattggggaccgcttctggacatagggccggactgacaagtcgggacacaccttcaccggtggatcccgacactgtagaagtccttatgacatttgagcccgatccagctgacctggcgctgtccagcatcccaggccatgaaacattcgaccccagaagacaccggttctcggaagaggagttaaaaccccagcctattatgaaaaaagcgaggaaaattcaggtaccggaggaacagaaggacgagaaatattggagcagacgctacaaaaataatgaggccgctaagcgatcccgagatgcccgtcggctcaaggagaatcagatttctgtccgagccgcttttttggagaaagagaacgcattgttgcgccaggaggtagtcgccgtaaggcaggagctttctcattatcgtgcagtgctgtcaagatatcaggctcagcacggggctctatag

SEQ ID NO: 216733 - DNA, 969 bp, synthetic construct
  misc_feature 1..969: note = Description of Artificial Sequence: Synthetic coding sequence
  source 1..969: mol_type = other DNA
tcacagaggggtaaagggacgtgtcccggatcacaccgcaaccatgcttcctctctgcccagccacgggctggtgtcaattcagggcatctcagcaccagcgggacaatggcctgcccctcccccatggtcacaagaagggatgcagtgtcacagggacctagcactgtcacaggctttatgggggtggcagctttcaaagcagtctggatgggctcatccgagcctccctcatagccccctgccatccactgtccattcctgctcctgggcgccaccccacctccagcgacatctgccattagcaactgtctctccaggtactacacaacttacccaggggccagccggtcggacccttggccagacccaggcaagctgccccgagcccagacctagcatggacgccgtggacgccacaatggagaagctgagagctcagtgtctgagcagaggggctagtgggattcagggactggccagattctttcgacaacttgaccgcgatggaagtaggagtcttgatgccgatgagttcagacagggactggccaagctcgggctcgttctcgaccaagccgaggctgagggagtgtgtaggaagtgggatcgaaatggatcaggcactttggacctggaggagtttctgcgggctctgcggcctccgatgtctcaagcacgtgaggcggtcattgcagctgcctttgcaaagctagacaggtccggagatggagtagttaccgttgacgacctcaggggagtgtattcaggaagggcacatcctaaggttcggtctggagaatggacggaagacgaggtgcttcgaagattccttgacaactttgattcgtcagaaaaggacggacaggtaactctggccgaatttcaggactattattcaggggtatcagcatctatgaacacggacgaggagtttgtggcaatgatgacatcagcttggcaactctag

SEQ ID NO: 216734 - DNA, 489 bp, synthetic construct
  misc_feature 1..489: note = Description of Artificial Sequence: Synthetic coding sequence
  source 1..489: mol_type = other DNA
atggacgccgtggacgccaccatggagaaacttcgcgctcagtgtctctccaggggtgcctccggaatacagggactggcgaggttctttagacaattagacagagacggttcccggtcacttgacgcagacgagttccgtcagggacttgccaagcttggcctcgtgctggaccaggcagaagctgagggggtgtgccgcaagtgggacagaaatggtagcggcaccctcgacctggaagagtttctcagagccctcagaccacctatgagccaggcaagggaagcagtgatcgcggctgcctttgcaaagctcgatagaagtggagatggagttgtcaccgtggatgatctgaggggagtgtacagcggcagggcccatcctaaggttacattggccgagttccaggattattatagcggcgtgtctgccagcatgaatacggatgaagagttcgtggccatgatgactagtgcctggcagctgtag

SEQ ID NO: 216735 - DNA, 882 bp, synthetic construct
  misc_feature 1..882: note = Description of Artificial Sequence: Synthetic coding sequence
  source 1..882: mol_type = other DNA
ctgattaacattctttaccgggctgtgattagcgaccccgagcaaaacctcgctatagagcaaaaggagagcgaccatatcctacccgactccaaaatgacacccctaagattcagaaaaaggacactgcacgaaactaagattaggacccacagtaccttgacggagaatgtgctgagccataagctccagtttgatgggaggatcgtatcccgcacaaatgtactgccatttatacagaagagtatctacagccaccagtgtggaaggagaaaagggaaacagtaccgactcggggatttctacgtgggagcaacgttgacgttcctatcctctgaccacctgtccctgcctgagtctataaaggaaaatacactcctgaaactgcgcattaccaatattgaccagatcgctctggactctctgaagacggcatccatggagcaagaggacgatatcataattcaggagacaaacgatagattagtgttcaaggccattcaagatgtactcaaggaaaaactgcacaagcggggtgtaaggatactaactggtctggggaagtatttccagcagctcgacaaagagggcaatggccttcttgacaaggccgatttcaaacaagcccttaaagtcttccatcttgaagtgtctgagaaggattttgagtcggcctggttaatcctgaatgataacggcaacggaaaggtagactacggtgaattcaaacggggaatcataggcgagatgaacgagtataggaaatcttacgtaagaaaggcattcatgaagctcgatttcaacaaatccggtagcgtacccatcatcaatatcaggaaatgctactgcgcgaagaaacacagccaggtgataagcggttag

SEQ ID NO: 216736 - DNA, 1149 bp, synthetic construct
  misc_feature 1..1149: note = Description of Artificial Sequence: Synthetic coding sequence
  source 1..1149: mol_type = other DNA
atgattgatcacctctcccgcgcagtgataagtgatcccgagcagaacttggccatcgagcaaaaagagagcgatcacatcctgcccgactccaaaatgacgcctttaagatttcggaagaggacactgcacgagacaaagattcggacacactccaccctcacagagaacgtcttgtcacacaaattgcagttcgacggtagaattgtgagccggaacggtcgagatgcttgcagggagctgatcggattcttctttacccatgatcagtccctgacaatctacgagtatcgccaattcggaaagaaccgcacgaacgtcttgccatttatccagaagtctatctattctcaccaatgtggcagacgaaagggaaaacaatacaggctgggcgacttctacgtgggggctaccctgacatttctgtcgtctgaccatctctcactccccgagagcatcaaagagaacaccttgttgaagcttcggatcaccaatatagatcagattgcgctggatagtctgaagaccgccagcatggagcaagaggatgatattatcatacaggagaccaacgaccggctggtgttcaaggctattcaggacgtgctgaaggaaaaactgcacaagcgcggtgtgagaattctgacaggtttaggaaagtattttcaacagctggacaaggaaggcaatggtcttctggacaaagcagactttaagcaggccttgaaggtatttcacttggaagtgagtgagaaagactttgagtcagcttggcttattctgaacgataatgggaacggaaaggtcgactacggtgaattcaagcggggaatcatcggcgaaatgaatgagtatagaaaatcttatgtgaggaaagcatttatgaagctcgattttaacaagtctggatccgttcctattattaacattagaaaatgctattgtgctaaaaaacatagccaagttatatccgggcattcgaccgaggaggaaatcaagtctagctttctcgaaacacttaaagtggcatgttcgaaatccgacgaagtgtcttacggcgaattcgaggattattatgaggggctgagcattggaattgtggacgatgaggatttcgtgaatatccttaggacaccttggggcatttag

SEQ ID NO: 216737 - DNA, 1674 bp, synthetic construct
  misc_feature 1..1674: note = Description of Artificial Sequence: Synthetic coding sequence
  source 1..1674: mol_type = other DNA
atggggaatagcttttgctacaccgccgtgtactgtatgatcaacactgggacccagatggatttggaagtgaaaggggtggccgcaacgtctaggtcccagattcagccattctttggcagaaaaaaacctttgcagcagaggtggacttccgagtcgtggacaaatcagaacagctgtcctccagtcgttccacgcttggatctgggttcgctggttgactccgacgacgaagataacttcagttacataccactgagtaccgcgaatttgccaaattcgtcaagtactctaggatgggtcacaccctgtcaaactccctacacgcaatatcatctgaacaagctcgaccaaaacatcatccccgagaacctcccagccccaaccgacaagtgcaaactcaagtaccagcagtgtaaaacagagattaaagagggctacaagcagtattcccagcgtaacgcagagaacacgaaatctaacgtcacgcataaacaatcacccagaaacaaaatcgatgagaagtgcgtccaagacgaagaggccaataccgatgacctgacaactctagatcgcaaagcaatcctgcaacagggctatgcggacaactcatgtgacaagcagcaaagggccagaaagctggacgctgagatcgtcgctgctgaaaagaagaagcagatagttgctgagcaggtgatgatcgaccatctatccagggctgtcatttctgaccctgaacagaatctggccatagagcagaaagaaagtgatcacattttgccagacagtaaaatgaccccacttaggttcagaaaacgcactctgcatgagactaaaatcagaacgcactctacactaaccgagaacgtgctttcacacaagctgcagttcgatggcaggattgtgtccaggaacgggagggatgcttgcagggagctaataggctttttctttactcacgaccagtctctcacaatctatgaataccggcaatttggaaagaataggactaatgtcctaccgttcatccagaaatctatctattcccatcagtgcgggcgtagaaagggcaagcagtacagactgggcgatttctacgtgggcgcaacccttacatttctgagctccgatcatttatctctccccgaaagtattaaggaaaacaccctcctcaagctgagaattactaatatcgaccagattgcactggattcattgaaaacagcatcgatggaacaagaagatgatataatcatacaggagactaatgaccggctggtctttaaggccatccaggatgtactcaaggaaaagctgcacaagcggggagtgcggatcttgaccggactgggaaaatattttcaacaacttgataaggagggcaacgggctcttggacaaagctgacttcaagcaagcactgaaggtattccatctggaggtgtcagagaaggactttgagtccgcttggctcatcctgaatgacaacgggaatgggaaagtggactacggtgaattcaaacggggaatcatcggtgaaatgaatgagtatagaaagtcttatgtccggaaagcgttcatgaaattagatttcaacaaatctggatccgtgcctattatcaacatccgcaaatgttattgcgctaaaaagcattctcaggtcatctctggctag

SEQ ID NO: 216738 - DNA, 615 bp, synthetic construct
  misc_feature 1..615: note = Description of Artificial Sequence: Synthetic coding sequence
  source 1..615: mol_type = other DNA
atggaacaggaggatgacattataattcaggagacaaacgacaggttggtcttcaaggctatccaggacgtactcaaggagaaacttcacaaaagaggggtccgcatcctgaccggtctgggcaagtatttccagcagttagacaaggagggcaacggcctgctggacaaagccgacttcaagcaagcacttaaggtgttccacctggaggtgtctgagaaggattttgagtccgcctggctgatactgaatgacaatgggaacggcaaagtagactatggcgagtttaagagagggataataggcgagatgaacgagtaccgaaagtcctatgtccgcaaagcattcatgaaactggactttaacaaatccggctctgtcccaataatcaatatcaggaagtgttactgcgcaaagaagcattctcaggtgatcagcggccactcaactgaggaagagatcaaatcgtccttcctcgaaacactgaaagtggcgtgcagtaaaagcgatgaagtttcgtatggagagttcgaggactactatgaagggctgtccatcggaatcgtcgacgatgaggattttgtgaacatcctgcgcactccttggggcatttag

SEQ ID NO: 216739 - DNA, 3009 bp, synthetic construct
  misc_feature 1..3009: note = Description of Artificial Sequence: Synthetic coding sequence
  source 1..3009: mol_type = other DNA
atggccgcacacgagtgggattggttccagagggaagagcttataggccaaatctcggatattagggtgcagaacctgcaagtcgaaagggagaatgtccaaaagcgaacctttacacggtggatcaatctacacctcgagaaatgcaaccctcctctcgaggtgaaggacctctttgtggatatccaagatgggaaaattctcatggccctcctggaggtcctgtctggaagaaacttgcttcacgaatataagagcagttcccatcgcatatttagattgaataacatagccaaagcgcttaagtttcttgaggacagcaacgtcaagttagtctcaatcgacgctgccgaaatagctgatggaaatccaagcctggttctcggtctcatctggaacattattttattttttcagattaaggaactgactggcaacctctcccgcaactctccaagctcttctttaagtcctgggtctggcggtaccgattctgactcttcatttccacctacgcctacagcagagcgctccgtggcaatcagcgtgaaggaccagcgcaaagcaatcaaggcactgcttgcttgggtgcagagaaagactcgcaagtacggcgttgcggtccaggacttcgcgggtagttggcggtccgggcttgcctttctcgccgtcattaaggctatcgatcctagtctggtggacatgaaacaggcactcgagaactcgactagagaaaaccttgagaaagcattttctattgcgcaggatgcactgcacattccacggttgcttgaacctgaggatatcatggtggatactcccgatgaacagtctataatgacatatgtcgcccagttcctggagcgttttcctgaactggaagctgaagatatctttgacagcgacaaggaagtcccaattgagtctaccttcgtgaggattaaagagacaccgtctgaacaggagagcaaggtgttcgtgctcacagaaaacggcgagcgaacatacaccgtcaaccacgaaacatcccacccccctcctagcaaggtgtttgtctgcgacaagccggagtccatgaaggagttcagactggacggcgtttcttcgcacgctctctctgattcctccaccgaattcatgcatcaaatcatcgaccaggtcttgcagggaggcccagggaaaacctcggatatttctgagccgtctccagagagttctattctcagctccaggaaagaaaatggcaggtccaattccttgccaatcaaaaagacagtgcattttgaggctgacacatataaggacccgttctgctcaaaaaacctctcgttatgcttcgaaggcagtcccagagtggcaaaggagagcttgaggcaggacggacacgtgcttgcagtggaggtggccgaagagaaagagcaaaagcaggaatcttcaaagatacctgagagcagctcagacaaagtcgcgggagacatcttcctggtggaaggtacaaacaataactcccagagttcatcctgtaacggcgctctggagtccaccgctcggcacgacgaggagagccacagtctctctcccccaggcgagaacacagtgatggccgatagttttcaaatcaaagtgaacctgatgactgtggaagccctcgaggagggggactatttcgaggccattccactgaaagcctccaaattcaactccgatctcatcgacttcgcgtccacgtcccaagcctttaataaggtcccctcgccacacgagactaaacctgacgaagacgccgaggcattcgagaaccacgccgagaaactaggcaaacgttccatcaagagcgctcataagaaaaaagatagccccgagccccaggtgaaaatggacaagcatgagccccatcaggacagcggagaagaggctgagggatgcccatcagccccagaagagactccagttgataaaaagcccgaggtgcacgaaaaagcaaaaaggaagtcaactaggccccattacgaagaagagggtgaggacgacgatctccaaggtgttggcgaggaactgtcgtctagtcctcctagttcatgtgtgtccttagagaccctgggaagtcactctgaagagggacttgattttaagccctccccgccattgtcaaaggtgtcagtgataccccatgatttgttctatttccctcattacgaggtcccactcgccgctgtgctggaggcatacgttgaagatcctgaagacctgaaaaacgaggagatggatctggaggaaccggagggctacatgccagacctggatagtagagaggaggaggcagatggctctcaatcgagcagttccagcagcgttcctggcgagagcttacccagcgcaagtgaccaggttctgtacctcagtagagggggtgttggcaccacacccgcatcggagcctgcccctctcgcacctcatgaggaccaccaacaaagggaaaccaaagagaatgatcccatggactcacatcagtcccaggagtcacctaatctggaaaatatcgctaaccccttggaggagaatgtgacaaaggaatcaattagctctaagaagaaagaaaagaggaaacacgtagaccacgttgagagctccttgtttgtggctccaggatcagtccagagttcagacgatctggaggaagacagcagtgattattctattccttctcggactagccactcagattctagcatttacctgaggcgccatacccatcgtagcagtgagtccgatcactttagctacgtgcagctgagaaatgccgctgatttggatgatagaagaaataggattctgaccagaaaagccaactctagcggggaggcaatgtcactgggctctcattcaccccagtctgatagccttacacagctggtacaacagcctgatatgatgtatttcatactctttctgtggttgctggtatactgcttgcttctgtttccccagctagatgttagccgattatag

SEQ ID NO: 216740 - DNA, 450 bp, synthetic construct
  misc_feature 1..450: note = Description of Artificial Sequence: Synthetic coding sequence
  source 1..450: mol_type = other DNA
atggctgaccaactgaccgaagagcagatcgccgagtttaaagaagccttttctctatttgacaaggacggggatgggacgattaccactaaagagctggggacagtgatgcggtcactgggtcagaatccaacggaggccgaactgcaagacatgattaacgaagtggatgccgacgggaacggaactattgactttcctgagtttctgacgatgatggcgaggaagatgaaggacaccgacagtgaggaagaaatccgggaggcctttcgggtgttcgacaaagacgggaatggttacatctctgccgctgagctgcgacacgtcatgaccaatcttggggagaaactcacggatgaagaggtcgacgagatgattagagaagctgacattgacggcgacgggcaggtgaattacgaagagtttgtacaaatgatgaccgcaaagtag

SEQ ID NO: 216741 - DNA, 450 bp, synthetic construct
  misc_feature 1..450: note = Description of Artificial Sequence: Synthetic coding sequence
  source 1..450: mol_type = other DNA
atggctgaccagctgacagaagagcagatcgccgagtttaaagaggctttctctcttttcgataaagatggggatggaactattacaacgaaggagctcggcaccgttatgcggagcctgggccaaaatcccaccgaagctgagcttcaggatatgataaacgaagtggacgctgatggcaatggcacaatcgacttcccagaatttctaacgatgatggctcgaaagatgaaggatactgactcagaggaggaaatacgagaagcatttcgggttttcgacaaggatggcaacggctacatcagcgccgcagagctgagacacgtgatgactaacctgggagaaaagctcaccgacgaagaggtagatgaaatgatcagagaggccgatattgacggagatggacaggtcaactacgaggaatttgtgcagatgatgacagcgaaatag

SEQ ID NO: 216742 - DNA, 450 bp, synthetic construct
  misc_feature 1..450: note = Description of Artificial Sequence: Synthetic coding sequence
  source 1..450: mol_type = other DNA
atggctgaccagcttactgaggaacagattgcggaatttaaagaggctttcagtctgtttgacaaagatggagatggcacaatcaccacaaaagagctaggaaccgtgatgcgctcccttggtcagaatccaaccgaagccgagctacaggatatgataaatgaggtggatgctgacgggaatggtaccatagacttccctgagtttttaacaatgatggccagaaagatgaaggacactgacagcgaggaggaaattcgagaggcatttagggtattcgacaaggatggaaatggttatataagcgccgctgagttgcggcatgtgatgacaaatcttggcgagaaactcactgacgaagaggtggacgaaatgatacgtgaagccgacatagatggtgacggccaagttaattacgaggagtttgtgcagatgatgaccgcgaaatag

SEQ ID NO: 216743 - DNA, 450 bp, synthetic construct
  misc_feature 1..450: note = Description of Artificial Sequence: Synthetic coding sequence
  source 1..450: mol_type = other DNA
atggcagaccagctgacagaggagcagatcgcggaattcaaagaagcctttagtctttttgataaggacggcgacggaaccattacaaccaaggaattgggcaccgtcatgcgaagccttggccaaaaccccaccgaagctgaactgcaggatatgatcaacgaggtggatgccgacggtaacggcactatcgactttccagagtttttgacgatgatggcccgaaaaatgaaagacaccgacagcgaggaggaaatcagagaagccttcagagtgtttgataaggacggaaacggctacatttccgccgcagagctgcgccatgtgatgacaaatctgggagaaaaactgacagacgaggaggtagatgaaatgatccgcgaagcggatatcgatggcgacggccaagttaattacgaagaatttgtgcagatgatgactgccaaatag

SEQ ID NO: 216744 - DNA, 5022 bp, synthetic construct
  misc_feature 1..5022: note = Description of Artificial Sequence: Synthetic coding sequence
  source 1..5022: mol_type = other DNA
atgtggcgggctgaggggaagtggctacccaaaacctcacggaagtctgtgtcccaaagcgtcttttgtgggacgtctacatactgcgtgcttaacactgtaccaccaattgaggacgatcacggaaacagcaacagcagtcatgtgaagatcttcctaccaaaaaagctgctggaatgcttgccaaagtgttcttctctcccgaaagagcggcatcgctggaacacaaatgaggaaattgccgcttatctgatcacatttgagaagcacgaagaatggctgaccacgtcacctaagacccgcccacagaacggtagcatgatcttatacaacagaaagaaagtaaagtacaggaaggacgggtactgttggaagaagagaaaagatggaaagacaacccgcgaggaccacatgaagctcaaagttcagggagtggagtgcctgtacggatgctacgtgcactcctctattattcctacttttcatcggagatgctattggctcctgcagaatccggacatcgtactcgttcattatctcaacgtcccagccattgaagattgcggcaaaccctgtggaccgatattgtgttctattaacacagacaagaaggaatgggccaagtggacaaaggaggaactaattgggcagttaaagcccatgttccacggaatcaaatggacctgctctaacggtaatagctcatcggggttcagcgttgaacagctagtgcagcagatcctggactcccatcaaacgaagccacagccccgaactcataactgcttatgtacggggtcactgggggcagggggaagcgtgcatcataaatgcaactctgctaagcatcggatcatcagccctaaggtcgagccccgaaccggtggatatggatcccactcggaggtgcagcataacgatgtctccgaaggcaagcatgaacatagccatagcaagggctctagtcgggagaagcggaacggaaaggtcgccaaacccgttctcttgcaccagagctcaacagaggtctcctccacaaatcaggttgaggtacctgatacaacacagagcagtccagtgtcgattagttctggcctcaactcagatcctgacatggtggatagtcctgtggtgaccggcgtgagcggaatggcagtggcttcagtgatgggaagcctgtcacaatccgccaccgtatttatgtccgaggtgaccaatgaggcggtgtacactatgagtcccacggcagggcctaaccatcatctgctgagccccgatgcctctcagggcctcgttctggcagtcagcagtgacggtcacaaattcgctttccccacaaccggcagctcggagagcctgagcatgttacccaccaatgtaagtgaagaactggtgctgtcaaccacattggatggcggtcgaaaaatccccgagaccacaatgaatttcgatccagactgcttcctgaacaaccccaaacaggggcagacttacggcggaggagggctcaaggccgaaatggtatcttcgaacattcgacactctcccccaggggagagatctttttccttcaccaccgtcctgactaaggagattaagaccgaagatacgagttttgagcagcaaatggccaaggaggcttatagtagcagcgcggctgcagtagccgcatcgagcctcactttgactgccggaagcagtctgctgccatccggaggcggactgtccccttccacaactctagagcagatggactttagcgcgatcgattccaacaaggactacacaagttcattctcccagaccggccactcccctcacatccaccaaaccccttccccgagcttttttctgcaggacgcctcgaagccactaccggtggaacagaatacccattctagcctttcagacagtggaggaacttttgtgatgcccacggttaagaccgaggcctccagtcagacgtcctcatgctcgggccacgtggagacccggatcgagtcgacctcctccttacacttgatgcagttccaggccaattttcaggccatgaccgcagagggggaagtgactatggagacttcccaggccgctgaagggtcagaggtgctcctcaaaagtggagaactgcaagcatgttcaagcgaacactatctgcaacccgagaccaatggcgttataaggtcggcaggcggagtgcctatcctgccgggaaacgtggttcagggcctgtacccagttgctcaaccatctctcggcaacgcctccaacatggaattgtctttggaccatttcgacatatcattcagcaaccagttttctgacctcattaatgacttcatctcagtcgagggaggttcctccacgatctacggtcaccagcttgtgtccggtgacagtacggcactctcccagagcgaggatggtgcacgcgctcctttcactcaggctgaaatgtgcctcccctgttgcagccctcagcagggctccctacagctctcgtcttccgaaggcggtgcttcaacaatggcttatatgcacgtggccgaggtggtgagcgctgctagtgcccaggggacattaggaatgctacagcagagtggacgagtttttatggtgacagattactctcctgagtggagctacccagagggcggagtcaaggtcttgattaccgggccatggcaagaggcctccaataactactcatgtctgtttgaccagatctccgtgcctgctagtctgattcaaccaggagttctgcggtgttattgtcctgcccacgataccggcttggtcaccttgcaggtagctttcaataatcagattatttcgaacagtgtggtattcgaatacaaagcaagggctctaccgaccctgccgagcagccagcatgattggctgtcccttgatgataatcagttccgtatgagcatcctggagcgacttgaacagatggagagaaggatggcagagatgactggaagccaacagcataagcaggcttccggtggcggtagtagtggtggcggatcaggtagcggcaacggcggaagtcaggcccagtgtgcctctggcacgggagcgttaggaagctgtttcgagtccagagtggttgtggtgtgtgaaaaaatgatgagtagagcttgttgggcaaagtcaaaacacctgatccactctaagacattccgaggcatgacactgctccacttagcagccgcacaaggatacgctactctgatccaaacacttatcaagtggcgaaccaaacacgcggactccatcgacctggaactggaagtcgatccactgaatgtagaccactttagctgcacaccactgatgtgggcgtgcgctcttggtcacctggaggccgcagtcgtcctgtacaagtgggaccggagagccatttccatacctgactcccttggtcgcctacctctgggaatagctcgttcgcgcggtcatgtgaagttggcagaatgtttagagcacctccagagggatgaacaggcccagctgggacagaacccgaggattcattgtcctgctagtgaagaaccaagcacagaatcttggatggcccaatggcactccgaagccataagctcccctgagattcccaagggagtaaccgtcatagcatccaccaatcctgagttgagaagacctaggtccgagccctccaactactactcttcggaatcacataaggattatcctgcccctaaaaagcataaactgaacccagaatacttccagaccagacaggaaaaacttctcccaacagccctgtctttagaggagcccaatattcggaagcagtccccaagctcgaaacagtcagtacccgagactctatctccttccgaaggcgtgcgtgatttctcaagagagctgagccccccaacaccggaaactgctgcctttcaggccagtggatcacaacctgtgggcaagtggaactccaaagacctttacatcggggtgagcacggtacaggtgacaggcaatcctaaagggacatctgttggcaaggaggcagcacctagccaagtccggcctcgagaacccatgtccgttctgatgatggcaaaccgagaggtagtgaatacagaactgggaagctatagggatagtgctgaaaatgaggagtgcggtcagccaatggacgacattcaggtgaacatgatgacactggccgaacatatcattgaagccacacccgatcgtatcaagcaggagaactttgtacccatggagtcctctgggctggaaagaacagatcccgctacgatttcctcaactatgagttggctagcctcgtatctggctgacgcagactgtctgccatcagcagctcaaattagatccgcctataacgaacccctcactccatcttctaatacttctttatccccggtgggctccccagtgtccgaaattgcatttgagaaaccaaacctgccttccgccgcagattggtcagaatttctcagcgcaagtacgtcagagaaggttgaaaatgagtttgcacagctaaccctgagcgatcatgaacagagagagctctatgaggccgctaggctagttcagacagcctttcggaaatataagggccgtccccttagagagcaacaggaagttgcagccgcagtaattcaaagatgttacagaaaatacaaacagtatgctctgtacaagaagatgactcaagccgcaattctgatccagtccaaatttagaagttattatgagcagaagaagttccagcaaagcagacgagctgcggtgcttatccaaaagtactacaggagctacaaaaagtgcggcaagaggcgacaggctaggaggacggcagtgatcgtgcagcagaagctccgttcttccttgctgaccaagaaacaggatcaggcggctcgaaaaatcatgaggtttctgaggcgctgcaggcattctcctttagttgatcatcgcctatataaaagaagcgaacgcattgaaaagggccagggaacctat

SEQ ID NO: 216745 - DNA, 1911 bp, synthetic construct
  misc_feature 1..1911: note = Description of Artificial Sequence: Synthetic coding sequence
  source 1..1911: mol_type = other DNA
atgatgtcccgcgcatgctgggctaaatccaaacaccttatccactccaagaccttccggggaatgacgctcctacaccttgccgcagcccaggggtacgccaccctgattcagactctgataaagtggagaacgaaacatgccgattcaatcgacctcgaacttgaagtggatccgctcaatgtggaccatttcagttgtacacccttgatgtgggcttgcgcactgggtcacttggaggccgcagttgtgctgtataaatgggaccgacgtgctatctctattcctgatagtcttggacgattgcccctgggcatcgctcgctccaggggacacgtgaaactcgcagaatgtctcgaacatctgcagcgcgacgagcaagcccagttgggacagaatccaagaatccactgccctgcttcagaagaacctagtacagaaagctggatggcgcagtggcacagcgaagcaatctcctcaccggaaattccaaaaggcgtaaccgtgattgcttcaaccaatccagagctccggaggcccaggagcgagccatccaattactactctagcgaaagccacaaggactatcccgcaccaaagaagcataagctaaatcccgaatactttcagacacgtcaggaaaaactgctccctacagctctgtccctcgaggagccaaatatccggaaacaatcccccagctccaaacagagcgtgcccgagactctgagtccctctgaaggcgtgagggatttcagtcgcgaactgagccctcccacacccgagactgcagcctttcaagcttccggatcccagcccgtgggcaagtggaatagcaaagatctgtatatcggcgtgtcaacagtacaggtgaccggaaacccaaaagggacttcagtgggcaaggaagcggcacctagccaggtgcggcctagagaaccaatgagtgtgctgatgatggccaatagagaggtagtaaataccgagttgggaagctaccgcgatagcgcagaaaacgaagaatgtgggcaacctatggacgacatccaagtcaacatgatgacattggcagaacatatcattgaggctaccccagaccgcatcaagcaggagaacttcgttcctatggaaagctcagggctggaacgaactgacccagccacaattagctcaactatgagctggcttgcttcctatctggcggacgcagattgtctccctagtgccgctcaaataaggtccgcttacaatgaaccgctcacccctagtagcaatacaagcctgagtcccgtgggcagtcccgtcagtgagatcgcttttgagaagcccaatcttccaagcgctgccgattggagcgagtttctgtctgcttctacctccgaaaaagtggagaacgagtttgcgcagctcacgctgtcagatcacgaacagcgggagctgtacgaggctgctcgcttggtccagactgccttcaggaaatataagggaaggcctctgcgcgagcaacaggaagtagccgcagccgtaatacaacgatgttatagaaaatacaagcaggggaaaaacatttgcctgaaatatgccctgtataaaaagatgacacaggccgctatcctgattcagtccaaattccgtagctattacgagcaaaagaagttccagcagtccagacgcgctgccgtccttatccagaagtattataggagctataagaaatgtggcaagagacgccaagcacgacgcaccgccgtgatcgttcagcagaagctgcgaagtagcctgttaacaaagaaacaggatcaggctgcccgtaagattatgaggttccttcggagatgtcgccatcgtgttaaagagctcaaaaaagcaaaagaactcgaagatatccagcagcacccccttgccatgtag

SEQ ID NO: 216746 - DNA, 2151 bp, synthetic construct
  misc_feature 1..2151: note = Description of Artificial Sequence: Synthetic coding sequence
  source 1..2151: mol_type = other DNA
atggcttgtccagtctccccagaccacaagcaggaaggagcgcacgatacggggcttgtcacgctgcaggtggcctttaataaccaaatcatttccaattccgttgtttttgagtacaaggctagagctcttcccaccctgccatccagccagcatgattggctctctctcgacgacaatcagtttagaatgagcatattggagaggctggagcagatggagcggaggatggcagaaatgacagggagccagcagcataagcaggccagtgggggtgggtcaagcgggggtggatccggcagcggtaacggcggtagccaggctcaatgcgcgtccgggacaggggctctcggatcctgtttcgagtcgcgtgtggtcgtcgtgtgcgaaaaaatgatgagccgcgcttgctgggcaaagtccaagcacctgatccactcaaagacattcaggggcatgactctcctacacctggcagctgcacagggatatgctactctcattcagactctgattaagtggaggaccaaacatgccgattccatagacttggagcttgaggtggacccactgaacgtggaccacttctcctgtaccccattgatgtgggcctgcgcattagggcatctcgaagcagctgtcgtactctataaatgggataggcgagctatttccataccggattcactggggagacttcctctgggcatcgcacggtcgaggggccacgtgaaattagccgaatgtctcgagcacctccaacgcgacgagcaggcccagttgggacagaatcccagaattcactgccccgctagtgaagaaccttctactgagtcctggatggcccagtggcacagtgaggctatctcttctcccgaaataccaaagggcgttaccgtgatagcatctacaaaccctgagctgagaagacctagatcagagccgtccaattactacagctcagagtcacataaggattatccggctcctaaaaagcacaagctgaatcccgaatattttcaaacgcggcaggaaaaattactcccgactgcactttccttggaggagccaaacatccggaagcaatcaccaagctcgaagcagagtgtaccggagacactatcaccgtctgaaggtgtgagagatttctcccgtgagctgagccctccaacccctgagaccgctgctttccaggcaagtggctcacagcctgtggggaagtggaattcgaaggacctgtacattggcgtgtcaaccgtgcaggtgactggtaaccccaagggaactagtgtggggaaagaggccgcaccaagccaggtgcgaccgagggagccaatgagtgtgctgatgatggctaaccgggaagtagtgaacacagaactcggatcatacagagactcagccgagaacgaggagtgtgggcaacccatggatgacatccaggttaatatgatgaccctcgccgagcacattatagaagccacattatcctccactatgtcctggctggccagttatctggctgatgccgactgcctaccctcggcagcccagataagatcagcctacaacgaacctcttaccccgagctctaacacaagcctgagccccgtcggctcacccgtctcggagattgcctttgagaaagttgaaaacgaattcgcccagctgaccctgtctgatcacgagcaaagagaactatacgaagctgccagattagtgcagaccgctttccggaagtataaggggagacctttacgagaacaacaggaggtagccgctgctgtcatacagaggtgctaccgcaaatataagcagtatgcactgtacaagaaaatgacacaggccgcaattcttatccagagcaagttcaggagttactatgagcagaagaaatttcagcagtctcgacgggctgcagtccttatccagaagtactaccgcagctataaaaaatgcggaaagcgccgacaagccagacggactgccgtgattgtgcaacaaaaactgcgcagctccctcttaacaaagaaacaggatcaagctgctcgtaaaatcatgagatttctccgcagatgtaggcaccgagtcaaggaactcaaaaaggcaaaagaattagaagatatccagcaacacccgcttgctatgtag

SEQ ID NO: 216747 - DNA, 4980 bp, synthetic construct
  misc_feature 1..4980: note = Description of Artificial Sequence: Synthetic coding sequence
  source 1..4980: mol_type = other DNA
atgtggcgggcagaagggaaatggctccctaagacttcacgtaagtcagttagtcagtcggtgttttgtggcacttccacttattgcgtgctgaacacagtgccacctatcgaagacgaccacgggaatagtaactcttcccacgtcaaaatcttcctgccaaaaaagctgcttgagtgcctcccaaagtgttcatctcttccaaaagaacgccaccggtggaatacgaacgaggagatcgcagcctatttaatcacctttgaaaaacacgaagagtggttaactaccagcccaaaaaccagaccccaaaacggaagcatgatactgtacaaccgaaaaaaggttaagtatagaaaagacggttactgctggaaaaaaaggaaagatggtaaaacaacaagggaagatcacatgaagctgaaggtccagggggtcgagtgcctctacggctgttacgtgcacagcagcatcattccaaccttccacagacgctgctactggctgctgcaaaacccagatatcgtgctcgttcattacttgaacgttcccgcaattgaagactgtggcaagccctgtggacctatcctctgctcaataaataccgacaaaaaggagtgggccaaatggactaaagaggagctcatcggacaattgaagccaatgttccacgggattaagtggacatgttccaacggaaattcctcctcaggcttctcggttgagcaactggttcagcaaatcttggactcgcatcaaactaagcctcaaccaaggacgcacaactgcctttgcactggatccctgggagcaggaggttctgtgcaccacaagtgtaactctgccaagcaccgaatcatatctccaaaggtggagccgagaaccgggggatatgggagtcacagcgaagttcagcacaacgacgtaagcgagggcaagcacgagcatagccactccaaaggaagttcaagggaaaaaagaaacggtaaggtggcaaaacctgtccttcttcaccagtcctccacagaagtgagctccacgaatcaagtggaagtgcccgatacaacccaaagctccccagtgagtatctctagcggactcaacagcgatccagacatggtagatagccctgttgttactggagtgtcaggtatggcggtagcgagcgtgatgggtagcctaagccagagtgccacagtatttatgagtgaagttacgaacgaagccgtgtacaccatgtcccctactgcagggccaaatcatcatctgctctcccctgatgcctcccagggtctggtgctggctgtgagctccgacggccataaatttgcttttcccacgaccgggtccagcgaaagcttgagcatgctccccacaaatgtgtccgaggagcttgtgctgtcaaccacactggacggagggaggaagatccctgagaccactatgaatttcgaccctgactgcttcctgaacaatcctaaacagggtcagacatacggtggcggtggtctgaaagctgaaatggtatcgagtaacatccgtcattcaccaccaggagagcggagtttttccttcactaccgtgctcacgaaagaaatcaagactgaggatacaagctttgagcaacagatggccaaagaggcatactcaagcagcgctgccgctgtggccgcttctagtctgactctcaccgccggatcgtctttgctaccctcgggaggagggctttctccgtcaactacactagaacagatggacttctctgcgattgatagtaataaggactacacaagcagcttttctcagactggacactctccccatatccaccagacccctagcccctcctttttcctgcaggatgcaagcaagcccctgcccgttgagcagaacacacactccagtctgagcgactcaggtgggaccttcgttatgcccacagtgaaaaccgaggcttcatctcaaacttccagttgtagcggccatgtcgaaacccgtattgaatctacgtcatccctacacctaatgcagttccaggccaatttccaagctatgactgcggagggcgaggttacaatggagacctcacaagcggctgagggatctgaagttctgttaaagtcaggcgaactgcaggcctgcagttctgagcactacctgcagcctgaaacgaatggtgtaatcaggtcagctgggggtgtccctattctgccaggaaacgtcgttcagggcttataccccgtcgcacagccatccctgggcaatgcatctaatatggagctgagccttgaccattttgacattagtttctctaatcagttctccgatttaattaacgacttcatcagtgtggagggtgggagtagtactatttacggccatcagcttgttagcggagattctaccgcactctcacagagcgaagatggcgcaagagccccattcactcaggccgagatgtgtctgccctgctgcagcccgcaacaggggtcacttcaactgtcttctagcgaagggggagccagcacaatggcatatatgcacgttgccgaggtcgttagcgccgcttctgcccaagggactctcgggatgctgcagcagagcggacgggtgttcatggtcactgattacagccctgaatggagctacccagaaggtggagtcaaggtcctaatcaccggcccatggcaggaagccagcaacaactacagctgccttttcgaccagatttcagttccagcttcactcatacagcctggagtactgcgctgctactgtcctgcacacgacacaggactggtgacccttcaggtggcatttaacaatcagatcatttccaattcagtagtttttgaatacaaagctagagccctgcccaccctgccgagctcgcaacacgattggttaagcctcgacgataatcagttcaggatgagcatcctcgaacgtcttgagcagatggagagacggatggctgagatgactggctcacaacagcacaagcaggcaagtggtggaggttcctccgggggtgggtcaggatcaggtaacggcggttctcaggcccagtgtgcctccggtaccggggcactcgggtcatgttttgaatctcgggtagtagtcgtctgcgagaagatgatgtcccgagcttgctgggctaagtccaaacaccttattcacagcaagacattccggggtatgacactgctgcacctggctgctgctcaagggtatgcaacactaattcagacgctgattaagtggaggaccaaacacgccgactcaatcgatcttgaattggaggtggaccctcttaatgttgaccacttcagttgcactcccctgatgtgggcctgcgcgctcggacatctggaagctgctgtggtcttgtacaagtgggatcgacgagctattagcatccccgatagcttgggacggctgccactaggaattgcccgttctcgaggtcacgtcaagttagcagagtgcctcgagcatcttcagcgcgatgagcaggcccagctcggccagaaccctcggatccattgccctgctagtgaggagccttctacagagagttggatggcacagtggcacagcgaagccatcagctctccagagattccaaagggtgtgacagtgatcgccagtacgaatcccgaattacgacggccacgctctgaaccaagcaattactatagctctgagtcccataaggattatcccgcacctaagaaacataaactaaaccctgaatatttccagacccgccaagagaagcttctccctactgcgctgtctttggaggaacccaatatcaggaagcagtctccatcatctaagcagtcagtgcccgaaacactgtccccgtcagaaggagtccgcgacttctcgagggagctctcccccccaactcctgagacagccgcattccaggcgtctgggagccagcctgtgggcaaatggaactcaaaggacctgtatatcggagtgagcactgtgcaagtaacaggcaatcccaaaggaacaagtgtgggcaaggaagctgctccttcccaggtacggcctagagagcccatgagcgttctcatgatggccaacagagaagttgtcaacacagagctcggttcttatcgagactctgccgaaaacgaggagtgtggccaaccaatggatgatattcaggtgaacatgatgaccttggcagagcatatcatcgaggctaccccagacagaattaaacaggagaatttcgtacccatggaatcttcaggacttgagagaactgatccagcaacaattagctctactatgtcatggctggcttcctaccttgctgatgctgattgcctaccgagcgccgctcagatacggcttagcccggtgggatctcctgtttccgagatcgctttcgagaagcctaacctgcctagcgcggctgattggtctgaatttctgagcgcatccacctcggaaaaggtggaaaatgagttcgctcagctcacactcagcgatcatgagcagagggaactgtatgaggctgcccgactggtccagactgctttcagaaaatataaaggacgacctctgcgagaacagcaggaggtggccgctgcagtgatccagagatgttacaggaaatacaaacagtacgccctgtacaagaagatgactcaggcagctattctaatacagtccaagttcaggagttattatgagcagaaaaagtttcagcaaagccggcgtgctgctgtcctgatccagaaatattatcggagctacaaaaagtgcgggaaaaggagacaagcacgacggaccgccgtaatcgttcagcagaaattgagaagctctctgctgacaaaaaagcaagaccaggcagctagaaaaatcatgcgcttcctcaggcgttgcagacaccgcgttaaggagctcaagaaagcaaaggaactggaagacattcagcagcatcctctggctatgtag

SEQ ID NO: 216748 - DNA, 243 bp, synthetic construct
  misc_feature 1..243: note = Description of Artificial Sequence: Synthetic coding sequence
  source 1..243: mol_type = other DNA
atgtggcgagccgagggtaaatggttgccaaagaccagccgcaagagcgtgtctcagtcagtgttttgtggcactagcacctactgcgtgcttaacaccgtgccaccaattgaggacgatcatggaaactcaaactcttcacacgtgaaaatttttctgcctaagaaactactggagtgtctccccaagtgtagctcgcttcctaaggagcggcataggtggaacacaaacgaacgttcttag

SEQ ID NO: 216749 - DNA, 306 bp, synthetic construct
  misc_feature 1..306: note = Description of Artificial Sequence: Synthetic coding sequence
  source 1..306: mol_type = other DNA
atgtggagggcggagggcaagtggctgccaaagaccagccgaaaaagcgtgtcccagtctgtgttctgtggaacttccacatattgtgtgctaaatacagtccctcccattgaagacgaccacggcaattccaatagctcgcatgtcaagatctttctccctaagaagctgctggaatgccttcccaaatgtagtagcctccctaaagaaagacatagatggaataccaatgaggcactgaccacgcatcttttcatgggcgctgccaagaaacgggacccacagtcctggagccatgaaggctag

SEQ ID NO: 216750 - DNA, 3609 bp, synthetic construct
  misc_feature 1..3609: note = Description of Artificial Sequence: Synthetic coding sequence
  source 1..3609: mol_type = other DNA
atgaacaccaaggacacgaccgaagtggccgagaattctcatcatcttaagatcttcctgcccaagaaacttctggaatgcctcccgaggtgtccactgctgccaccagaaagactgcggtggaacacaaatgaagaaattgccagctatctcattacatttgaaaaacatgatgaatggctgtcctgtgctcctaaaactaggccgcagaatggtagcataatcctgtataaccggaaaaaggtgaagtaccggaaagatggttatctctggaagaagcggaaggatgggaaaacaacccgtgaagaccacatgaagctgaaggttcaaggtatggagtgtctgtacgggtgctatgtgcatagctctattgtccccacgtttcacagacggtgctattggctcctccagaatccagatatcgtcttagtgcattatttaaacgtgccggctctggaagactgcggcaagggctgttctccaatcttctgttctatatcatccgaccggagagagtggctgaagtggtcacgggaagagcttctaggtcaactgaaacccatgttccacggcataaaatggtcctgcgggaatgggacagaggagttcagcgtggaacaccttgtacagcaaatcctggatacccatccgaccaaacccgctccacggacacacgcctgtctctgcagcggaggcctgggctccgggtcacttacgcacaagtgttccagtacaaagcaccgcatcatcagcccgaaggttgaacctagagctttaaccctcacgagtatacctcacgcacaccctcccgagccacctcccttgatagcccctctccctcctgaactcccaaaagcccacacaagtccatcctccagctcatcctcatcatcctctggcttcgcagaacctctggagatcagaccttcccctccaacctccaggggcggatccagtcgaggaggaaccgcaatcctcctgctgactggactagagcagagagctgggggactgaccccaacccgacacttagctccccaggctgacccgagaccttcgatgtctctggctgtggtggtgggcaccgagccctccgctcctcctgctccaccatcacctgcatttgacccagatcggtttctcaactctccccagcggggtcagacctatgggggaggacagggagtctcaccagattttcctgaagcggaggccgcacataccccatgctccgccctggaaccagctgccgctcttgaaccacaggccgcagccaggggacctcctccacaatccgtggctggcggacggcgtgggaattgcttttttattcaggacgatgattcaggagaggaactgaagggccacggagccgcacctcctattccttcgccgcctcccagtcctcccccttcccccgcacccctagagccaagctccagggttggccgaggcgaggccttattcgggggtccagtgggcgcaagcgagcttgaacccttctccctcagctctttccccgacttaatgggcgagttgatttcagatgaggctccaagtatccctgccccaactcctcagctgtcccccgctctatccactatcacagacttttcacctgagtggtcttatccagaaggtggcgttaaagtgctcattaccggcccatggacagaggctgctgaacattacagctgtgtgttcgatcacatcgcagtgccagccagtctggttcagcccggtgtgctgcggtgctactgccctgcccacgaagtcggactggttagtttgcaggttgcgggacgcgaagggccacttagcgccagtgtgcttttcgaataccgtgccaggcgctttctgtctctccccagcacccagctcgattggctgagccttgatgacaatcaatttcgaatgtctattctggagcgcctcgagcaaatggagaaaaggatggcggaaattgctgccgcagggcaggtaccctgccagggcccagatgcaccaccagtgcaagacgaagggcaagggcctggctttgaggctcgcgtggtagttctggtggagagtatgatcccacgctcgacatggaaggggcctgaacgtctggctcatgggtccccgttcaggggaatgtctctgcttcacctggctgccgcacaagggtacgcaaggctcattgaaactttatcccagtggcgctctgtcgaaactggcagtctggacctagaacaggaagtggatccattgaatgtggatcatttctcatgtaccccactcatgtgggcctgcgcactgggccacctcgaggccgctgtgctgctattccgttggaacaggcaggccctgagtattcccgactcgttgggcaggctccccctctctgtggcccatagtcgcggacacgttcgtctggccagatgccttgaggaactccagcgtcaagagcccagtgttgagccacccttcgccctgagcccacccagctcatcacccgacaccggactgagcagtgtttctagtcctagcgagctttctgatgggaccttttccgtcactagtgcctacagctcggcccctgatggttctccaccccctgcacccttgcctgccagtgagatgacgatggaagacatggccccaggtcaactctctagcggggtcccagaggcgccattgctgttgatggattacgaggccactaacagcaagggtcccctttcatccctgcccgctttgccacccgcttctgacgacggcgctgcccctgaagatgcagactcaccccaagctgtggacgtgatccccgttgatatgatttccctagctaagcagattatcgaagcaactcctgaacgtatcaaaagggaggatttcgtgggtttacctgaggctggtgcgtcaatgagagagcggacaggcgcagtggggcttagcgagaccatgtcttggttggcctcctacttggaaaatgttgatcacttcccttcttctacacccccatccgaactcccctttgagcggggaagattagcagtaccatcagcccctagctgggcagagtttctgtctgctagcacttccggcaagatggagtccgatttcgcattgctgacattatccgatcatgagcagagggaactttacgaagccgcaagagtgatacagactgccttcagaaagtataaagggaggcggctgaaggagcaacaggaagtggccgctgctgtaattcagcgctgttaccggaagtataagcaacttacttggatcgctttaaaattcgcgttgtataagaagatgacgcaagcagccatcctgatacagtctaaattccggtcatactacgagcagaagaggtttcagcagtcacggagagccgcagttctgatccagcaacattaccggagttaccggaggcggcctggacctccacatagaacttccgccacgctccctgctaggaataagggcagctttctcactaagaaacaggaccaggcggctcgcaagataatgaggttccttcgtaggtgtcgtcatcggatgagagagttgaagcagaaccaagagctagagggccttccccagccagggttggccacatag

SEQ ID NO: 216751 - DNA, 3588 bp, synthetic construct
  misc_feature 1..3588: note = Description of Artificial Sequence: Synthetic coding sequence
  source 1..3588: mol_type = other DNA
atgaatacgaaggacactacggaggtggcggagaatagccatcacctcaagatttttctaccaaagaagctgctggaatgtctgcccaggtgtcccctgctcccacccgagcgccttagatggaatactaatgaggagatcgcatcctatctgatcacatttgaaaagcacgacgagtggctgagctgcgcacccaagaccagaccacaaaatggaagtataattttatataatcgaaaaaaagtaaagtataggaaggacgggtatctgtggaaaaaacggaaggatgggaagaccacccgcgaggaccacatgaaattgaaggtgcagggaatggaatgcctttatgggtgttatgtccatagttccatagtgcctacgttccaccgacggtgttactggcttctccagaacccagacatcgtgttggtccattacctgaacgtgcctgccctggaagattgcggcaaagggtgctctcctattttctgcagcattagcagtgatagaagagagtggctcaaatggtctagagaagaattgcttgggcagttaaaaccaatgttccatggcataaagtggagttgtggcaacggtacagaggagttcagcgtggagcatctggtgcagcagatcctggatacgcacccaactaaacctgccccacggactcatgcttgtctgtgctctgggggtctaggcagcgggagcctgactcacaaatgttcatcaactaagcaccggatcatctcgcctaaggtcgagccaagggcattaacgttaacgagcataccgcacgcccatcccccagaaccgccaccccttatcgcaccccttcccccagagctacccaaggctcatacaagtccgtcctcctcttcatcttcctcgagttctggcttcgcggaacccttggagattcgtccatcacctcctacatctagaggcggaagctcgcgtggtgggaccgctattctgttgctcactgggctggaacaacgggcaggcggtctcacgccaacacgccacctggcaccccaggcagatcccaggccatccatgtccctagctgtcgtggtcggcaccgagccatccgcccctccagccccaccttctcctgcctttgatcctgaccgctttctgaactccccccaacgtgggcagacttatgggggtggacagggggtatcacccgactttccggaggcggaagccgctcacaccccatgcagtgccctagagcctgcagcagccctagagccgcaggcggcagctagagggcctccaccccaaagcgtggcgggaggcaggcggggaaattgttttttcatacaggacgatgacagtggcgaggaattaaaggggcacggggcagcacccccaattccctcccctcctccttcaccccctccatctcctgccccactggaaccctcctcacgagtagggaggggggaggccttatttggtgggccagttggcgcatctgaactcgagccattctctctctctagctttcccgatttaatgggagagctgatttctgatgaagcaccgagcattcccgctcccaccccacaactgtcgccagcattgtccactatcacagatttctctccggagtggagttacccggaaggcggagtgaaggtgcttatcactgggccatggaccgaagccgcagagcattactcttgtgtcttcgaccacatagccgtgcctgcctcattggtgcaacccggtgtccttagatgctactgtccggcacacgaggtgggccttgtgtcgctgcaggtggccggacgagagggaccgctgtcagccagcgtactatttgagtaccgggcacgcagattcctgagcctgccaagcacacaattggattggcttagcctggatgacaatcagttcagaatgtcaattctcgagaggctcgaacaaatggaaaagcgtatggcagaaatcgctgccgctggccaggttccatgtcagggccctgacgctccaccagtgcaggatgaggggcagggaccagggtttgaggccagggtggttgtgctagtggagtccatgatcccaagatcaacgtggaaagggcctgaacggttagcgcatggatctccatttcgagggatgtctctgcttcatcttgcagccgcacagggttatgctcggctgatcgagacgttgagccagtggcgtagcgtagagaccggttcacttgatcttgaacaggaggttgaccctctgaatgttgatcacttttcctgtactcccctcatgtgggcctgtgccctaggacatctggaagccgcagtgctgctgtttcgatggaatcgccaggctctcagcatccctgattccctgggaagacttcctctgtcagtggcccacagccggggacacgttcggctcgccaggtgcttagaagaactgcaacggcaggaacccagtgtcgagcctcccttcgcattgtcccctcccagtagcagcccggataccggattgtcatcagtgagcagtccctctgaactgagcgacggcaccttttccgtcacctccgcttatagttctgcccctgacgggtcacctcctccggcacccctgccggcaagtgaaatgacaatggaagatatggctccaggtcagttgtcatccggggtaccagaggctccgctcctactgatggactacgaggcgacgaattctaagggtcccttgtcctcccttcctgccctgccaccagctagcgatgacggtgcggctccagaggatgccgattctcctcaggccgtcgatgttattccggttgatatgatttctttagcaaaacagatcatagaggcaacccctgagcgaattaaaagggaggattttgtgggcctcccggaagccggagcttcaatgagggagcgaaccggagccgttggactatccgagactatgtcttggctggcttcctacctggagaacgtggatcatttcccatctagcactcccccatcagaactcccattcgagagagggcgtctcgccgtgccttcagcaccaagctgggcagagtttttaagcgcatcgaccagtggaaagatggagtcagactttgcgctgctgaccctctccgatcacgaacagcgagagctgtatgaggctgctagggtaatccaaacagcatttaggaagtacaagggacgtaggcttaaggagcagcaagaggtcgccgctgccgtcatccagcgctgttaccgcaaatataaacagttcgcactgtacaagaagatgactcaagccgcaattctgattcagagcaagttcaggtcctattatgaacagaaacgcttccagcagtcccgccgtgctgcagtgctgattcagcaacactataggtcttacaggcgtcggccaggacctccccatagaactagtgcaactctccccgctaggaacaagggaagttttctgaccaaaaagcaggaccaggccgctagaaagataatgcggttcctccggcgatgcaggcacagaatgagagagctaaagcaaaaccaagaactagagggcctgccccaaccaggcctggcgacttag

SEQ ID NO: 216752 - DNA, 3606 bp, synthetic construct
  misc_feature 1..3606: note = Description of Artificial Sequence: Synthetic coding sequence
  source 1..3606: mol_type = other DNA
atggggacagattcaccatctccgaggcccttacgcccaggtgtgacattacctccaggagcattaacgatgaataccaaggatactactgaggtggcagaaaattctcaccaccttaaaatcttcctgccgaaaaaacttttggagtgcctcccccgatgccccctgttgcctcctgagcggctacgttggaataccaacgaggagattgcctcatatctgattacatttgaaaagcacgacgaatggctgagttgcgctccgaagactagaccccagaacggatctatcatactctacaatcgtaagaaagtgaaatatagaaaagatgggtacctgtggaaaaaacgcaaggacggcaaaactacgcgggaagatcatatgaaactcaaggtgcagggcatggaaaatcccgacatagtcctggtgcattatctcaacgtgcctgcactcgaagattgcggcaaaggttgctctccgatcttctgctcaatctccagcgatcgcagagaatggttgaaatggagccgcgaggagttgctggggcagttgaagccaatgttccatgggataaagtggtcctgcgggaatggcacggaagagttctctgtagaacacctggtgcaacagatacttgatactcacccaactaagccggcacccaggacacacgcctgtctctgctccgggggactcggatccggttccctgactcacaagtgctcatcaaccaagcaccgcatcatctcacccaaggtagaacccagggctcttaccctgactagtatccctcacgcccacccacctgagccaccccctctcatagcgcctttgcctcctgagttaccaaaagctcatacatctccctcctcttctagtagttcctcatctagcggctttgctgagccactggagatacggccatctccgccaacttcacgaggtggctctagcaggggcggaacagcaatattgctcctcactgggttagaacaacgcgctgggggactcacgcctaccagacacctggctccccaggccgacccaagacctagcatgtcccttgccgtagtggtgggcacggagccatctgcacctcctgctcccccttcccctgcttttgacccagataggtttcttaattctcctcagaggggccagacctatggcggaggccagggagtgagccctgactttcccgaggccgaggctgcacatacaccatgctcagctctggagcccgctgctgcactggaaccccaggcggctgcgaggggtcctccacctcaaagtgtggccggagggaggcggggaaactgtttctttatccaggacgatgactccggcgaagagttaaaaggacacggcgcagccccacccattccctccccaccaccatctccaccgccatcaccagcaccgctggagccttcgtcacgcgtcgggaggggagaggccttattcggcggacctgtgggcgcttctgagctcgagccattcagtttgagttcattccccgatttgatgggtgaactcatcagcgacgaggccccaagtatcccagcccctactccccagctgagtcctgctctgtccacaattaccgatttttctcctgagtggtcctacccagagggaggagtaaaagtgctgatcaccggcccttggaccgaggcagcggagcactactcatgcgtttttgatcacatcgccgtccccgcaagcctggtccagcctggcgtgttgcggtgctattgtccagcacatgaagttggattggtctctctgcaagtcgccggacgcgaggggccactatcagccagcgtgctctttgaatatcgcgctaggaggttcctgagcctgccgagcacacagctcgattggcttagtctggacgataaccagtttaggatgtccatcctcgagcgtctggagcaaatggaaaagagaatggctgagattgccgctgctggtcaggtgccttgtcagggtcccgatgcacctcctgtccaagatgagggccagggaccaggttttgaagccagagtggtggtcctggtcgaaagcatgatacctcggtcaacctggaaaggaccggaaaggctagctcacggctcccccttccgagggatgagtcttttgcatttagctgctgctcaagggtatgccaggcttattgaaaccctgagtcagtggcgcagtgtggagacaggctctctggatctcgaacaagaggtagaccccctgaacgtagatcactttagctgcacacccttaatgtgggcctgcgctctcggccacctagaagctgcggttctgctgttccgttggaacagacaggccttgagcatcccagattctctcggcagactccctctctctgtggcacatagcaggggccacgtcaggctggccagatgcctggaagaactgcagaggcaggagcctagcgtggaacccccattcgccctttcccctccgtccagttcccctgacactgggctttccagtgtgagttccccttccgagttgtctgatggcaccttctctgtgacgtcagcatacagcagtgctcccgacggatcccctcctcctgcaccactgccggcatcagagatgaccatggaggatatggctcccggacagctgtcgagcggggttcctgaggcgcctctgctgctcatggattacgaggccacgaattcgaaagggcctctgtctagcctgcctgctcttccacctgcaagcgatgatggggctgctcccgaagatgctgactcaccacaggcggtggacgtcatccccgttgatatgatatcccttgcgaaacagattattgaggcaacccccgaaagaatcaaaagagaagacttcgtgggccttcctgaggctggggcaagtatgcgggaacggactggagccgttggcttgtcggaaaccatgagttggctagcctcatacctggagaacgtcgatcacttcccaagtagtacgcctccctccgaacttcctttcgaacggggaaggctggcagtgccaagcgcaccaagctgggctgagtttctctcagctagcaccagcggtaagatggagagcgattttgcgctcttaaccttatccgatcacgaacaacgagaactttatgaggccgctagggtaatccagactgcctttcggaagtataaaggcaggagactaaaagaacaacaggaagtggctgccgcagtgattcagagatgctatagaaagtataaacagctgacgtggatcgcacttaagtttgcgctttacaagaagatgacacaggcagcgatactcattcagtctaaattcaggagctactatgagcagaagcggttccagcaaagccggcgagctgcagtgctaatccagcaacactatagaagctatagacggcgtcctggaccaccgcatcggacctccgctactctacctgcgcgtaacaaaggaagttttctcactaagaagcaagaccaggcagcaagaaagatcatgcgttttctgcgtagatgtaggcatcggatgagagagctgaagcagaatcaggagctggagggcctacctcaaccagggctcgccacatag

SEQ ID NO: 216753 - DNA, 3594 bp, synthetic construct
  misc_feature 1..3594: note = Description of Artificial Sequence: Synthetic coding sequence
  source 1..3594: mol_type = other DNA
atggcagccgctgcggtgacccgcggaacaccaggcgagaattcccaccacttgaagattttcctgccaaagaaactgcttgagtgcctgccaagatgccctcttctccctccagaaaggctcaggtggaacacaaacgaggaaattgcctcctatcttataacctttgaaaagcacgatgaatggctctcctgtgctcctaaaactcgtcctcaaaacggaagcattatcctgtacaatcgcaaaaaggtgaagtataggaaggacggctatctgtggaagaaacgaaaagatggaaagaccacacgagaagaccatatgaaattaaaggttcagggtatggagtgcctctatggctgctacgtccacagtagtatcgtccccacttttcaccgacggtgctattggctcttgcagaatcccgatatcgtgctcgtgcattacttgaatgtccccgcactcgaagactgcggcaaggggtgtagtcctatattctgtagcatcagttctgacaggcgcgagtggttaaagtggagcagagaggaactgcttggccagctgaagccgatgttccatgggataaaatggtcgtgtgggaatggtacggaagagttttccgtggagcatctggtccaacaaatccttgacacgcaccctacaaagccggcaccccgtactcacgcttgtttatgctcagggggactggggtcaggttccctgacacacaagtgttcaagtaccaagcatcgcataatatcacccaaggtcgaaccgagggccttgactctgacttcgattccccacgcgcaccctccagagcctccccctctcattgcaccactgccgccagagcttccaaaggcccatacaagtccgagctcgtcttccagtagttcttcatcagggtttgccgaacctctggaaatccgaccaagcccccctacatctcgcggaggcagctctcggggagggacagcaatcttgctcttgactgggttagagcagcgtgctgggggtctgacacccacacgccatctggccccacaggctgacccccgtccttctatgtcattggccgttgtggtgggtacggaaccctctgctccacctgcaccaccatctccagctttcgatcctgacagattcctgaacagccctcagagaggccaaacctacggtgggggacaaggtgtttctccagattttccagaagccgaggccgctcacaccccatgctccgccttagagcctgctgccgctttggagccacaggcagccgcaaggggtcctccacctcagtcagttgctgggggacgaagaggcaattgtttcttcattcaggacgacgactctggcgaagagctgaagggccacggcgcagcaccaccaataccttcacctccgccatcacctccaccctcccctgctcctctcgagcctagttctagggtgggcagaggtgaggccctcttcggcggaccagtgggtgcgtccgagcttgagccgttctcactgagctctttccccgatctcatgggcgagctgatttccgatgaggcgccaagtatcccagctccaacccctcagctcagccccgctctgagcacaattacggacttctccccggagtggagttaccctgaagggggagttaaggttcttataacaggaccttggaccgaggccgctgagcactacagttgcgtcttcgatcacattgcagtacccgcatccctggtgcagcctggagtcttgagatgttattgtccagcccatgaggtgggactcgtgagcctgcaggtagctggtagagagggtccattgtcggcctcagtccttttcgaataccgcgcacggcgtttccttagcttgccgtctacacagcttgactggttgtcactggatgataaccaattcagaatgagcatcctggaacggctggaacagatggaaaagcgcatggctgaaatagccgctgcagggcaggtcccttgccagggcccagacgccccacctgtgcaggacgaaggccagggcccaggatttgaagctcgggttgtcgtgctcgtggagtctatgatcccaagaagcacatggaagggacctgagcgcttggctcacggttcaccctttaggggaatgtcattgctccatctggctgcagcacagggatatgcaagactcattgagactctgtcccagtggaggtcagtcgagacgggctccctggatctggagcaggaggtggaccccctgaatgttgaccacttttcatgtactcccctgatgtgggcctgcgccttgggtcacctagaggccgcagtccttttattccggtggaacaggcaggctcttagcattcctgactctctgggtagactgccgttaagcgtggcacactcacgaggtcatgtgcggctcgcaagatgcttagaagagctgcagaggcaggagccttctgtagaaccgccattcgccttgtcaccaccctcttccagccctgacacgggcctgtcgagcgtgtcctctccgtccgagctgtctgacggcaccttcagtgtgaccagcgcatattcctccgcccctgatggctctccacctcctgctccactccccgcaagcgaaatgaccatggaggacatggcccctggacagctgtcctcaggcgttccagaagctccacttttgctgatggactatgaagccacaaactcaaagggccctctgagcagtttacctgctctccccccagcgagcgacgatggcgctgcaccggaggacgccgattcaccccaggcagtggacgtgattccagtggatatgataagcctggctaagcaaatcatcgaagcaactcctgaaagaattaagagagaagactttgtcggcctgccagaggcaggagccagcatgcgagaacgcacaggtgccgtgggactgtcagagacgatgagctggttggccagctatctggaaaatgtcgaccactttccaagcagcacacctccaagcgaattaccattcgagcggggtcgattggcagtccctagcgcacctagttgggcagaatttctgtcagcctccaccagtggaaagatggagtccgatttcgcactattaactctctccgaccacgaacagcgcgagctctacgaagccgcaagagtaattcaaacagcttttagaaaatataaaggcaggcgacttaaagagcagcaggaggtggctgcagccgttattcaacggtgctatcggaagtacaaacagttcgccttgtacaagaaaatgacgcaagccgcaatcctgattcaatctaagtttcgctcctactatgagcaaaagcgattccaacagagtagacgagctgccgtcctgatccagcaacactatcggagctaccggaggcgccctggcccacctcaccggacttcagcaacgctccctgctaggaataagggatctttcctcactaagaaacaggaccaggcggcacgcaaaattatgcggttcttacggcgatgccggcatcgaatgcgggagctgaagcaaaatcaggaactggagggattgccacaacctggtttagctacatag

SEQ ID NO: 216754 - DNA, 3726 bp, synthetic construct
  misc_feature 1..3726: note = Description of Artificial Sequence: Synthetic coding sequence
  source 1..3726: mol_type = other DNA
atggggacagactccccatccccacggcctctaagaccaggggtgacattgcctcctggagcccttacgatgaatactaaggacactacagaggtcgcagaaaactctcaccatcttaagattttcctgccaaaaaagcttttagaatgtttgccccgatgccctctacttccaccagagcgacttcgttggaatacaaacgaagagatcgcttcctacctgatcacctttgaaaagcacgacgagtggctctcatgcgcccctaagacgcgcccacaaaatggcagcataatcctgtacaaccgcaagaaggtgaaatatagaaaagatggctatctctggaagaaacggaaagatggtaagacaaccagagaggaccacatgaagctgaaggtgcagggcatggaatgtctatacggctgctacgtgcactcatctattgttcctactttccatcgtcggtgttactggctgctccagaatccagacattgtgttagttcattacttgaacgttcctgcgctggaagattgcggtaagggatgctcccccatcttttgcagcatttcgtccgataggcgggagtggctcaagtggtctcgtgaggaactgctaggccaattgaagcccatgttccatggcatcaagtggagttgcggaaatgggacagaggaattcagtgtggagcacctagtgcagcagatcttggatacccacccaacaaaacccgcaccacgaacccacgcatgcctctgctcaggtggactcggatcaggttcactaacccataagtgcagcagcacgaagcaccgaatcatctcccctaaagtagaaccgagagctctgaccttgacttccataccacatgcccatccacccgaacccccaccactaatcgccccactcccacccgaactaccgaaagcgcatacaagtcctagctctagcagctcgtcctcctcctctggttttgcagagcctctagaaattcggccatccccacctacctctcgcggaggtagtagccggggtggtactgctatccttctcctgaccggccttgagcagagggccggaggactgacccctaccagacacctagccccacaggctgaccctagaccatccatgagccttgcagtggtcgtggggactgagccttcggccccacctgctcctccttcccctgctttcgatcctgacaggtttctcaattcgccccagagaggtcagacgtacggagggggtcaaggggttagccctgattttcccgaggccgaggccgctcatactccttgctccgctctggaacccgcagctgccctagaaccccaggctgcagctagaggcccaccccctcaaagtgtggcaggcggacgacggggaaattgcttctttatacaggatgatgactctggcgaggagttgaagggccatggggctgctccccctatcccctcccctccaccgagtcctcccccttcccctgcccctctcgagccttcctcacgcgtaggtagaggagaggccctgttcggtggacccgtgggcgcaagcgaattagaaccgttttcactgtcaagcttccctgacctcatgggtgagctgatttccgacgaagccccttctatacctgcccctactcctcagttgtcgccggcactgagtacaattacagatttcagtccagagtggtcctatccagagggtggcgtgaaggtgctcatcacggggccatggaccgaggccgctgaacactactcttgtgtattcgatcatattgctgtgccagcgagtctggtgcagcctggcgtcttaagatgttattgtccggctcacgaggtaggtctggtcagccttcaggtagctggtcgggaaggccctctgtcagccagcgtgttgttcgagtacagggcacgtcgctttctgtcactgccctctacacagctggattggctctcactcgatgacaaccagtttcgcatgtctattcttgaacgattggaacagatggagaaaaggatggccgagatagccgcagccggacaggtaccatgccagggccctgacgcgccacccgtgcaggatgagggtcagggacctggttttgaagccagagtggttgtgctggtcgaatcaatgattccaaggagtacatggaagggtccagagagacttgcccatggctcaccttttcgaggcatgtccctgttacacctggcagcagcccaaggatatgctcgactcattgagactctgtcgcagtggaggtcagtagagacggggtcactggacttggagcaggaggttgacccacttaatgtcgatcatttctcttgtacgcctctcatgtgggcttgtgccctcggccatctcgaggcagcagttctcctgttccgttggaataggcaggcactcagtatccctgacagcttggggcgtcttcccttatcagtggcacattccaggggacacgtcaggcttgcaagatgcctcgaggagctgcagcggcaggaaccatcggttgaacctccttttgcattaagcccaccatcttcttcccctgacacggggttgtcttcagttagttctccctccgaactgagtgatggcactttttccgtgacttctgcttatagctctgcacctgatggctcaccaccaccagccccactccccgcttccgaaatgacaatggaggatatggccccaggacagctgtccagcggtgtgccagaggcaccactgctgctgatggactacgaagccactaactcaaaggggccactaagcagcttgcctgctctgcctccagcctctgatgatggggctgcaccagaggacgcggacagtccccaggcggtggatgtcatacctgtcgatatgatatctctggcaaagcaaatcatcgaagcaacacctgagaggattaaaagagaagacttcgtgggactccctgaagccggagcatccatgcgcgagagaaccggcgcagtcggcctcagcgagacaatgagctggctggcatcctacctggagaatgtggatcatttcccctcttctacacccccttccgagttgccctttgagcggggtaggttggcggtgccttccgccccaagttgggcagaattcctttccgcaagcaccagcggcaagatggagtccgactttgcacttctcacgttgagcgaccatgagcagcgcgaactctatgaggctgctcgtgttattcaaaccgcttttcgaaaatacaaaggaaggaggcttaaagagcagcaggaggtggccgctgcagtaattcagcgctgctatagaaagtacaagcaacttacttggatcgcactcaaattcgcactttacaagaagatgacccaggccgcaattctgatccaatccaagtttaggtcatactatgaacaaaaaagatttcagcagagcaggcgtgcggctgttctcatacagcaacactaccgctcttacagacgccgacccggaccaccgcacagaacctctgccacacttcctgcccgtaataaactgttgtcacaccaggaagccggtccaggctcccctgaggatcatgaaattcctgccgctctgccaacccaggacgagggaaccgaagctgagcccggtgctggccgtgcttctccagctgggaccggacatatgacctggcctccaccttttagtccaccgtggggtcgcctggtccaaagctag

SEQ ID NO: 216755 - DNA, 4470 bp, synthetic construct
  misc_feature 1..4470: note = Description of Artificial Sequence: Synthetic coding sequence
  source 1..4470: mol_type = other DNA
atgggtgatgcagcggaccctagagaaatgcggaaaacgtttatagtgcccgcaattaaaccattcgatcactatgatttctcaagggccaagatcgcctgcaatcttgcttggctggttgctaaggcttttggcacagagaatgtaccagaggagcttcaggaaccattttacacggatcaatacgaccaggagcatattaaaccaccagtggttaacctactgttgtccgcagaactttattgcagagctgggtctctgattctgaagtccgacgcggcaaaaccgctcctggggcacgatgccgttatccaggcattagcccaaaagggtctctacgttacagatcaggagaaactggtcacagaacgcgacctgcacaagaagcctattcagatgtcagcccatctggcaatgatcgatacccttatgatggcatatacagtcgagatggtcagcatcgaaaaggtcatcgcttgcgcgcagcaatactctgcctttttccaggcaaccgacctgccatacgacatcgaggatgccgtaatgtattggatcaacaaagtcaacgagcatctcaaggacatcatggagcaagaacagaagctaaaggaacaccacacagtcgaggcaccaggtgggcagaagtcaccttcaaagtggttctggaaactggttcctgctcggtacaggaaggaacagactctgctaaagcagctgccctgtatacccctggtcgagaatctgctaaaagatggcactgacggatgcgccctggcagccctgattcacttctactgccccgatgtagtgaggttggaggatatttgtctgaaggaaactatgagtctggccgatagcttgtataatctacagttgatccaagaattttgccaggaatacttaaaccaatgttgtcacttcaccctggaggacatgttgtacgccgcatcgagcatcaaaagtaattacttagtgtttatggctgagttattttggtggttcgaggtcgttaaaccaagctttgttcagccacgggtggtgaggccacagggagccgaaccagtgaaggatatgccatcgatccccgtactgaatgctgccaaaaggaatgttctcgatagcagctccgatttcccatcctccggcgaaggagccacatttacacagtctcaccaccacctgccatcaagatacagtcggccacaggctcacagttcagcttcaggcggaatccgacggtcttcctctatgtcttacgtggatggtttcatagggacctggccaaaggaaaaaaggtcttctgtgcacggggtgtctttcgacatctctttcgataaggaggacagcgtgcaacggtctacacccaatagaggcatcactaggagtatttctaacgaaggactgactctcaataatagccacgtctcaaaacatattcgaaagaatctgagctttaagccgatcaatggagaagaggaagccgaaagcatcgaggaggaattgaacatcgattcacattctgacttaaaatcgtgcgtccctctcaatacaaacgagctcaactccaatgagaacattcattataaactccctaacggcgcactgcaaaaccggatcctgctggacgagttcggcaaccagattgagacaccttccattgaagaagccctgcagattatccatgatactgagaaatcccctcatacgccgcaacctgaccaaattgcaaacggtttttttctccactcccaagagatgtctattttgaattcaaacatcaaactcaatcaatcatcccccgacaatgtgacagatactaagggagccctgagcccgataacggataacaccgaggtcgacaccggcattcacgtgccatctgaagacatcccagaaaccatggacgaggactcatccctgcgagattatactgtgagtcttgatagtgacatggatgacgcttccaaatttctccaggactacgacattcggaccggcaacaccagggaggcactgtctccgtgtccctctactgtgtcgaccaagagccaacctggttcctccgcttccagcagttcaggggtaaaaatgactagttttgccgagcaaaagttccgaaaactaaatcacaccgatggaaaatcctccggatcctcttcgcagaaaactacccccgaagggagtgaactgaatatccctcacgtagtcgcttgggcccagatcccagaggaaactggcctccctcagggaagagacaccacccaacttctggcaagtgaaatggtgcatctacgaatgaagctcgaggaaaagcggcgagccattgaggctcagaagaaaaaaatggaggctgcgttcacaaaacaaagacagaaaatggggagaactgcattccttacggtggtcaagaaaaaaggcgatggaatcagcccactgcgagaggaagccgcaggagccgaggatgagaaagtctataccgatcgggctaaggagaaggagagccaaaagacagacggacagcggtcaaagtcattagcagacatcaaggagtccatggagaaccctcaggcaaagtggctgaaatcccctaccactcccatcgaccctgagaagcagtggaatctcgccagcccaagcgaagagacattgaacgaaggtgagatccttgagtatactaaatccatcgagaagctgaattcttccctgcatttcctgcagcaggagatgcagcgactgagtctgcagcaggagatgctgatgcagatgagagaacagcagtcttgggtgatctcccctccacagcctagcccacagaagcagatcagagattttaagcccagcaaacaagccggactgagtagcgccattgcccctttttcctcagactccccaagaccaactcacccaagccctcagtcctcaaatcgaaaaagcgcctcgtttagcgtgaagtcacagagaacacccagaccgaatgagctgaagataactccactgaaccgaaccctaactcctccgaggagtgtggattctctccccagattgcggcgattctctccaagccaagtgcccatacaaactcggtccttcgtgtgttttggagacgacggtgaaccacaattgaaggagagcaagcccaaggaagaggtaaaaaaagaagaactcgaatctaagggaactctagaacaacggggacacaatcctgaagagaaagaaattaagccattcgagtcaacagtatctgaagtgttgagtctccctgtcacagaaacagtatgtctcacaccaaacgaggatcagttgaatcagcccacagagccccctcccaagccggtgtttccaccaaccgcccctaaaaatgttaacttgatcgaagtgagtctgagtgatttgaaaccgccagagaaggccgacgtcccggttgagaaatacgacggggaatcagataaggaacagtttgacgacgatcagaaagtttgctgcgggttcttcttcaaagatgaccaaaaagccgagaacgacatggcaatgaagcgtgcagccttgcttgaaaaaagactgcggagggagaaagagactcaactccgcaagcagcaattggaggctgaaatggagcacaagaaggaggagacacgtagaaagactgaggaagagcggcagaagaaagaggatgaacgcgctaggagagagtttattcggcaggaatatatgcgcaggaagcagctcaagttgatggaggacatggatacagtcatcaagcctaggccacaagtcgtgaaacagaagaagcaacggccaaagagcatccacagagatcatatcgagtctcctaagacccccatcaagggcccaccagtctcttctttgagcttggcaagcctcaatacaggcgataacgaaagtgtccactcgggtaagagaacccctcgttcagagagtgttgagggcttcctctctccctctcgttgcggttccagaaacggcgagaaggactgggagaacgccagtacaacctcctccgtggcatcaggaaccgagtataccggtcctaaattatataaagagcctagcgcaaagtccaataaacacataattcagaacgcccttgcacattgctgtctagcaggaaaggtcaatgagggccaaaagaagaagatactcgaagaaatggagaagtccgacgccaataatttcttaatccttttccgggattcgggatgccagttccggagcttatatacctactgtcctgagacggaagagattaataagctgacagggataggtcctaagtcaatcaccaagaagatgatagagggattatataagtataactctgatcggaaacagttttctcatatccccgcaaagacactgagcgcttctgtcgacgcaattactattcattcccacctgtggcagacgaagcggcctgtcacaccaaaaaaactgctgcctactaaggcttag

SEQ ID NO: 216756 - DNA, 4437 bp, synthetic construct
  misc_feature 1..4437: note = Description of Artificial Sequence: Synthetic coding sequence
  source 1..4437: mol_type = other DNA
atgggcgatgctgccgacccgagagagatgaggaaaacattcatcgtccccgcaattaaacctttcgatcactacgacttctcacgagcaaagattgcttgcaacttggcttggctcgtggccaaggccttcggtacagagaacgtgcccgaggaactgcaggagccattttacactgaccaatacgatcaagagcacattaaacccccagtggtgaatttactgctgagtgctgagctgtattgtagggcgggaagcctgattcttaaaagcgatgccgcaaagccgctgcttggccatgatgccgttatacaggctctagcccagaaggggctgtatgtgaccgaccaggaaaagctggtcaccgagcgggatctgcataaaaaacctatccagatgagcgcacatctggcgatgatcgacactctgatgatggcctatacagtcgagatggtcagcattgagaaggttatcgcgtgcgcacagcagtattctgctttctttcaggccacagacctgccctacgatattgaggatgcggtgatgtactggataaataaggtgaatgagcacttgaaggatattatggagcaagagcagaagctcaaggagcaccacaccgtggaggctcccggtggccagaaggctcggtaccgaaaagagcaaaccctgttgaagcagctcccttgtatcccccttgtggaaaatctgctgaaagatggtacagacggctgcgctcttgcggctctcattcatttctactgtcccgatgtggttaggcttgaagatatttgtctcaaggagacgatgagcctcgccgacagcctgtacaacctgcagctcattcaggaattctgtcaggagtacctcaaccagtgttgccacttcacccttgaggatatgttgtatgcagcctccagtatcaaatctaactatctggtgttcatggccgaattgttttggtggttcgaggtggtgaagccttcatttgtccagccaagggtcgtgaggccacaaggcgcagaacctgtgaaagatatgccaagtatccctgtcctcaatgctgctaagagaaacgtgctggattcaagtagcgacttccccagctctggcgagggcgcaacctttactcagagccatcatcacttgcccagccgctacagtcgaccacaagcacatagctctgctagtggagggattcggagatctagtagtatgtcttacgtggacggctttattggaacgtggcccaaggaaaaacgatccagcgtccacggagtctcatttgacatcagctttgataaagaggactctgttcagcgttccacccctaacaggggaatcacacgaagcatttcaaacgagggtcttactttgaacaacagccacgtgtcaaagcatatccggaagaatctaagtttcaagcccatcaatggtgaggaagaagccgaatctattgaggaggagcttaacatcgattctcatagtgatcttaaatcctgtgttcccttgaatactaatgaactgaacagcaatgagaatatacactacaagctgcctaacggcgctctccagaacagaattttactggatgaatttggcaaccagatagagaccccttcaatcgaggaagccttgcaaattattcacgacactgagaaaagtcctcacacgccccagcctgaccagattgccaatggattttttctgcattcccaggagatgtccatccttaatagcaatatcaaactcaaccagagttcccctgataacgtcaccgacacaaagggtgcgctctcccccattacagacaacacagaagtcgacacaggaatccacgtccctagtgaggacatccctgagaccatggatgaagatagctctctgcgcgactacaccgtgtcactcgactctgatatggatgatgcatccaaattcctgcaggattacgatatccggaccggcaatacgcgcgaggccctctctccatgtccttctacagttagtaccaagtcacaacctggcagcagtgccagcagcagtagtggagtgaaaatgacttcctttgctgagcagaagtttcgaaaacttaatcacacggacggaaagtcatccggttccagttcccagaagacaacacctgaagggagcgagcttaacatcccgcatgtcgtggcctgggcccagatccccgaagagactggcttgcctcaggggcgagatactacacagttgctggcctctgagatggtgcacctgcggatgaaattagaagaaaagcggagggccatcgaggcccagaaaaagaaaatggaagccgctttcacgaagcagaggcaaaaaatggggaggacagcattcctgactgtcgtcaaaaagaaaggggacggcatctctccactaagggaggaggcagcaggtgctgaggacgaaaaggtctacaccgatagggccaaggaaaaggagagccaaaagacagatggacaacgatccaaatccctggctgatatcaaggagagcatggaaaatccacaggccaagtggttaaaatctcctactacccccattgatccggaaaagcagtggaatctggcaagcccatctgaagagaccctgaatgaaggcgagatactggaatacactaaaagcattgaaaagctgaacagctccctccactttctgcagcaggagatgcagagactgagcctgcagcaggagatgttaatgcagatgcgagagcagcagagctgggtgatctcccccccacaaccatctcctcaaaaacaaattcgtgattttaagcccagcaagcaggctggtttgagcagcgccattgccccttttagcagcgattccccacgacccacccacccctcaccccaaagctcgaacaggaagagcgctagcttctcagtcaagtcacagaggactccaagaccgaacgagctgaagatcacgccattgaatagaacattaactcctccaagatctgtggattcactgcccagactcagacgtttttctccatctcaagttcccattcagacgcggtcttttgtctgtttcggtgatgatggagaacctcagttaaaggagagcaaacccaaagaggaagtcaagaaagaggaattagaatccaagggaacgcttgagcagcgcggacataatccagaggaaaaagaaattaaaccctttgagtctacggtgagcgaggttctatctctgcctgtcacggagacggtgtgcctgacccccaacgaagatcagctcaaccagccaaccgagcctccccctaaacccgtcttccctccaaccgccccaaagaatgtgaacctcattgaggtgagccttagcgacctcaagccccctgagaaagccgatgtgccagtggaaaaatacgacggagagagcgataaggaacagttcgatgatgaccagaaggtttgctgcggcttctttttcaaggacgatcaaaaggcagagaacgacatggcgatgaagagagctgcccttctcgagaagagattgcgtcgggaaaaggaaacacaactgcgtaagcagcagctggaggcagaaatggagcacaagaaagaagagaccagacgcaagacggaggaggaaagacaaaagaaggaggatgaacgggcaaggagagagttcataaggcaggaatacatgcgtcgaaagcagttgaagctgatggaggacatggataccgtgattaagcctcggccacaggtcgtgaagcaaaaaaaacagaggccaaaaagcatccaccgcgatcacatcgaatcaccaaagaccccaatcaagggcccacccgtatcctctctgagtctggcttcattgaacacaggtgacaatgagtcagtgcacagcggcaaacgtaccccacgcagcgagtcagtggaaggtttcctaagtccgtcacggtgtggttcgcgcaacggagaaaaagattgggaaaatgcctcaactacaagtagcgtcgcgtctggtactgaatacacaggccctaagctgtataaggaaccctcggcgaaatccaacaaacacatcattcagaatgccctcgcacactgctgcctggccggaaaggtcaatgaaggtcagaagaagaaaatactggaggagatggagaaatccgatgctaacaacttcctaattctgttccgagactctggttgtcagtttcgctccctatacacttattgtcccgagaccgaggaaattaataaacttacgggtatcgggcctaagtcaatcacaaagaagatgatcgaggggctctataaatacaactccgataggaaacagttctcccatatccctgccaagactctgagcgcctcagtggatgcgataactattcattcacacttatggcaaactaaaaggcctgtgactcccaagaaactccttcccactaaagcttag

SEQ ID NO: 216757 - DNA, 4389 bp, synthetic construct
  misc_feature 1..4389: note = Description of Artificial Sequence: Synthetic coding sequence
  source 1..4389: mol_type = other DNA
atgggggacgccgctgatccacgcgagatgaggaagaccttcatcgtgcctgcaattaagccgttcgaccattatgatttctcccgggcaaaaattgcctgtaatctggcctggctggtcgcaaaggcattcggcacagagaacgtccctgaagagctccaagaacccttctacaccgatcagtatgatcaggagcacataaagcctcccgtggtgaacctgctcctgtccgctgagctctattgccgggcagggtccctgatccttaaatccgacgccgcaaagcctctcctcggccatgatgccgtcatacaggccctagctcagaagggactttacgtcacggaccaggaaaagttggtaactgaaagagatttacacaagaagccaattcaaatgtcggcccatctggctatgattgacaccctaatgatggcgtacaccgtggaaatggtgtcaattgagaaagtgattgcatgtgctcagcaatacagtgcatttttccaggcgactgatcttccatacgacattgaggatgccgtgatgtattggattaacaaagtaaacgaacacctgaaagacattatggaacaggagcagaagctgaaagagcatcacactgtcgaggcacctggcggacagaaggctagatatagaaaagaacagaccttactcaaacaactcccctgcattcctctcgtcgaaaacctgctgaaggacgggacggatggttgcgctctggccgcactcatccacttctactgcccagacgtggtccgtctcgaggatatttgcctgaaggagaccatgtctctggctgacagtctctacaacctgcagctgattcaggaattttgtcaggagtacctaaaccagtgctgtcatttcacactggaagatatgctgtacgctgcctcctccatcaagtctaattacctcgtcttcatggctgaactattctggtggttcgaggtagttaaaccatcatttgtgcagccgagggtcgtgcgccctcagggtgcggagcccgtgaaggatatgccctccatccctgttctaaacgcagccaaaagaaatgtactcgatagttcgtcagacttcccttcacggtactcaaggccacaggcgcactcgtctgccagtggcggtattaggcgctcctctagcatgtcctacgtggacgggttcatcgggacttggccaaaggagaagaggagttccgtccatggggtcagtttcgacattagctttgacaaagaggacagcgttcagcgctccaccccgaaccgagggataactaggagtattagcaacgaggggttgacactgaacaactcccatgtttctaagcacatccgaaaaaatttatcattcaagccaatcaatggtgaggaggaggccgagtcaattgaggaggagctaaatattgatagccattcagatctgaagagctgcgtgcctctgaacaccaacgagctcaatagcaatgagaacatccattacaagcttccaaacggagccctgcagaaccgtattctgctggatgagttcggcaaccaaattgaaacaccatccattgaagaagctttgcagattattcacgataccgaaaaatctccacacaccccacagccagaccagatcgcgaatggattctttctgcacagccaagagatgtcgatactgaatagcaatatcaagttgaaccaatcctcccctgataacgtaacagatacaaagggagcgttgagccccattactgacaacacagaggttgataccgggatccacgtgccatcagaagacattccggaaacaatggacgaggattctagtctgcgtgactatactgtttcgctggacagcgacatggacgatgcctccaaattcctccaagattatgatatcagaactggtaatacacgggaagctctgagcccttgcccgtcaactgtgtctaccaagtcacagcccggaagctcagcatcgagctcctccggagtgaaaatgacttcttttgcagaacagaagttccgaaagctgaatcacacagacgggaagtccagcgggtcctctagccaaaaaaccacacccgagggttcagaactcaacatccctcacgttgtggcttgggcccagattcctgaggaaacagggctaccccagggacgggacactacccagctgctggcctctgagatggttcacctgagaatgaaactcgaagaaaaaagacgggcaattgaagctcagaagaagaagatggaggcagcctttaccaagcagcgtcagaaaatgggtcggacagcctttctcactgtcgtcaaaaaaaagggcgatgggatttctcctttgcgcgaggaggcagcgggagcagaagacgagaaggtctataccgatcgtgccaaggaaaaggaaagtcagaagactgatggccagcgctccaaatcactcgctgatattaaagaaagcatggaaaacccacaagcaaagtggctgaagtctccaactaccccaatagaccccgagaaacagtggaatcttgctagcccaagtgaggagacacttaacgagggcgagatccttgaatataccaagagcatcgaaaagctgaactcctcacttcactttctgcagcaggagatgcagcgactgtccttgcagcaggagatgttgatgcaaatgagagagcagcaaagctgggtgatatcaccccctcagccctcaccacagaaacaaattagagacttcaaacctagcaagcaggcagggctatcatcggcgattgcccctttctcatctgacagccctcgccctacccatccgtcaccccagagcagtaacaggaagtccgcttctttttccgttaagagtcagaggactcctcgcccaaacgaacttaagataacgccattaaatcgaacgctcacaccacccagaagcgtcgattcattgcccagactgcggaggttcagcccctcacaggtcccgatccagacccgcagcttcgtgtgttttggcgacgacggcgagcctcagttgaaggagtcgaagcccaaggaggaagtcaagaaagaagagctggaaagcaagggtacactggagcagaggggtcacaatccggaggagaaggaaattaagccgtttgagtctactgtgtcagaagttttgagcctgcctgtcacagaaacagtgtgtttgactcctaatgaggaccaactcaatcagcccacagagccaccaccaaagcccgttttcccacccaccgcccctaagaacgtgaacctgatcgaagtcagcctgtctgacctgaagccgccagaaaaagcggacgtgcctgtggagaaatacgacggagagagcgacaaggagcaatttgatgacgaccagaaggtgtgttgtgggttttttttcaaggatgaccagaaggctgaaaatgatatggcaatgaagcgggctgccctgctggagaaacgacttcgacgagagaaggagacacagctcagaaagcaacagctggaggcggagatggagcacaaaaaggaggagacccgaaggaagactgaggaggaacgccaaaaaaaagaggatgaacgcgcacggcgtgagttcataaggcaggagtatatgcggaggaaacagctgaaactcatggaggatatggatacagtgattaagccacgtccacaagtcgtaaaacagaagaagcagcggcctaaatctatccaccgcgaccatatcgaaagccctaagacacctatcaagggtcctcctgtgtcatctctgagcctcgctagtttgaatacgggagataacgagagtgtccacagcgggaagcgcacacccaggtcagaaagtgttgagggattcctctcgcctagtagatgcggttcccgaaacggcgagaaagattgggaaaacgccagtactacctcctcagttgcctccggcacagaatacacaggcccaaaactgtacaaggagccttccgctaaaagcaataagcatatcatccagaacgctttggcccactgttgtctcgccggaaaggtgaacgagggccagaaaaaaaagattctcgaggaaatggaaaagagtgatgccaataacttcctgatactcttccgcgactcaggatgccagtttaggtctctctatacatactgtcctgaaactgaagaaatcaataagctcactggaattggacctaagagcatcactaaaaaaatgatcgagggactgtacaagtacaacagcgaccgaaagcaattttcccacattccagccaaaacattgagcgctagcgtcgacgcgataacgatccactcacacttatggcagaccaagaggcccgtgaccccaaaaaagctgttgcctacaaaagcttag

SEQ ID NO: 216758 - DNA, 450 bp, synthetic construct
  misc_feature 1..450: note = Description of Artificial Sequence: Synthetic coding sequence
  source 1..450: mol_type = other DNA
atggccgaccagctcaccgaagaacaggtgacagaatttaaagaggctttcagcctgttcgacaaggacggcgatggatgcattaccaccagagagcttgggacagtgatgcgtagcttaggacagaatcccactgaggccgagctgcgagatatgatgagcgaaatcgatcgtgacggcaatgggacagtggatttccccgaattcttggggatgatggcccgtaagatgaaagatacagataacgaggaggagattagggaagctttcagagtgttcgacaaagacggtaatggattcgtttcggctgccgaactgcgacatgtcatgacaaggctgggagaaaaactctccgatgaggaggtggacgaaatgatcagagcagctgacactgatggggatggccaggttaattatgaagaattcgtgcgcgtgctggtgtctaagtag

SEQ ID NO: 216759 - DNA, 546 bp, synthetic construct
  misc_feature 1..546: note = Description of Artificial Sequence: Synthetic coding sequence
  source 1..546: mol_type = other DNA
atggggctgcaacaagagatttcactccagccatggtgccaccaccctgccgaaagttgtcagaccaccactgacatgacagagcgcctgagcgcggagcaaattaaggagtacaagggtgtgttcgagatgtttgacgaggagggcaatggggaagtgaaaaccggggagctggagtggttaatgagtcttcttgggattaatcccaccaagtctgaactcgcttctatggcgaaggatgtcgacagggataacaagggcttctttaattgtgatgggttcctcgcactaatgggagtgtaccatgagaaagctcagaaccaggagagcgaacttcgggcagcattccgggtattcgataaagagggaaagggctacattgattggaatacccttaaatatgtgttgatgaatgcaggtgaacccctgaacgaagtggaagcagaacagatgatgaaggaggccgataaggacggcgaccgtaccattgactacgaagaattcgttgctatgatgaccggcgagagctttaagctaatccaatag

SEQ ID NO: 216760 - DNA, 495 bp, synthetic construct
  misc_feature 1..495: note = Description of Artificial Sequence: Synthetic coding sequence
  source 1..495: mol_type = other DNA
atgggccttcagcaagagataagcctaacagagagactttcggctgagcagatcaaagagtacaaaggcgtgtttgaaatgttcgacgaggaagggaacggcgaggtgaagacgggagaactcgaatggctaatgtcactcctcggcattaatccgaccaagtcggaactggctagcatggccaaagatgtggaccgagacaataaaggattctttaactgtgacggtttcttggcgctgatgggagtgtaccacgaaaaagcccagaaccaggagtcggagctgagagccgcttttagagtttttgataaagagggtaaaggctatatagactggaatacgttgaaatatgtcctgatgaacgccggagagcccctgaacgaagtggaggcagaacaaatgatgaaggaggcggacaaggacggcgacagaaccatcgactacgaggagtttgtggctatgatgaccggagaaagctttaaactaattcagtag

SEQ ID NO: 216761 - DNA, 1779 bp, synthetic construct
  misc_feature 1..1779: note = Description of Artificial Sequence: Synthetic coding sequence
  source 1..1779: mol_type = other DNA
atggagggcaaatggcttctttgcatgcttctcgtgttagggacagccattgtggaggcccacgatggccatgatgacgatgtgatcgacatcgaggatgacctggatgatgttatcgaggaagttgaggacagcaagccagacactaccgccccaccgtcctctccgaaggtcacatataaagctcccgttccaacaggtgaggtatatttcgccgacagctttgacaggggaactctgagtgggtggatcctgtccaaggctaaaaaggacgatacagacgatgagatcgccaagtacgatggcaagtgggaggtggaagagatgaaggagagtaagctcccaggagataaaggtctcgtgttgatgagcagggcaaaacaccacgccatatcagccaagctaaacaagccattcttattcgacacaaagccattgatcgtgcagtatgaagtcaacttccagaacggaattgaatgcggcggagcctatgtaaagctcctctccaagacacccgagctgaacctcgaccagttccacgataagaccccgtatacaattatgttcgggccagataaatgcggggaggattacaaactacatttcatattcagacacaaaaaccctaagaccgggatttatgaagaaaagcacgcaaaacgacctgacgccgatctaaaaacctacttcacagacaagaaaacccacctttacaccctgattctcaacccggacaactcctttgaaatcttagtcgaccagagtgtggttaatagcggcaatttgttgaacgacatgacacctcctgtgaacccatctcgagaaattgaggatcctgaggaccggaaacccgaggattgggacgaaagacccaaaatcccagatccagaggctgttaaacccgatgactgggatgaggacgcaccggctaaaatcccagacgaggaagccaccaaacccgaaggctggctggacgatgagcccgaatatgtaccggacccggacgctgaaaagcccgaggattgggatgaggatatggacggtgagtgggaggcccctcagatagcaaacccccgatgcgagtctgccccaggatgtggggtctggcaaagacctgtgatcgacaaccccaattacaaggggaagtggaaaccgccaatgattgacaatcctagctaccaggggatctggaagccaagaaagatccccaaccccgatttttttgaagacctggagcccttccgtatgacacccttctcggcaatcggactggaactgtggagcatgacgagtgacatctttttcgacaactttataatctgcgccgatcgcaggatcgtggacgactgggccaatgacggttggggcctcaaaaaggctgcagacggtgccgcagagcctggagtagtgggacagatgattgaggcagcagaagagagaccatggctctgggtggtttatatcctcacggtggccctgcccgtgtttctcgtaatcctgttttgctgctccggtaagaagcagactagtggcatggagtacaagaagactgacgctccacaaccagacgtgaaggaagaagaagaggagaaggaagaggagaaggataagggggatgaggaagaggagggggaggagaagcttgaagagaagcagaagtctgacgcagaggaggacggtggaacagtctcacaggaggaggaggacagaaagccaaaggcagaagaagatgaaatattaaacagatcaccccgtaaccggaaaccgagaagagagtag

SEQ ID NO: 216762 - DNA, 852 bp, synthetic construct
  misc_feature 1..852: note = Description of Artificial Sequence: Synthetic coding sequence
  source 1..852: mol_type = other DNA
atgctcctagtcttggggacggccatcgttgaggctcatgacggacatgacgacgatgtaatcgacatcgaggatgacctggacgatgttatcgaagaggtagaagattctaaacccgacacgactgcacccccatctagtcctaaggtgacttacaaagccccagtgcctaccggggaggtctactttgcagattccttcgacagaggtaccctgtcgggctggatcctgagcaaggccaagaaggacgacacggacgacgagatagcaaagtacgatggcaagtgggaggtcgaggaaatgaaggagtccaaactgcctggtgacaaggggctcgtgctgatgagtcgggcaaagcaccacgccatcagtgcaaaactcaacaagcccttcttgttcgacaccaagccacttattgtgcagtacgaggtaaacttccagaacggaattgagtgcgggggagcatacaactgttttctgaaacaccagaactccacctgggaccagttccacgacaagacaccctacacaattatgtttgggccagataagtgcggagaggattacaagcttcactttatctttaggcataagaatcctaaaaccgggatctatgaagaaaagcacgcgaagcgtccggatgctgatctcaagacatactttaccgacaagaaaactcatttatacactttgattttgaacccggacaactcatttgagatacttgttgaccagagcgttccccctgtcaacccatccagagagatcgaagatccggaagatcgaaagcccgaagactgggacgagagacctaagattcccgatcctgaagcagtgaaaccagacgattag

SEQ ID NO: 216763 - DNA, 984 bp, synthetic construct
  misc_feature 1..984: note = Description of Artificial Sequence: Synthetic coding sequence
  source 1..984: mol_type = other DNA
atggaaggcaaatggcttttgtgtatgctcctggttctcggtacagccattgtcgaggctcacgacgggcatgatgacgatgtgatcgacatcgaagacgacctcgacgacgttatcgaagaagtcgaggaaatgaaggaaagcaagcttcctggcgataaggggctcgtgcttatgtctcgagcaaagcatcacgctatttctgcaaagctaaacaagcctttcctgttcgacaccaaaccactgattgtccagtacgaagttaacttccagaacggtattgagtgcgggggagcctacgtcaagctccttagtaaaacccccgagttaaacttggatcagtttcatgataaaactccctacaccattatgttcgggccagataaatgtggagaggactataagctgcactttattttcagacacaagaatccgaaaaccggaatctatgaagaaaagcatgcaaagaggcctgatgcagacctcaaaacatattttacagataagaagacacatctctacacgctcatcttgaaccctgataattcttttgagatcctggtggatcagtcagtggttaacagcggcaatcttctgaatgacatgacaccgccagtgaatccttcccgagagatagaagatccagaagaccgcaagcctgaggattgggatgagaggcccaaaatacctgaccccgaggccgtgaaacccgatgattgggatgaggacgccccagctaaaatccccgatgaggaggcaacgaaaccggaggggtggctggacgacgaacccgagtatgttcctgaccccgacgctgagaaacctgaagattgggatgaggacatggatggggagtgggaggctcctcagattgctaaccctcggtgcgagtcagctcccggatgcggcgtctggcagagaccagtggttgatatccagaagacctccagacatcaccatcaacaggctccagtcgagcactag

SEQ ID NO: 216764 - DNA, 1884 bp, synthetic construct
  misc_feature 1..1884: note = Description of Artificial Sequence: Synthetic coding sequence
  source 1..1884: mol_type = other DNA
atggcggacaggaggacacccacacccttcgccggatgccgtctgccacggcagagacgcgcaagggatgcaagccaagtttcagctcctggtaccaggagaatcatggaaggcaagtggctcctgtgtatgctgctcgtgttgggaacagccatagttgaagcccatgacggccatgacgacgatgtgatagacatcgaggatgacctggatgacgtcattgaggaggtagaagacagcaagcccgacactaccgctccacctagcagcccaaaagtgacctacaaggcgccagtgcccacaggcgaggtgtatttcgcagattcctttgaccgagggactctgtccgggtggatactatcaaaggccaaaaaggatgacaccgacgatgaaatagctaagtatgatgggaagtgggaagtggaggagatgaaagagtccaaactgccaggcgataagggactcgtgttgatgtctcgggcaaagcaccatgccatcagcgcaaaactgaacaagcctttcctttttgacactaagccactgattgtacagtacgaagttaacttccagaatggcatcgagtgcggcggagcctacgtcaagctgctgagtaaaacacctgaactaaaccttgatcaattccatgacaagaccccctacacaattatgttcgggcctgataaatgtggggaggactataagttgcacttcattttccgtcacaagaaccccaaaacgggaatatatgaggagaagcacgcaaaacggccagatgccgacctgaaaacatattttaccgacaaaaagacacacctttacacccttatcctaaatccagacaatagctttgaaatccttgtagaccaatccgttgtaaattctggcaacttgttgaatgatatgacacctccggtgaatccctctcgtgaaatcgaggacccagaggaccgcaaaccagaggactgggacgaacgtcccaagatcccggatcctgaggccgtgaagcccgacgactgggacgaggacgcgcctgcgaagattccagatgaagaggcaaccaagcccgaggggtggctggacgatgaacccgagtatgtgcccgaccctgatgctgagaagcccgaggactgggacgaggacatggacggtgaatgggaggctccccagattgccaacccacgctgcgagtccgccccaggctgtggcgtgtggcagcgcccagtgatcgacaatccaaactacaaggggaaatggaagcctcccatgatcgacaatcccagctaccagggcatctggaagcccaggaagattcccaacccagactttttcgaggacctggaaccctttcgtatgacacccttctctgctatcgggctggaactgtggagcatgacaagcgacattttctttgataattttatcatctgcgccgatcgcagaattgtcgacgattgggccaacgacggttgggggctcaaaaaggcagcagatggggcagctgaaccgggagtggtgggccagatgattgaggctgccgaggaacgcccatggctttgggttgtgtatatcctcaccgttgcactgcccgtcttccttgtgatactattttgttgctccgggaaaaagcagactagcgggatggaatacaagaaaacagatgcaccacaaccagacgtaaaggaagaagaagaggagaaagaagaagagaaggataagggagatgaggaggaagaaggagaggagaagttggaggagaagcagaaaagcgatgctgaagaggacggaggtacagtttcccaggaggaggaggacagaaagcccaaggccgaagaggatgaaattctgaatcggtcaccacgaaatcgaaaacctcgtcgggagtag

SEQ ID NO: 216765 - DNA, 1779 bp, synthetic construct
  misc_feature 1..1779: note = Description of Artificial Sequence: Synthetic coding sequence
  source 1..1779: mol_type = other DNA
atggagggcaagtggttgctctgcatgctgctagtgctgggcacagcaatcgtggaggcgcacgacgggcacgacgacgatgtgatcgacatcgaagatgatttagatgacgtgatcgaggaggtggaagattccaagcccgatacaactgccccaccttcgagtccaaaggtaacctacaaggcaccagtgcctactggcgaagtctactttgctgacagcttcgatagaggaaccctaagcgggtggatactgagcaaggcgaaaaaagatgataccgacgacgaaattgccaaatacgacggaaaatgggaggtggaagaaatgaaagagtctaagttgccaggagataaaggactggtcctgatgtcccgcgcaaaacatcatgcaatcagcgcgaagttgaacaagccctttctcttcgatactaagccacttatcgtgcaatatgaagtaaactttcagaacggcatagaatgtggcggtgcttacgttaaattgctatccaagacccccgaattaaatctcgaccagttccacgataaaactccttataccattatgtttggcccagacaaatgcggtgaagattacaagctacacttcatatttcgacataaaaatccaaaaaccggcatctacgaagagaaacatgctaagcgtccagatgctgacttgaaaacctattttaccgacaaaaagacacacctctatacactcatacttaaccctgacaactctttcgagatccttgtggatcaatcagtggttaattctggtaatctcctaaacgacatgacccccccagtgaatccaagtcgggaaatcgaggaccctgaggaccggaagccagaggattgggacgagagaccgaaaatcccagatcctgaggccgtgaagcctgacgactgggatgaagacgcgccagcaaaaattccagatgaagaggcaactaaacctgaaggttggttagacgacgagccagagtacgtacccgatccagacgcagagaaacctgaggactgggatgaggacatggacggggagtgggaagcacctcagattgccaaccctcgatgtgaaagtgcaccagggtgcggagtttggcaacgccctgttattgacaatccaaactataagggcaaatggaagccccctatgatcgataacccaagctatcaggggatttggaagccgcgaaagatacctaatccagatttcttcgaggatctggaaccatttcggatgactccgttctcagccatcggcctggaactatggtcaatgactagtgatattttttttgacaacttcatcatctgtgccgatcgcaggattgtggatgactgggccaatgacggctggggtctgaagaaggccgctgatggcgcagctgaaccgggtgtcgtaggccagatgatcgaggcggctgaggaacggccatggctgtgggtggtttatatcttaacagtggctttacccgtgtttctggtgattttgttttgctgtagcggcaaaaagcagacgagcggcatggagtacaagaaaaccgatgcaccccagccagacgtaaaggaggaggaagaggagaaagaagaggagaaagacaagggcgacgaagaggaagagggtgaagaaaagttggaggagaagcaaaagagcgatgccgaggaggacggtggcacagtttcccaggaagaggaggataggaagccaaaggctgaagaagacgagatattaaataggtcacctcgcaacaggaagcctcgacgtgaatag

SEQ ID NO: 216766 - DNA, 405 bp, synthetic construct
  misc_feature 1..405: note = Description of Artificial Sequence: Synthetic coding sequence
  source 1..405: mol_type = other DNA
atggaaggtaagtggctattgtgcatgctactggtcctggggacagctattgtggaagcccatgatggacatgatgacgatgttatcgacatagaggacgacctggacgacgttattgaagaggtggaggactcaaagcctgacacaactgccccaccgtcaagcccgaaagtcacctataaggccccagttcccaccggtgaggtatatttcgctgattccttcgatcgcggtacgctctcaggctggattctcagtaaagccaagaaggacgacacagatgatgaaattgccaaatacgacgggaagtgggaggtggaggaaatgaaagagtccaaactaccgggagacaaggggctggtgctgatgagtcgggctaaacaccacgccattagcgctaagtag

SEQ ID NO: 216767 - DNA, 507 bp, synthetic construct
  misc_feature 1..507: note = Description of Artificial Sequence: Synthetic coding sequence
  source 1..507: mol_type = other DNA
atggaggggaaatggctgttgtgtatgctcttagtactcggcacggcaatcgtggaggcccacgacggccatgatgacgacgtcatcgacatcgaagacgacttggacgacgtgatcgaggaagtagaggactcgaagcccgacacaacggcgccaccgtcatctccaaaggtgacatacaaggctcccgttcccacaggtgaggtgtatttcgccgattcttttgatagggggaccctcagtggctggatcctctcaaaagccaaaaaagacgataccgatgacgagatagctaagtatgacggaaagtgggaggtggaagagatgaaagaaagcaagctgcctggcgacaagggcctcgtgctgatgagtcgcgctaagcaccatgcgatttcagctaaactaaataagcctttcttattcgatactaagccacttatcgtgcagtacgaggtcaacttccaaaacgggatcgaatgcggtggcgcttacgttaagttgctttag

SEQ ID NO: 216768 - DNA, 1779 bp, synthetic construct
  misc_feature 1..1779: note = Description of Artificial Sequence: Synthetic coding sequence
  source 1..1779: mol_type = other DNA
atggagggtaagtggctgctctgcatgctgctcgttctggggactgccatcgtggaagcacatgacggccacgatgatgacgtaattgatattgaagatgatttggacgatgtgattgaggaagtggaagattcgaagcccgataccactgcgccaccatcctctccaaaggttacatataaggcaccagtcccgaccggcgaggtatactttgcggatagcttcgatcggggaactctgagtggatggatcttatccaaggctaaaaaggacgacaccgacgatgaaatcgccaaatacgacggcaaatgggaggttgaggagatgaaagagagtaagctccctggtgacaaaggactggttctgatgtccagggccaaacaccatgccataagtgctaagttaaataaaccatttctctttgacacgaagccgttgattgtacagtatgaggtcaatttccagaacgggatagagtgcgggggagcctatgtgaagctgctgtcaaagaccccagagctcaatctcgatcaattccatgataaaacaccttatacaatcatgttcggacctgataaatgcggagaagattataaactacactttatcttccggcataaaaaccccaaaactggaatctacgaggagaaacatgctaagcgtcccgatgccgaccttaagacctatttcactgataagaaaacacatctgtataccctcatcttaaaccccgataatagctttgaaatacttgtcgatcagagcgtcgtcaattcaggcaacctgctgaatgacatgactccccctgtgaatccaagccgcgaaattgaagaccccgaggatcgaaaacccgaggattgggacgagcgaccaaaaattcctgatcctgaggcggtgaagcccgatgattgggacgaggatgcccctgctaagatcccagatgaggaggccacaaaacccgagggatggctggatgacgagcctgagtatgtcccagatcctgatgctgagaagcctgaggactgggatgaggacatggatggggaatgggaggcaccccagattgcgaatccacggtgcgagagcgcccctggatgtggggtttggcagagaccagtaatagataatccaaactacaagggcaagtggaagcctcccatgatcgataacccaagctaccaagggatctggaagccgaggaagattcccaacccagactttttcgaggatctcgagccgtttcgcatgacccccttctcagccatcggacttgaactgtggtctatgacgtctgatatctttttcgataactttattatttgcgccgaccggaggatcgtggacgactgggccaacgacgggtggggcttaaagaaggcagctgatggtgcagctgagccaggagtggttggacaaatgattgaagccgcagaagaaagaccttggctttgggtcgtctatattctcaccgtagctcttccagtcttcttagtgattctgttttgttgctccggtaaaaaacaaacatccggaatggaatataaaaagactgacgcccctcagccagacgtgaaagaagaggaagaggaaaaggaggaggaaaaagataaaggagatgaggaagaggagggagaagaaaaacttgaagaaaaacagaagagcgatgctgaggaggacggcggtacggtgtcacaagaggaagaggacagaaaacccaaggcagaggaagacgagatcctcaatcgaagtcctaggaatcggaagcccaggagagagtag

SEQ ID NO: 216769 - DNA, 240 bp, synthetic construct
  misc_feature 1..240: note = Description of Artificial Sequence: Synthetic coding sequence
  source 1..240: mol_type = other DNA
atggaggggaagtggcttctctgtatgctcctggtgcttggtaccgccattgtagaagctcatgacggtcacgatgacgacgtgatcgacatcgaggatgatctcgatgatgtcatcgaggaggttgaagactctaaaccggatactacagctccacctagtagtcccaaggtgacatacaaagctcctgtccctactggagaagtctattttgccgactcctttgacaggggaacctag

SEQ ID NO: 216770 - DNA, 99 bp, synthetic construct
  misc_feature 1..99: note = Description of Artificial Sequence: Synthetic coding sequence
  source 1..99: mol_type = other DNA
atggaggggaagtggctgctgtgtatgctgttggtgttgggcacggccattgtggaggcccacgacggacacgatgacgatgtgatagacatagaatag

SEQ ID NO: 216771 - DNA, 1455 bp, synthetic construct
  misc_feature 1..1455: note = Description of Artificial Sequence: Synthetic coding sequence
  source 1..1455: mol_type = other DNA
atgaaggaatccaagctacccggagataagggactggttctgatgagcagggcaaaacaccatgcaattagcgccaagttgaataagcctttcttgtttgacaccaaacccttgatcgtgcagtacgaagttaattttcagaatggaatcgagtgcggaggagcatacgtgaaactgctgtcgaaaactcctgagttgaatctcgaccagtttcatgacaagaccccatacacgatcatgttcgggcctgataaatgcggggaagactacaagctgcatttcatattcaggcataaaaatcctaagacaggcatttatgaagagaagcatgcaaagcgtccggacgcagaccttaaaacctactttaccgacaagaagacgcacttatacacgctgatcctgaacccagacaactcatttgaaatccttgttgatcagagcgtcgtgaactcaggtaatcttctgaacgacatgacgccccctgtgaaccccagccgcgagattgaggacccagaggaccgcaagccagaagactgggatgagcgccctaaaattcccgacccagaggccgttaaaccggacgactgggacgaagatgccccagctaaaattcctgacgaggaggccactaaacccgagggctggctggacgatgaaccagaatatgtccccgaccccgacgccgagaaacccgaggactgggacgaagacatggatggcgagtgggaagcgccacagattgcaaatccgagatgcgagagcgcccctgggtgtggggtctggcagcggccagtgattgataacccgaactacaaaggaaagtggaagccccctatgatcgacaacccatcctaccaaggaatctggaaaccacgtaaaatccccaaccctgacttttttgaggacttggaaccctttagaatgacgcctttttcagcaattgggctggaactgtggtcaatgacctcagatatattttttgataacttcataatttgcgcggaccggaggatagtggatgactgggcgaatgacggctggggcctcaaaaaggcagcagacggggctgccgagccgggagtggtaggccagatgattgaggccgctgaagaaagaccctggctttgggtggtgtatatcctgacagtcgctctgcctgtgtttctggtgatccttttctgttgttccggcaagaaacagacaagcggaatggagtataagaagacggatgccccacagccagacgtcaaagaagaagaagaagagaaagaagaggaaaaagacaagggtgatgaggaggaggaaggagaagagaaacttgaggaaaagcagaaaagtgacgccgaggaggatggcggaacagtgtctcaggaggaagaggaccggaaacctaaagctgaggaggatgagatcctcaatagatcaccgagaaaccgcaagccccgaagagagtag

SEQ ID NO: 216772 - DNA, 324 bp, synthetic construct
  misc_feature 1..324: note = Description of Artificial Sequence: Synthetic coding sequence
  source 1..324: mol_type = other DNA
atggagggaaaatggctactgtgtatgctcttagtcctggggacagctattgtggaggctcatgatgggcacgatgatgatgtgatcgacatcgaggacgatctggatgacgtaatagaagaagtagaggacagcaagcccgacactacagcccctccctccagtcccaaagtgacctataaggcaccagtccccactggagaagtctactttgctgatagttttgacaggggtacccttagcggctggattcttagcaaggctaagaaggacgacactgatgatgagattgctaagtatgatggcaagtgggaagtggaatag

SEQ ID NO: 216773 - DNA, 435 bp, synthetic construct
  misc_feature 1..435: note = Description of Artificial Sequence: Synthetic coding sequence
  source 1..435: mol_type = other DNA
atggaagggaaatggctcctgtgcatgctgttggttcttggaacagcaatcgtggaagcacacgatggccacgacgacgacgtgatcgatatcgaagatgacttggacgacgtaatagaggaagtggaggactccaagcctgacacaactgcccctccatcctctcctaaggtgacatataaggctcctgtgcctaccggcgaagtgtactttgcggactcctttgaccggggtactttgagcggctggattctgagcaaggccaagaaggatgatacggacgacgaaattgctaaatacgacggcaagtgggaagtggaagagatgaaggagtcaaagcttcctggggacaagggcctggtcctgatgtcgagggccaagcatcacgccatttcagccaagctgaataagccttttctgttcgatactaagtag

SEQ ID NO: 216774 - DNA, 420 bp, synthetic construct
  misc_feature 1..420: note = Description of Artificial Sequence: Synthetic coding sequence
  source 1..420: mol_type = other DNA
atgagagccggaaggggagcaacacctgccagggaactgtttagggatgccgctttccccgcagcagattcaagcctgttttgtgatctgagcacgcctttggcccagttcagagaggatattacctggcgcaggcctcaggaaatctgcgccactcctcgcctgtttcccgatgatccacgtgaaggtcaggttaagcaaggtctattgggcgattgttggttcctgtgtgcttgcgccgctctgcagaagtcccgtcatctcctggatcaggtctcctgtcctgtgcagctccccgctgactggacctgcaaagtgcaacccgtgtggcttgagtttccatgtctgcccatttcttgtagattgcgagtctcttctgacacttctcctgactctgcaacatggggctcttggaagtag

SEQ ID NO: 216775 - DNA, 417 bp, synthetic construct
  misc_feature 1..417: note = Description of Artificial Sequence: Synthetic coding sequence
  source 1..417: mol_type = other DNA
atgcgggctggcagaggggctactcctgctcgggagctgttcagagacgctgctttccctgctgccgattcctcgctgttttgcgacctgtcaacaccactagcccagtttcgggaagacataacctggcgcagacctcaagtgcctgaaggcggtagatcacaggacgctccaccactgctgctgcaagaacccctgctgagctgcgttccgcaccggtacgcgcaggaagtttcccggctgtgcctccttcccgctgggacatacaaagtcgtgccttctacatatctccctgatacagaaggagcgtttacagttacgatcgccacccggatcgacaggcccagtatccacagccaagaaatgctgggacaatttttacaggaggtgagcattatggcagtcatgaaaacatag

SEQ ID NO: 216776 - DNA, 1554 bp, synthetic construct
  misc_feature 1..1554: note = Description of Artificial Sequence: Synthetic coding sequence
  source 1..1554: mol_type = other DNA
atgcgggcaggccgaggcgcaacacctgctagggagctgtttcgggatgctgcttttcctgccgcagactcttcactgttttgtgatctgtctacgccattagctcagtttcgagaagacatcacgtggcggaggcctcaggagatttgtgccacccctcgtctgtttccggacgacccaagggagggccaggtcaagcagggactgctgggagactgctggtttctgtgcgcatgcgctgcccttcagaagtcccggcacctgttggatcaggtgataccgcctggccagccgtcttgggccgatcaggagtataggggaagcttcacttgccgtatttggcagttcggaagatgggtggaggtgactacagatgatcgcctcccgtgcctcgccggaaggctctgctttagtagatgccagcgcgaggatgtgttttggctgcctttgcttgagaaggtgtacgcaaaagtgcacggcagttacgagcacctgtgggccggtcaggtggccgacgctctggtcgacttgactggaggcttggcggaacgatggaacctcaagggagttgccggtagcggaggacagcaggatcgccctggacgatgggaacataggacctgccggcagcttctgcacttaaaagatcagtgcttgattagttgttgcgtactgtccccgagggcaggcgctagagagctgggcgagtttcatgcattcattgtaagcgatcttagggaactgcaggggcaggctggccagtgtattctgcttcttaggatacagaatccgtggggacgacgatgctggcaaggtctgtggagagagggcggagagggctggtcgcaagttgacgctgcggtagcatccgaattactgagccagctgcaagaaggcgaattttgggtggaagaagaggaattcctacgagagtttgacgagctcacagtcggctacccagttaccgaagccggtcacctgcagtcactctataccgaaaggctcctgtgccatactcgcgctctacccggtgcatgggtaaaaggacagagtgctggcggttgccggaacaacagtggtttcccatccaatcctaagttctggctgagggtcagcgaacccagtgaggtttacattgctgtgttgcagcggagccgcttacatgcagcagattgggcagggcgagccagggctcttgttggtgactctcacaccagttggtcccccgcttccatcccaggcaaacactaccaggcggtcggtctccacctgtggaaagtgcccgaggggggacggagccaggacgctccaccactcctgctgcaagaacccctattgagctgtgtgcctcacagatacgcccaggaagtctcaagactctgcctgctgccggcagggacttacaaggtggtcccttccacttatctgcccgatactgagggcgctttcactgtgacgatagcaacacgaattgacagaccatcgatccactctcaggaaatgctcggccagtttttgcaggaggtatccatcatggcggtgatgaagacctag

SEQ ID NO: 216777 - DNA, 1335 bp, synthetic construct
  misc_feature 1..1335: note = Description of Artificial Sequence: Synthetic coding sequence
  source 1..1335: mol_type = other DNA
atgcgggctggcaggggcgctacaccagccagagagctgtttagagatgctgcattcccagcagcagacagttcacttttctgtgatctgagtacccctctcgctcagttccgtgaggatataacttggcgacgcccacaggagatctgtgcaactcccagactgttcccagacgacccacgggaaggacaggtcaagcaaggactgctgggagattgctggttcctctgtgcctgcgctgctctgcagaaatccagacatctgctcgaccaggtgattccccctggtcaaccgtcctgggcagatcaggagtacagggggagcttcacctgtcgcatctggcagtttggccgttgggtggaagtgactacagatgatagattgccttgcctagccggacgcttatgtttctcccgctgccagagggaggatgtgttttggttacccctccttgaaaaagtgtacgctaaggtccacgggagctacgaacatctgtgggccggacaagttgcggatgccttagtggacctaacgggtggactggccgaaaggtggaatctaaaaggcgtggctggatctggaggccagcaagacagacctggtcggtgggaacaccgcacttgcaggcagcttcttcacctgaaagaccagtgcttgatctcttgttgtgtgctgtccccccgtgctggcgcaagggaactcggagagttccatgcctttatcgtcagtgatctgcgtgagctgcagggacaagctggacagtgtattttgctgctcagaattcaaaatccctggggtcgcagatgctggcagggactgtggcgggaaggtggcgaaggctggtcacaggtggacgccgcagtcgccagcgaactcctgtctcagctgcaggagggcgagttttgggtggaggaagaagagtttcttcgtgaattcgatgagctaactgtaggctaccccgtaacagaggccggacacctccagtctctatatactgaaagactgctatgtcataccagggctctccccggtgcatgggtcaaaggacagagcgccggtgggtgccgcaataattcagggtttccatcgaatcctaaattttggctcagagtctcagagccctccgaggtatacattgccgtgttacagagatcccgtctgcacgcagccgattgggccggacgcgcacgagccctcgttggggactcccacacctcatggagccctgcatctatacccggaaaacactatcaggctgtgggcttgcatctgtggaaaggcgtgacactcggcacaaccctttttccggtgcctagctggatgtggcccacatag

SEQ ID NO: 216778 - DNA, 2019 bp, synthetic construct
  misc_feature 1..2019: note = Description of Artificial Sequence: Synthetic coding sequence
  source 1..2019: mol_type = other DNA
atgagggctggaagaggcgctactcctgcgagggagctgtttagagatgcagcctttcccgcagcagactcctctctgttctgtgatctgtccacccccctcgcacagtttagagaggatattacctggcgtcggccacaggaaatttgtgcaacccccagactcttcccagatgatcctagggaaggccaagtcaagcagggcttattgggcgactgctggttcctttgtgcttgcgctgctctgcagaagtcgagacacttgctggatcaagttatccctccaggtcagcccagttgggcagatcaggagtaccgagggagctttacatgcagaatctggcagtttggccgatgggtggaagtcactaccgacgaccgcctcccttgtctggcgggaagattgtgttttagcagatgccagcgagaagacgtgttttggcttcccctcctggagaaagtgtatgccaaagttcacggatcatacgagcacctgtgggccggacaagtggccgatgctttggttgatctgaccggtggactcgctgagcggtggaacctcaagggcgtggccggttccggaggccagcaggacagaccagggaggtgggagcatcgcacttgccgccaacttctccacctgaaagatcagtgtcttatcagttgttgcgtgctatctccaagagcaggtgctagagaactgggagaatttcatgccttcatcgtctcagatctcagagaactccaggggcaagccggacagtgtattctgctgctgaggattcagaacccatgggggaggcgttgttggcaagggctttggagagagggcggtgaggggtggagccaagttgacgctgctgtggcatccgagctcttgtctcaactgcaggaaggtgagttttgggttgaagaagaggaattcctgagggaatttgatgagctgactgttggctacccagtgactgaggcaggtcatcttcaaagcctgtacaccgaacggctgttgtgccatacccgtgcgcttcccggagcctgggtgaaggggcagtctgccggaggctgtcgcaataacagcggctttccctctaatcctaaattttggctgagggtcagcgaaccaagtgaggtctatattgccgtcttgcagcggtcccggctgcacgcagctgactgggccggaagagccagggcattggtgggggatagccatacttcatggtctccagcatcaattccgggtaagcattaccaggcagtgggcctgcacttgtggaaagtcgaaaagagacgcgtcaacctcccaagagtgttgagcatgcctcccgtggctggcaccgcttgccatgcctacgaccgtgaggtgcacttgcgatgcgagctgagccccggatattacctggcagtacctagcacctttttgaaagatgccccaggagaattcctgctgagggtgtttagtaccggtagagtttccctgagcgccatccgcgcagtggctaaaaataccactcctggggctgcactgcctgcgggtgagtggggcacagtgcagctccggggttcttggagggttggccaaactgccggaggatcacgcaatttcgcatcttaccccacaaatccttgtttccccttctcagtgcctgagggaccaggaccacgctgcgtccgcataaccctgcatcagcactgcaggccttcggacacggagtttcatcctatcggattccacatattccaagtacctgagggaggccgttctcaagacgctccccctctgctgctgcaggaacccttgttatcctgtgtgccccatcggtatgcccaggaggtgtccagactgtgcctgctgcccgctggtacatacaaagtggtacctagcacttatttaccggacaccgagggagcctttacagtcaccatagcaacacggatcgacaggccctctattcattcccaggagatgctggggcaatttttgcaagaagtcagcataatggccgttatgaagacttag

SEQ ID NO: 216779 - DNA, 2220 bp, synthetic construct
  misc_feature 1..2220: note = Description of Artificial Sequence: Synthetic coding sequence
  source 1..2220: mol_type = other DNA
atgttgtacagtcccggaccgagcttacccgaatccgcagagtcattggacggctcgcaggaggataagcctcggggttcttgcgccgagcctacattcactgacacaggcatggtcgctcatattaataactcccggttaaaggctaaaggtgttggccagcatgacaatgctcagaatttcgggaaccagagttttgaagagctgagggccgcttgtctccgaaaaggtgagctgttcgaggatcctctcttccccgctgaacctagctcactggggtttaaggatctgggacctaactcgaagaacgtgcagaacataagttggcaacggcctaaggatatcataaataatccactgtttattatggacgggattagtcctactgatatctgccagggaatcctgggtgattgctggttgctggccgcaatcgggtcactgactacttgccccaagcttttataccgcgtggtcccgagaggacagtcttttaagaagaattatgccggtatatttcacttccaaatatggcagttcgggcagtgggtcaacgttgtagtggacgatcggcttcccaccaaaaacgacaaactggttttcgtacatagtacagagcggtccgaattttggtcggccctgctggagaaggcctacgccaagctgtccgggagctacgaggcattgtcggggggttcaaccatggagggactggaagacttcaccggcggtgtggcccagagcttccaactccagcggccaccccagaatttgctgcgccttctgcggaaagctgtggagaggtcctccctaatgggatgctcaatagaggtgactagtgattcggaacttgagtctatgaccgataagatgctggtgaggggtcatgcctactccgtaaccggcctccaggacgtgcactacaggggcaagatggaaactctcatccgggtccgcaatccttggggaagaatcgagtggaatggagcttggtctgattcagctagggagtgggaggaggtggcgtctgacatccagatgcagctgctgcataagaccgaggatggagagttctggatgagttatcaggatttccttaacaattttactttgcttgagatttgtaatttgacacctgatacactatccggtgactataaatcttattggcacaccacattctatgaaggcagctggcgcagaggaagctccgccggtggctgccgaaaccacccaggcacattttggaccaacccgcagttcaaaattagcctgccggaaggagacgaccccgaagatgatgccgagggcaatgttgtcgtgtgtacttgtctggtggctctgatgcagaaaaactggaggcacgctagacagcagggcgcacagctgcagactatcggatttgtgctgtacgctgtgcccaaagagtttcaaaatatccaagacgtgcacctaaaaaaagagtttttcactaagtatcaagaccacggttttagcgagatttttacaaattctagagaagtcagctctcaactgcgcttgcctcccggtgagtacataattataccaagtacgtttgaacctcaccgggacgctgactttcttctgagagtcttcaccgaaaagcacagcgaaagctgggagctggacgaggtgaattacgccgaacaactgcaggaagagaaggtctccgaggatgacatggaccaggattttttgcacctgtttaagattgtcgcaggagaagggaaagaaataggcgtctacgagttacagcggttgctgaacagaatggcaataaagttcaagtcattcaagacaaaaggcttcggccttgatgcctgcagatgtatgataaatttaatggacaaagatggatcgggaaaactcggcctgctggagtttaaaatcctatggaaaaaactgaaaaaatggatggatatattcagagagtgcgaccaggaccattcaggcacactgaactcatatgagatgcggctagtcattgagaaagcaggcattaaactgaataataaggttatgcaggttttggttgctcggtatgcggacgacgatcttattattgattttgacagcttcatcagctgttttttacggcttaagacaatgttcaccttctttttgacaatggacccaaagaatacaggccacatctgtctctctctggagcagtggcttcaaatgactatgtggggttag

SEQ ID NO: 216780 - DNA, 2220 bp, synthetic construct
  misc_feature 1..2220: note = Description of Artificial Sequence: Synthetic coding sequence
  source 1..2220: mol_type = other DNA
atgctttattcaccaggaccaagcctgcccgagtcagctgaatcattagacggttcccaagaggataaaccacgtggttcctgtgctgagcctacctttaccgatacaggaatggtagctcatattaataatagccgtctgaaagccaagggcgtgggacaacacgacaacgcccagaactttggcaatcagtctttcgaggagctgcgcgcagcctgcctgagaaaaggtgagttatttgaagacccactcttcccagccgaaccgagttcactgggctttaaggatctgggaccgaattcgaaaaatgtacaaaacatctcttggcaaagacccaaagacatcatcaataatcctctctttatcatggacgggatcagccctacggacatttgtcaagggatcttaggagattgttggcttttggcagcaattggatcactgaccacctgtcctaaacttctttatagagtcgttcccagaggtcaatcattcaaaaaaaactatgccggaatctttcatttccaaatctggcagttcggccagtgggtgaatgttgttgtcgatgatagactgcccaccaaaaacgataagctggtcttcgtgcattccacagagaggtccgagttctggtccgctctgctggaaaaggcctatgcgaagctgagtggcagctatgaagctctgtctggagggtctacaatggaaggtctggaggactttaccgggggagttgctcagagctttcaactccagcgtccccctcagaacctgttgcggctccttcggaaggccgtggagagaagctctctgatgggctgctcaatcgaggtaaccagcgactcagaactcgagtcaatgactgacaagatgcttgttcgaggccatgcctattctgtcaccggcttacaggacgtgcattacagaggtaagatggaaactcttatccgcgtgcggaatccatggggacggatagagtggaatggagcctggtccgacagcgccagggaatgggaggaggtcgcttccgacattcagatgcagctcttgcataagaccgaggacggggaattttggatgtcttaccaagactttctgaacaacttcactctgctggaaatttgcaatctgacccccgatacattgtctggagactataaaagttactggcacaccaccttttacgagggtagttggcggagagggagcagcgctgggggttgtcgaaatcatcctggtacgttctggaccaaccctcagttcaagatctcactgccggagggtgacgatcccgaggacgacgctgaggggaatgtggtcgtgtgcacctgccttgtcgctcttatgcagaaaaattggagacatgcccgacagcaaggcgcacagttacagacaatcgggttcgttctgtatgcggtggccagcccattccagaatattcaggacgtgcatcttaagaaagaattcttcaccaaatatcaagatcacggattctctgagatctttaccaattctcgcgaagtctcctctcaactgcgactgccaccaggcgaatatattattataccctctaccttcgagcctcacagagatgctgacttcctgttaagggtgttcacagaaaagcactctgaatcatgggagctcgatgaagtcaattatgccgaacagttgcaagaagaaaaagtctctgaagacgacatggatcaggattttctccacttgtttaaaatcgttgccggagagggcaaagagatcggcgtctacgaactacagaggctccttaaccgtatggccataaagttcaaaagcttcaaaacaaagggtttcggtctggacgcctgccggtgcatgattaatctgatggataaggatggaagcggaaaactgggacttttagagttcaaaattctgtggaaaaagctgaagaagtggatggatatatttagggagtgcgaccaggaccactcaggcacgctcaattcttacgagatgcggctggtgattgagaaagccggtatcaagctgaacaacaaggtaatgcaggtgcttgtggcaagatacgccgatgacgacctcatcatcgacttcgactccttcattagttgttttttgaggttgaaaaccatgttcacttttttcctcaccatggaccccaagaacacagggcacatctgtctgtcactggagcagtggttacagatgaccatgtggggttag

SEQ ID NO: 216781 - DNA, 2160 bp, synthetic construct
  misc_feature 1..2160: note = Description of Artificial Sequence: Synthetic coding sequence
  source 1..2160: mol_type = other DNA
atggccagcagtagcgggagggtcaccattcagctagtagatgaagaggcgggtgtgggagccggtaggctccagctctttcggggtcagtcatatgaggcgatccgagccgcatgcctggatagtgggatccttttccgggatccgtacttcccagccggacctgacgctctgggctatgaccagctcggtccagactcagagaaggctaagggagtgaaatggatgcggcctcatgaattttgcgcagaacccaaattcatctgcgaggacatgtcacgcaccgacgtgtgtcagggaagcctcggtaactgctggttcctggctgcggctgcgagtctgacactttatcccaggcttctgagaagggtggtgcccccaggccaggattttcaacatggatatgcaggagtgttccacttccagctgtggcagtttggcaggtggatggatgtagttgtggacgaccgccttcctgtaagggaaggcaaattgatgttcgtgcgatcagagcagcggaacgagttttgggcgcctttgctcgaaaaggcttatgccaagctgcacggctcctacgaggtgatgcgagggggtcatatgaatgaggcatttgtggacttcaccggaggagtcggcgaggtgctgtatctgaggcagaattctatgggccttttctccgctctaaggcatgcgctcgccaaagagagcctagtaggagcaacagcactgtccgatcgaggagagtatcgcacagaagaaggtctagttaagggacatgcatacagcattacaggaactcacaaagtatttctgggcttcactaaagtgcgactgctcaggctcaggaacccctggggatgtgtggagtggaccggagcctggtctgactcatgtcccaggtgggacacccttcctaccgaatgtcgagatgcactcctcgtgaaaaaggaggatggcgaattttggatggagcttcgcgatttcctgctccacttcgatacggtgcagatttgctcattgtcccccgaggtcctcggaccatcccctgaaggcggagggtggcacgtccataccttccaggggagatgggtgagagggttcaacagcggagggtcccagcctaatgctgagactttttggacaaatccccagttccggctgacacttcttgaacctgatgaagaagacgacgaggacgaagaaggtccgtgggggggttggggagccgcaggggctagaggcccagccagggggggtagaacacctaagtgcacagtcctgttgtcccttattcagcggaaccgccgacggcttagagcgaaaggactgacttacctgaccgtcggattccacgtcttccagatccccgaggagcttctgggcctgtgggactctccaaggtcgcacgccctcctgccgcgactactgcgtgccgacaggtccccactgtctgcaagaagggacgtgacacgcagatgctgcctgcggcctggccattacctggtggtcccttctacagcccatgccggagacgaggctgattttacactgcgcgtattctctgagcgacgccatacggctgttgaaatcgacgatgttatcagtgcagatctccagagccttcaaggcccttacttgcccctggaactgggactggaacaactctttcaggaactggctggagaggaggaggaactgaacgccagtcaactgcaggccctgctctccatcgcattggagccagcaagagctcacacttctaccccgcgtgagatcggattgcgcacctgtgaacagctgcttcagtgttttggtcatggtcagtctcttgcactgcaccactttcaacaactctggggctacctcctggagtggcaggccatctttaacaaattcgatgaagacacaagcggtaccatgaattcgtacgagctaaggctggccctgaacgccgctggctttcacctcaacaatcagctgacccaaaccctcacatctagataccgggattccagattgagagtcgacttcgagagattcgttagctgcgtggctcacctgacttgcatcttctgtcactgctctcagcatcttgatgggggagagggcgtaatctgcctgacacacagacaatggatggaagtagcgaccttttcatag

SEQ ID NO: 216782 - DNA, 2448 bp, synthetic construct
  misc_feature 1..2448: note = Description of Artificial Sequence: Synthetic coding sequence
  source 1..2448: mol_type = other DNA
atgcccaccgttattagcgcctccgttgctcctaggacagctgccgagccccgatctcccggtcctgtacctcaccctgcacaaagtaaggctaccgaagccggaggcggaaatcctagcggcatatactccgccataatctccagaaacttccccatcatcggggtgaaggagaaaaccttcgagcagctccacaagaagtgtctggagaagaaggtgctttatgtggaccctgaatttccccctgacgagacatccctgttctacagtcaaaagttccctatccagtttgtgtggaagcgccctcctgaaatttgcgagaaccctcgattcatcattgacggagctaaccggactgacatttgccagggcgaactgggcgactgctggtttttggccgcaattgcatgccttacactcaatcaacatctgctcttcagggtaatcccccacgaccaatcctttatcgaaaactacgctggtatcttccatttccagttttggaggtacggcgagtgggtcgacgttgtgattgacgattgtctacccacatataataatcagttagtcttcaccaagagcaaccatcggaatgagttctggagcgcactgctggagaaggcttacgccaaactccatggatcatatgaggcactcaagggtggtaatacaactgaggcaatggaagactttacagggggtgttgcagaatttttcgagattcgggatgctccgtcggatatgtataagatcatgaagaaggccattgagcgcggatcacttatgggttgcagcatcgacgatggcaccaatatgacctatggaacctcgccatctggattgaatatgggcgagctgattgctaggatggttcgcaacatggacaactcactgctccaggactccgacttagatcctagagggtccgacgaaaggccaacccgcaccatcattcccgtgcagtatgaaacgaggatggcttgtggcctggtcagaggccatgcatacagcgtgaccgggcttgatgaggttccatttaaaggcgagaaagtgaagctggtcagactgcgaaatccttggggacaagttgaatggaacggctcttggagcgacaggtggaaggactggagttttgttgacaaggacgaaaaagccagactgcagcaccaggtaaccgaggatggtgaattctggatgagctacgaggatttcatatatcactttaccaagctagagatatgtaatttgacggccgatgccttgcagtccgataaactgcagacttggacggtgtccgtgaatgaaggaaggtgggtccgcggatgtagcgccggagggtgtcgcaacttcccagatacgttttggacgaacccacagtatcggttaaaactgctggaggaggacgacgatcctgatgacagtgaggtaatttgttccttcttagtagccttgatgcagaaaaaccggagaaaggacagaaagctgggagcgtccttgttcaccattggcttcgccatctatgaggttccccaccagatgcatggcaacaagcagcatctgcagaaggactttttcctctataatgcctctaaggcgaggtccaaaacctatatcaatatgcgagaagtgtcccagcgttttcggctgcccccttcggagtatgtgatcgtgccttccacttacgaaccacaccaggagggtgaatttatattgcgggtgttctccgagaagcggaatctctctgaggaggtggagaacactatcagcgtcgaccggcctgttcctattatttttgttagcgatcgtgccaattccaataaggagctcggcgtggaccaggagagtgaagaaggcaagggcaagacctctcctgataagcaaaaacagtccccacaaccacagccaggctcttccgatcaggagtctgaagaacagcagcagtttcgcaatatcttcaagcagatcgctggtgacgacatggagatctgtgccgacgagctgaagaaggtgctcaacacagtggtgaataagcacaaagacctaaagacccacgggttcactttagagagctgtagatcgatgatagcattaatggacactgatggctccggcaaactgaatcttcaggaattccaccatctgtggaacaaaatcaaagcttggcaaaagatttttaagcactacgacactgatcagtctggaacaattaactcttacgaaatgcgcaatgccgtgaacgacgctggattccacctcaataatcagctctacgatatcatcaccatgaggtacgccgataaacatatgaacattgatttcgatagtttcatttgctgttttgtgagactggaggggatgttccgtgcatttcacgcttttgataaggacggtgacggtattatcaaactcaacgtgctcgagtggttgcagctgaccatgtatgcttag

SEQ ID NO: 216783 - DNA, 930 bp, synthetic construct
  misc_feature 1..930: note = Description of Artificial Sequence: Synthetic coding sequence
  source 1..930: mol_type = other DNA
atgcacggtaacaagcagcatctgcagaaggatttctttctgtacaacgctagcaaagctagaagcaaaacttacataaacatgagagaagtatcccaaaggtttaggttgcctccttcagagtatgtgatcgtgcccagtacatacgagccacaccaagagggggagttcattcttagagtcttctccgaaaaacgcaatctgagtgaggaagtggaaaacactatttctgtcgacagacccgtccggaaggagacctataagcccatcattttcgtgtctgacagagcaaactctaacaaggagttgggagtcgatcaggaaagcgaagagggcaaggggaagactagccctgacaaacagaaacagtctccccagcctcagccagggagctctgaccaggagagcgaggagcagcagcaatttcgcaacatatttaaacagatcgcgggtgatgacatggagatctgtgccgatgagctcaagaaagtgttaaacaccgtggtcaacaaacataaagatctcaaaacccacgggtttacgctcgaatcctgtaggtcaatgatcgctctcatggacactgacggcagcggcaaattaaaccttcaagaattccatcatctgtggaacaaaatcaaggcttggcagaaaatcttcaagcattacgacactgatcagagcggcacaatcaattcttacgagatgcgcaacgctgtgaatgacgctggattccacctgaataatcagttatatgatattatcacaatgcggtatgccgacaaacacatgaatatcgacttcgattccttcatttgttgtttcgtgagactggaggggatgtttcgggcatttcacgctttcgataaggacggagacggcataatcaaactaaatgtgcttgaatggctccagctgaccatgtacgcatag

SEQ ID NO: 216784 - DNA, 471 bp, synthetic construct
  misc_feature 1..471: note = Description of Artificial Sequence: Synthetic coding sequence
  source 1..471: mol_type = other DNA
atggagatttgcgccgacgagttgaagaaggtccttaacacagtcgtcaataagcacaaggacctgaagacccacgggttcaccctggaatcatgtagatctatgatcgcgctgatggacactgatggatcagggaagctaaaccttcaagagttccaccatctatggaataagattaaagcatggcagaagatcttcaaacattacgacacggaccaatccgggactattaattcatacgagatgcgcaacgccgttaacgatgctggctttcatttaaacaatcagctgtacgacatcataactatgcggtacgcagataagcatatgaacattgactttgattcattcatctgttgcttcgtgagactggaaggaatgtttcgagctttccacgcgtttgataaagacggagacggaatcatcaagctaaacgtgctggaatggctacagttgacaatgtatgcctag

SEQ ID NO: 216785 - DNA, 2190 bp, synthetic construct
  misc_feature 1..2190: note = Description of Artificial Sequence: Synthetic coding sequence
  source 1..2190: mol_type = other DNA
atgccaacggtcatctctgcctctgtcgctcctagaactgccgcagagccgaggagtcccggtcccgtgccccaccccgcacagagtaaggctactgaagccggaggaggcaatccaagcggcatatacagcgctataatcagccggaacttccccattattggcgtgaaggagaagacattcgaacaactccacaaaaagtgtttagaaaagaaggtgctctacgtcgacccggaattcccgcctgacgaaacttcgctcttctattcacaaaagttccccatccagtttgtctggaagcgcccaccggaaatttgtgaaaatcccaggttcataatcgatggagctaatagaacggatatctgccaaggagaactcggcgactgctggtttctggctgccatcgcctgtttgactttgaaccagcacctcctttttagagtgatcccccacgaccagagtttcatagaaaattacgccggtatctttcattttcaattctggcgctacggggagtgggtcgatgtagtgattgacgattgcttgcctacctataataatcagctggtgtttaccaaaagcaaccatcgtaatgaattctggtcggcgttgttagagaaggcttatgccaaacttcacggctcctatgaggcgttgaagggcggtaacactaccgaagccatggaggactttaccgggggagtggccgagtttttcgaaataagagatgcaccctccgacatgtataagataatgaagaaggctatcgaacgcggatccctcatgggctgctctattgacactatcatacctgtccagtacgaaacccgaatggcttgcggcctcgtaagaggtcacgcttattccgtaacaggcctcgacgaagttccattcaagggcgaaaaggtgaagttagtgcgactgaggaacccatggggacaggttgaatggaatggatcatggtcagacagatggaaggattggtccttcgtggacaaggacgagaaggccaggctgcaacaccaagtgacggaagacggagaattctggatgtcttatgaagatttcatttaccattttacaaaattagaaatttgcaacctcacggcagacgcactccagtctgataagctccagacctggacagtgtctgtaaatgagggcaggtgggtgcgaggttgcagcgccggaggctgcagaaacttcccagataccttctggactaatcctcaatatagactaaagctgcttgaggaagacgacgacccggatgattccgaggttatttgctctttcttggtagcgcttatgcaaaagaacaggcggaaagatagaaaattgggcgcttcgttgttcactattggatttgccatttatgaggtgccgaaggagatgcacgggaacaagcagcacttgcagaaggacttcttcctttacaacgcgtcaaaagctcgctcaaagacttacataaacatgcgtgaggtcagtcagcgattccggctccccccatctgagtatgttatagtgccttccacttatgagccacatcaagagggcgaatttatcctccgggtattttccgagaagcgaaatctctctgaggaggtggagaataccattagcgttgaccgtccagtcccgcagccgggaagttccgaccaagagagtgaggaacagcagcaattccgcaacatattcaagcagattgcgggagatgacatggagatctgtgcggacgagctgaagaaagtgctgaataccgtggtcaacaagcacaaggacctgaagacgcacggcttcactcttgaatcttgtaggtctatgatcgcactgatggatacggacggctccggaaaactcaaccttcaagagttccaccacttgtggaataagatcaaggcgtggcaaaagatcttcaagcattacgacacagaccagtccggcacaatcaatagttacgaaatgagaaatgccgtgaacgacgcgggatttcacctgaataaccaattgtatgacattataaccatgcgatacgcagacaagcacatgaatattgacttcgactcatttatctgctgtttcgtcagactggagggcatgttcagagcttttcacgcttttgacaaggatggggatggaatcatcaagctgaacgtgctcgaatggttgcagcttacaatgtatgcctag

SEQ ID NO: 216786 - DNA, 2187 bp, synthetic construct
  misc_feature 1..2187: note = Description of Artificial Sequence: Synthetic coding sequence
  source 1..2187: mol_type = other DNA
atgtcttggcagatctccctaaagacccagaccacacagcagaaaaacgagatatgtgagaacccacggttcatcatagacggagcaaatcgaacggatatttgccagggcgagttaggagattgctggtttctggctgccattgcgtgtctgaccctgaatcaacacctcttgttcagagtcattccacacgaccagagttttatagagaactacgcagggattttccactttcagttctggagatacggcgagtgggtcgatgtggttatcgacgactgtctcccaacttacaacaaccagctggtgtttacaaagagcaatcataggaacgaattctggagcgccctactcgagaaggcatacgcgaagctgcatgggtcttatgaagctctgaagggtggcaacactactgaagccatggaagactttacaggcggtgttgctgaattctttgagatccgcgacgccccaagcgacatgtacaaaatcatgaagaaagcaattgagcggggttctctgatgggctgctccatagatgacgggactaatatgacatacgggacaagcccctcaggcctgaacatgggagaattgattgcgcgaatggtccgcaacatggacaactcactgctccaggacagcgatctggatccgaggggatcagacgaacgacctacacgaactatcatccctgtgcaatatgaaacacgtatggcttgcggactggtccgcggtcatgcttattccgtgaccggactggatgaggtaccctttaagggcgaaaaggtcaaattagtgaggctgcggaatccatgggggcaggtagagtggaatgggtcctggtctgacagatggaaggactggtcgtttgtggacaaggatgagaaggccaggctgcagcaccaggtgactgaggatggggagttttggatgtcctatgaagactttatctatcattttactaagctcgagatctgcaacctgacggccgatgcacttcagtccgataaactccagacttggaccgtttccgttaatgagggaagatgggttagaggttgctctgcagggggatgtcggaacttccccgacactttttggacaaacccccagtaccgcctgaagctgcttgaagaagatgacgacccggatgattcagaagtgatatgttctttcctggttgctctgatgcagaaaaatcgcagaaaagacaggaagcttggggcaagtctgtttactatcggctttgctatctatgaggtgcccaaggaaatgcatggaaacaagcagcacctacagaaggacttcttcttgtacaacgctagcaaggccagaagcaagacttacattaatatgcgggaagtgagccaacggtttagactgccaccatctgagtatgtgatcgttccctctacatacgagccacatcaggaaggcgagtttatacttagagtgttcagcgagaagaggaatctctctgaggaagtagaaaatacgatcagtgtggaccgccctgtgccgatcattttcgtgtcagaccgagctaacagcaacaaggagcttggcgtggatcaggagtccgaagagggcaaggggaaaacgtcccccgataaacaaaagcagagtcctcaaccccagcccggttcctccgaccaggagtcagaagagcagcagcagtttcgcaatatctttaaacagattgccggagatgacatggaaatatgcgcggatgaattgaaaaaggtccttaataccgttgtcaacaagcacaaggacctaaaaacccatgggttcactctcgagtcctgcaggagcatgatcgcccttatggatacagatggcagcggcaagctgaacctccaggaatttcatcacctgtggaacaagatcaaagcatggcaaaagatctttaaacattacgatacagaccagagtgggaccattaactcctacgaaatgcgcaacgccgtaaacgacgcaggctttcacttaaataaccagctttatgacattatcaccatgaggtatgctgataaacacatgaatatcgattttgatagcttcatttgctgctttgtgcggctagaaggaatgttcagagcttttcacgcattcgacaaagacggggatggcatcatcaagctgaatgtactcgagtggctgcaacttacgatgtacgcctag

SEQ ID NO: 216787 - DNA, 2448 bp, synthetic construct
  misc_feature 1..2448: note = Description of Artificial Sequence: Synthetic coding sequence
  source 1..2448: mol_type = other DNA
atgccaacagttatctctgctagcgtggctccaaggacagcggcagaaccaagatcaccaggtcctgtgccacaccccgctcagagcaaagctactgaagccggagggggtaacccgtcaggaatatatagtgcaattatatcccggaatttcccaatcatcggtgtgaaggagaagacattcgaacagctgcacaagaagtgccttgaaaagaaagttctgtatgtggacccggagtttccgccagatgagacttctctgttctattcgcagaaatttcccattcagttcgtgtggaagcgacccccagagatttgtgagaacccaagattcattatcgatggagctaacagaacagacatttgtcaaggtgagttgggagactgttggttcctggccgctatagcatgtttgaccctgaatcagcacctcttgttccgagttattcctcatgatcagagtttcatcgagaactatgcaggcattttccactttcagttttggcgctatggcgaatgggtggacgtggtgattgatgactgtttgcccacctataataaccagctcgtctttacgaagagtaaccataggaacgaattctggtctgccctgttggagaaggcatatgccaagctgcacggaagctacgaggcgcttaaaggaggtaatacaaccgaggcaatggaggactttactgggggagtagcggaattttttgagataagggatgctccgtcagacatgtacaagattatgaagaaggcaatagaacggggatcgctcatgggatgcagcatcgatgacggcacaaacatgacatacggaacatctcctagcgggttaaacatgggagagttaatagctcggatggttcgaaacatggacaacagcctgctgcaggacagcgacttagacccaagaggtagcgacgagaggccaacccgcacaattattcccgtgcagtatgagacaagaatggcttgtggactcgttaggggacacgcctactccgttaccgggctcgacgaagtccccttcaaaggagagaaggtaaaactagtgagactgcgcaatccatggggacaggtagagtggaatggaagctggtcagaccgatggaaggactggtcttttgttgataaagacgagaaggcacggctgcaacaccaagtgacagaggacggcgaattctggatgtcttatgaggattttatctaccattttacaaaactagagatctgcaatctgacggcggacgccctgcagagtgataagcttcagacttggactgtgagcgttaatgagggcagatgggtccgcggatgttcagccggtggttgcaggaactttccagacaccttttggaccaatccccaatacagactcaagctgcttgaggaagacgatgaccccgacgactctgaggtgatctgttcctttttagtcgctcttatgcaaaaaaacagaaggaaggacagaaagctaggtgccagcctgttcactattgggtttgcaatttacgaagtacccaaagagatgcatgggaacaaacagcacctgcagaaggatttctttttatataatgcctctaaagccaggtccaaaacgtatataaatatgcgcgaagtgtcccagcggttccgtctgccgccaagtgagtatgtgatcgtgcccagtacctacgaaccccaccaggagggagagttcattctccgggttttctctgaaaagcgcaaccttagtgaggaggttgagaacaccatctcagttgatcggcctgtcccaatcatattcgtttctgatagggccaacagcaataaagagctcggtgtcgatcaggagtcagaagaaggaaagggaaagacctctcctgataaacagaagcaatcaccacagccacagcctggcagtagtgatcaggaaagcgaggagcagcaacagttcaggaacatcttcaaacagatcgcaggcgacgatatggagatttgcgccgatgaactgaaaaaggtactgaacactgttgttaataagcataaggacctcaaaactcacggctttaccctggagagttgccgcagtatgattgctctaatggataccgatggcagtggtaagctgaatcttcaggagtttcatcacctttggaacaaaatcaaagcatggcaaaagattttcaaacactacgatacagaccaatccggcaccatcaattcctacgagatgcgtaatgccgtcaacgacgccggttttcacctgaataaccaactgtacgacattataacaatgagatatgcagataaacacatgaatatagattttgacagttttatctgttgttttgtgcgtttagaaggaatgtttcgggctttccacgcatttgacaaggatggagatggaatcatcaagttgaacgtactggagtggctacagctgactatgtacgcttag

SEQ ID NO: 216788 - DNA, 2466 bp, synthetic construct
  misc_feature 1..2466: note = Description of Artificial Sequence: Synthetic coding sequence
  source 1..2466: mol_type = other DNA
atgcctactgtaataagcgcatcagtggcgccaagaacagctgcggagcccaggtctccaggccctgtccctcaccctgcccaatcaaaggctaccgaggcgggtggaggaaacccatccggtatttacagcgctattattagccgcaacttccccattattggtgtcaaagagaaaacatttgaacagcttcacaaaaaatgcctggaaaagaaagttctatatgtggatcccgagttcccccctgatgagacatccttgttttattcgcaaaagtttccgatccagttcgtgtggaaacgacccccagagatatgcgaaaacccaaggttcatcattgatggggcaaaccggacagatatttgtcaaggagagctcggcgactgttggtttctagccgcaatcgcctgcttaaccttgaatcaacacctgttgttccgagttatcccgcacgaccagtcttttatcgaaaattacgccggaatatttcattttcagttctggaggtatggcgaatgggtggatgtggtcatcgacgattgcctgcccacctataacaaccagcttgtcttcaccaaatccaaccatcggaacgagttctggtctgccctactggagaaggcttatgccaagctgcatggatcctatgaagctctgaagggcggaaacactacggaagctatggaagatttcaccggcggagtcgccgaatttttcgagattagggacgcgccatcggacatgtacaaaattatgaagaaggcaatcgagcgtggcagcttgatgggttgttctatcgacgacggtacaaatatgacttacgggactagtccgtcaggacttaacatgggcgaacttattgcacgtatggtgcgcaatatggacaatagtctactgcaggacagcgatctcgacccccgtggcagtgacgagagacctacgagaacaataattccggttcagtacgagacgagaatggcgtgtggccttgtgaggggccacgcttatagtgtcactggcttggacgaggtgccgtttaagggcgagaaggtgaaactggtgcggctgcggaacccatggggacaagtggaatggaacggttcatggtctgataggtggaaggattggtcattcgtggataaggacgagaaggcccgacttcagcaccaggtgaccgaggacggcgaattttggatgagttacgaggacttcatttatcattttaccaagcttgagatctgcaacctgactgccgatgctttgcagtccgataagctgcagacctggactgtcagcgtgaatgaggggaggtgggtgaggggctgcagcgccggtggctgtcgaaactttcctgatactttctggaccaatccccagtacagactgaagttgttggaggaggatgatgatccggacgatagcgaggtgatctgcagcttccttgttgccttaatgcagaagaacaggcggaaagatcgcaaactgggggcttccctcttcacaattgggtttgccatctacgaggtgccaaaggagatgcacgggaacaaacaacacctgcagaaggacttttttctgtataacgcctccaaggcacgctctaagacttacattaatatgagagaggtgtcccagaggtttaggcttccgccaagcgaatacgtgattgtcccttctacttacgagccccaccaggaaggagagttcatcctgagggtattcagcgaaaagaggaatttaagcgaagaggtcgaaaacactatctctgtggaccggccagttaagaagaaaaagactaagccgattatcttcgtaagcgatagagctaactctaataaggaactgggggtggatcaggagtcagaagaaggcaaaggcaagacgagcccagataagcaaaagcagagcccacagccgcagcctgggtcctccgatcaagaaagcgaggagcagcagcaatttcgcaatatctttaaacaaatcgccggagacgatatggaaatctgtgcagatgaattgaagaaggtactcaacaccgttgtgaacaagcataaagatctcaaaactcatggttttaccttggagtcatgccgcagcatgatcgcactgatggacaccgacgggagtggtaagctcaacctccaggagttccaccacctgtggaacaaaattaaagcctggcagaaaattttcaagcattacgatactgaccagtccgggaccatcaacagttatgaaatgaggaatgcagtaaatgacgcgggattccacctaaataaccagttatatgacattattactatgagatacgctgacaagcacatgaatatcgattttgactctttcatttgctgctttgtacggttggaggggatgttccgcgctttccacgcttttgacaaggatggagacggcatcattaagctgaacgttttggaatggctgcagttaaccatgtacgcgtag

SEQ ID NO: 216789 - DNA, 930 bp, synthetic construct
  misc_feature 1..930: note = Description of Artificial Sequence: Synthetic coding sequence
  source 1..930: mol_type = other DNA
atgcacgggaataaacagcaccttcaaaaggacttcttcctgtataatgcctccaaagccaggtccaaaacctacatcaacatgcgcgaggtctctcaacgctttcggctaccgccaagtgaatacgtgattgtgccttcaacttatgaaccccatcaggaaggggaatttatcctccgcgtatttagtgagaagaggaacctgtccgaggaggtcgagaacactatttctgttgacaggcctgttaagaaaaaaaaaaccaaacccatcatcttcgtctcggatagagctaactccaataaagagctgggtgtagaccaagagagtgaggagggaaaggggaaaacaagtcccgataaacagaagcaaagcccgcaacctcagccgggttcatcggatcaggagtcggaagagcaacagcaatttcgaaatatatttaaacagattgcaggagacgacatggaaatctgcgccgacgagcttaaaaaggtacttaatactgtagtgaataaacataaggacctcaagactcacggttttaccttggagtcttgccggagcatgattgcccttatggacacagacgggagtggtaaacttaacctccaggaattccatcatctttggaataagataaaagcctggcagaagatatttaagcactacgacacagaccaatccggaaccattaattcatacgaaatgaggaacgctgtaaatgatgctggctttcacctgaataatcagctatacgacatcatcaccatgcgttatgccgataaacatatgaacattgactttgatagtttcatctgctgttttgttagactcgaggggatgttcagggccttccacgccttcgataaagacggggacggcataataaagctcaatgtcctggagtggttacagctgacgatgtatgcttag

SEQ ID NO: 216790 - DNA, 471 bp, synthetic construct
  misc_feature 1..471: note = Description of Artificial Sequence: Synthetic coding sequence
  source 1..471: mol_type = other DNA
atggagatttgtgcggacgagctgaaaaaagtgctgaacacggtagtcaacaagcataaagatctgaagacccatggttttaccctggagtcttgtcggtccatgattgctcttatggacaccgacggatccggcaagctcaacctgcaagagttccaccatctatggaacaaaattaaagcctggcagaagatatttaagcactacgacactgatcagtccggaaccatcaattcatacgagatgaggaacgctgtgaatgatgctgggtttcatttgaacaaccagctttacgacatcattaccatgcggtacgccgacaagcatatgaacattgacttcgatagctttatttgttgctttgtccgcctcgagggcatgttcagagcctttcatgcctttgataaggacggcgatggcatcatcaaacttaatgtgcttgagtggctccagttgaccatgtacgcctag

SEQ ID NO: 216791 - DNA, 1923 bp, synthetic construct
  misc_feature 1..1923: note = Description of Artificial Sequence: Synthetic coding sequence
  source 1..1923: mol_type = other DNA
atgttttcctgtgtgaaaccatatgaagatcaaaattatagtgcactgaggagggactgccggaggcgtaaggtcttgtttgaggatccacttttccccgctacggacgattctctctattacaaaggaacgccaggaccggcagttaggtggaaacggcctaaggggatttgcgaagacccgaggttgttcgtggatggcataagttcacacgacctgcaccaaggacaggttggtaactgctggttcgtggcagcatgctcaagcctggctagccgggaatccctctggcaaaaggtgattcctgattggaaggagcaggagtgggaccccgaaaagcctaacgcctacgctggtatctttcactttcatttttggcggttcggtgagtgggtggacgtggtgattgacgatcggctccctaccgttaacaaccagctgatatactgccattctaattcaagaaacgagttttggtgtgcactcgttgagaaggcttatgcgaaactggcgggatgttaccaagccctggatggcggaaatacagccgatgctttggtagattttaccggtggcgtgagtgaacctattgatctgaccgaaggggactttgcaaacgacgaaacaaaaagaaatcagcttttcgaacggatgttgaaggtgcacagcaggggaggactgatatccgcttctatcaaggcagtcactgccgctgatatggaagccaggctcgcctgtggactcgtgaaaggacacgcatatgccgtcacggacgtgcgaaaagtgcggctgggacatggactgttagcattcttcaaatcagagaagctagatatgatccgattacggaatccttggggcgagagggagtggaacgggccttggtcagacacttctgaggaatggcaaaaggtgagcaagtccgagcgtgagaagatgggggtcactgtgcaggacgatggagaattttggatgactttcgaagacgtgtgcaggtactttaccgacatcataaagtgtagggtgataaatacaagccatctgagcatacacaagacatgggaggaagccaggctgcatggggcttggacactgcatgaagaccctaggcagaacagaggcggtggctgcatcaaccacaaggacacattttttcagaatccccagtatatattcgaagtaaagaagcctgaggacgaagtgcttatttgtatccagcagcgccctaagcgcagcacaagaagagaaggtaagggagagaacttggcaatcggctttgatatttataaagtggaagaaaacaggcagtaccgcatgcactcactccagcataaggcggcaagttcaatctatatcaattcccgcagcgtgttccttaggactgatcagcctgaaggtcgatatgtgattataccaaccaccttcgagccaggtcacacaggagaatttctgctaagggtattcactgacgtcccaagcaattgtagagaactccgactcgatgagccaccccacacatgctggtcatcactgtgtggctatccccagctcgtgacgcaggttcacgttctgggcgctgcgggactcaaggactcccccactggtgctaacagctacgtgattattaagtgcgaaggggataaagtgcgcagcgcagttcagaaggggaccagtacccccgagtacaatgttaaggggatcttctaccggaaaaagctgtcgcaacctatcactgtgcaagtgtggaaccaccgagttctcaaagatgagttccttgggcaggtgcatcttaaggccgatccagacaacctgcaggcacttcataccctccatctgcgcgacagaaacagcaggcaacccagcaatctccccggtaccgtcgccgttcacatcctgagttctacatccttgatggcggtttag

SEQ ID NO: 216792 - DNA, 2043 bp, synthetic construct
  misc_feature 1..2043: note = Description of Artificial Sequence: Synthetic coding sequence
  source 1..2043: mol_type = other DNA
atgtcttgtacggggaccccatcgtgtatctacctcctctctgcactgagcttacaggacctggtactggattgggaacctcggggagtgccacctccactgcccggtgcagccgcaacgatgttcagctgtgtgaagccatatgaagatcagaactactccgccctgcgaagagactgcagacgcagaaaggttctatttgaggatccgctttttccagcaacggacgactcactttactacaagggcaccccaggccctgctgtgcgctggaaacggcctaaagggatttgcgaggacccacgcctgttcgtggacgggatatcatctcacgacctgcatcaggggcaggtgggaaactgttggttcgtggccgcttgtagtagcctggcttcccgggaatccctttggcagaaggtgatccccgattggaaggagcaggagtgggatcctgagaagccaaacgcctacgccggtatattccatttccacttttggcggtttggagaatgggttgacgtagtcattgatgatcggctgccgacggtcaacaatcagctgatatattgccactctaactcgagaaacgagttctggtgtgccttggtggagaaggcctacgctaagttggctgggtgttatcaagctttagacggcggtaacactgcggacgctctcgtcgatttcacaggcggagttagcgaaccaatcgacctgaccgaaggggacttcgctaatgatgaaaccaagagaaatcaactatttgagcgaatgctcaaggtccacagtcgcggtgggctcatcagcgcaagcatcaaggcagtgacagctgctgacatggaggcgcgattagcatgtggccttgttaagggacacgcctacgccgtgacggatgttcgtaaagtccggctcggtcacggtttgctggcattctttaagtcagaaaaacttgatatgatccgccttcgcaacccctggggtgaaagggagtggaacggcccatggtccgacactagcgaggagtggcagaaagtctccaagagcgaacgtgaaaagatgggcgttactgtccaggacgatggggagttctggatgacctttgaggacgtttgtaggtacttcacagatatcattaagtgccgggtgatcaatacctcgcatctgtcaattcataagacctgggaggaggcaaggctgcacggggcatggacattgcacgaagaccccaggcaaaatagaggcggtgggtgcatcaaccataaagacacatttttccagaatcctcagtacatttttgaggtgaaaaaacccgaagatgaggtgttgatctgtatccagcaacgtcccaaaagatccacgcggagggaagggaaaggggaaaatcttgccatcgggttcgacatctacaaagtggaggaaaatcgtcaatacaggatgcatagcttacagcataaggctgccagcagcatttacataaatagcaggtccgttttcctccgaacagatcaacccgaagggaggtacgttatcatcccgaccaccttcgagcctggacacactggtgaattccttctgagagtgttcaccgatgtacctagcaattgtcgggagttgcgattagacgaacccccacatacctgttggagtagcttgtgcgggtacccccagttagtcactcaggttcacgtcctgggggctgccggtctgaaggacagtcccaccggagctaattcctacgttataatcaaatgtgagggcgacaaagtcagaagcgccgtccaaaaaggaacctctactcctgaatataacgttaaagggattttttacaggaagaagcttagtcaacccattactgtgcaggtttggaatcacagagtgctcaaagacgagttcctcgggcaggtccacttgaaggctgaccccgataacctgcaggcattacatactctccaccttcgggatagaaatagtcggcagccatccaatctccctgggaccgtggctgtgcatattctgagctccaccagcctaatggccgtgtag

SEQ ID NO: 216793 - DNA, 294 bp, synthetic construct
  misc_feature 1..294: note = Description of Artificial Sequence: Synthetic coding sequence
  source 1..294: mol_type = other DNA
atgttctcctgcgtgaaaccgtacgaagaccagaattactcggcgcttcgtcgggactgtcgtcggaggaaggtcctcttcgaggaccccctgttcccggctacagatgatagcttatactataaggggacccccggaccagcggtgaggtggaagagacctaaagggatctgcgaagatccaagactgttcgtagacggaatatctagccatgacttgcatcagggtcaagttggaaattgctggttcgtggcagcctgttcctctctagccagcagagagtctctctggtag

SEQ ID NO: 216794 - DNA, 1923 bp, synthetic construct
  misc_feature 1..1923: note = Description of Artificial Sequence: Synthetic coding sequence
  source 1..1923: mol_type = other DNA
atgttttcttgtgtcaagccctacgaagatcagaactactctgccttgagacgcgactgccggcgtagaaaagtgctattcgaggaccctctctttcccgcaacagacgactccctgtactacaaaggcacccccggtccggctgtgaggtggaagaggcccaagggaatctgtgaggacccacggctctttgtggacggaatctcctcacacgacctacatcaggggcaggtgggaaactgttggttcgtggccgcttgctcttcattggcaagcagggaaagtctctggcagaaggttattccagactggaaggaacaagagtgggatccagagaaacccaatgcatacgccggaatctttcatttccatttttggcggtttggggagtgggtcgatgtcgtcatcgacgacagactgcccaccgtgaacaatcagctgatctattgccatagtaacagcagaaacgaattttggtgcgccctagtagaaaaggcctacgctaagttggcaggttgttatcaagccctggatggcggtaacacagccgatgcgcttgtcgactttacaggaggggtgtcagagcctattgatctgactgagggcgactttgccaacgatgaaacaaagcgcaaccagttattcgaaagaatgctcaaagtgcactcccggggtggactgatctctgcaagtatcaaagctgtgacagccgcagacatggaagctcggctggcttgcggtttggtgaaggggcacgcttatgctgttacggacgtccgcaaggtccgactcgggcatggactgctggcgtttttcaagtccgaaaaactcgacatgatccggctgagaaacccgtggggggaaagggagtggaacggtccttggtctgatacctccgaggagtggcagaaggtttcaaaaagtgaacgggagaaaatgggtgtaacggttcaagacgacggcgagttctggatgacgttcgaggacgtgtgtcgctatttcaccgacataattaaatgccgggttatcaacacaagccatctgagtattcataaaacatgggaggaagcccgtttacacggggcttggaccctccacgaagatcccaggcagaatcgcggaggcggatgcatcaaccacaaggatacctttttccaaaatccacaatacatattcgaggtcaaaaagcccgaagacgaggtactgatatgcatccagcagaggcccaagcggagcacgcggcgtgaggggaaaggtgagaatctcgccattgggttcgacatctataaggtcgaggaaaataggcagtaccgcatgcactctctgcaacataaagccgcatcctctatttacatcaattccaggtccgtctttctgagaactgatcagcccgagggtaggtatgtcatcattccaacaacttttgagcctgggcacaccggagaattcctgctgcgggtgttcactgatgtaccttctaattgccgggaactgagactggacgagccccctcacacatgctggagctctctttgcgggtaccctcaactggttacccaggtccatgtgttgggagccgctggactgaaggatagcccaaccggagccaactcttatgttatcattaaatgtgagggagataaggttcgctctgcggttcagaagggaacctctacacccgagtataatgtgaagggcattttctatcgcaagaagctgagtcagcccataactgtgcaggtttggaaccatcgtgttttaaaagacgaattcctcggacaggtccacctcaaggcagatcctgataatctgcaggctctccataccctccacctgagagataggaacagtcggcaaccaagcaacctccctggcactgtcgccgtacacatcctttcctccacttctcttatggccgtttag

SEQ ID NO: 216795 - DNA, 1674 bp, synthetic construct
  misc_feature 1..1674: note = Description of Artificial Sequence: Synthetic coding sequence
  source 1..1674: mol_type = other DNA
atgtttagctgcgtgaaaccatacgaagatcagaactattcggccctgcgcagggattgtaggagaaggaaggttctgtttgaggacccactgttccccgcaaccgacgactccttgtactacaaaggaaccccgggtcctgcggtccggtggaagagaccaaagtacagcgggcattctctagctcctcatagaccaggatggggggacgctcgtcgcatggagaatgttccgaggcccggatctagtggttgtcctagctcatccctgcgtgcacgcgatttgggaatttgtgaagatccacggctcttcgtggatggaataagtagccacgatttacatcagggccaggtggggaactgctggttcgtggccgcatgcagttcgctagccagcagagagagtctgtggcagaaagtaattccagattggaaagagcaggagtgggacccggagaagccaaatgcctacgccggtatcttccactttcatttttggcggttcggtgagtgggtcgacgtcgtgatcgacgatagactgcccaccgttaataatcagctcatctactgtcactccaattcccggaacgagttctggtgtgcacttgtggaaaaggcctacgcaaagctggcagggtgttatcaggctttggacggagggaataccgctgatgcactggttgatttcacgggtggtgtctctgagccaattgacctcacagagggggactttgccaacgatgagacaaagagaaaccagctcttcgagcgtatgctgaaggtacatagtagaggcggactgataagcgcaagcattaaggccgtgaccgccgctgacatggaggcccgtttggcttgcgggctagttaaaggccacgcttacgccgtgacagatgtaaggaaggtgcggctgggacacggtttgctggctttttttaagtctgaaaagctcgacatgattcgcctccgcaacccttggggggaacgtgagtggaacggcccttggtcagacacctccgaggaatggcagaaggtctcaaaaagtgaacgggagaaaatgggcgtgacggtccaggatgatggtgagttttggatgaccttcgaggatgtgtgtcgctactttactgacatcatcaagtgcagagttatcaacactagccacctgtctatccacaagacctgggaagaagccagattgcatggggcttggaccttgcatgaggatccccgtcagaatcggggtggcggttgcatcaaccataaagatacattctttcaaaatcctcagtacatctttgaggtcaagaaacctgaagacgaggtgctgatctgcattcagcaacgcccaaagaggagcacgagaagagaaggcaagggcgaaaacttagctatcggattcgatatctacaaagttgaggaaaaccgtcaatacaggatgcatagccttcaacataaggctgcgagctccatctatattaattctaggtccgtcttcctgagaaccgatcagcctgagggtagatacgtaattattcccacaaccttcgaacccggacatactggggaatttttgctgcgggtgttcaccgatgttccatccaactgccgcgagctgagactcgatgagccacctcatacttgctggtcctcactgtgcggatatccacagtggtag

SEQ ID NO: 216796 - DNA, 2442 bp, synthetic construct
  misc_feature 1..2442: note = Description of Artificial Sequence: Synthetic coding sequence
  source 1..2442: mol_type = other DNA
atggatgccactgccttggagagggatgccgttcagttcgctcgcctcgccgttcagcgggatcacgagggaaggtacagtgaagctgtcttctattataaagaagccgcacaggctcttatctatgccgagatggctggatcttcattagaaaatattcaggaaaagattaccgaatacctggagagggtccaagctttgcactctgccgttcagagcaagagtgctgacccgctcaagtccaaacatcaacttgacttggaaagggcccatttcctcgtgacacaggcctttgacgaggacgaaaaggaaaatgtcgaagatgctattgagctgtatactgaggccgtagacctgtgcctaaaaacttcatatgaaacagctgacaaggtcctgcagaacaagctgaaacagttggccaggcaggcccttgacagggcagaagccctcagtgagcccctcactaagccagtaggtaagatctctagcacatctgtcaagcctaagccgccaccggtccgcgctcattttccactaggggctaacccgttcctcgaacgtcctcagagctttattagcccacaatcttgtgacgcacagggacagcgatacacagcagaggaaattgaagtgcttcggaccacatcgaagatcaatggaatcgaatacgtaccattcatgaacgtcgatctgagggaacgatttgcctaccccatgcctttctgcgatcgctggggcaagctgcccttgagtcccaagcagaagaccacgttctctaagtgggtcagacccgaggacttgactaacaaccctacaatgatttacaccgtcagctctttctcaattaagcagacgatcgttagcgattgcagttttgttgccagcctagccatcagcgcagcctacgaacgcaggttcaataaaaagttgatcactggcattatttatccccagaacaaggacggagagcctgaatacaacccatgtggcaagtatatggtcaagctccatctgaatggggttcctcgcaaggttatcatcgacgatcagctcccagtcgatcacaaaggtgagctgctgtgcagctacagtaacaataagtctgaactatgggtgtcactgatcgagaaggcttacatgaaggttatgggcggatatgattttcctgggagtaactctaatattgacctccatgccctcacaggttggatccccgaacggatcgccatgcactcggattcacagacatttagtaaagacaactcctttcggatgctgtatcagaggttccacaaaggggatgtcctgatcaccgcctcgacagggatgatgaccgaagctgagggggagaaatggggcctcgttcccactcacgcatatgccgttctggatatacgggagttcaaggggttgcgcttcattcagctgaaaaatccttggagccacctacggtggaagggcaggtattcggagaatgatgttaaaaactggactcctgagttgcaaaaatacttaaactttgatcctagaactgcccagaagatcgataatgggatattctggattagctgggatgatctgtgccaatactatgacgtgatctacctgtcatggaaccctggacttttcaaggagagtacatgcattcactctacatgggatgcaaaacaggggccagtgaaggatgcttactctctcgctaacaatccacagtataaactggaggtccagtgtcctcagggaggcgcagcagtgtgggtcctgctatctcgccacattaccgacaaggacgactttgcaaacaaccgcgagttcatcacaatggttgtgtataagacagacggaaagaaagtctactaccctgccgatccaccaccgtatattgatggaatcagaattaatagcccccattacttaaccaagatcaagctaaccacacctggtacccatactttcaccttagtggtcagtcagtacgagaagcagaacaccatccattacaccgttagggtctactctgcatgttcatttacgtttagcaagatacccagcccctatacgctgagcaaaaggatcaatggtaaatggagcggccagtcagccggaggttgtggcaactttcaggaaacccataagaacaacccaatatatcagttccacatcgagaagacagggcctctgttgattgaacttcggggacctcgccaatacagtgttggtttcgaagtagtcacggtgagcacccttggggaccctggtccacacggctttctccggaagtcctccggagattataggtgcgggttctgttacctcgaattagagaacatcccttccggcatctttaatatcatcccatccactttcctccctaaacaggaaggccctttcttcctggattttaactcgattatcccaatcaagataacccagctgcaatag

SEQ ID NO: 216797 - DNA, 2073 bp, synthetic construct
  misc_feature 1..2073: note = Description of Artificial Sequence: Synthetic coding sequence
  source 1..2073: mol_type = other DNA
atgccatatctgtaccgggcacctggcccacaggcccatcctgtgcctaaagacgcaagaatcacgcattcaagtggacaatcctttgagcagatgagacaggaatgcctgcagcgcggaaccctcttcgaggatgctgatttccccgcttccaattcctctctcttctatagtgagaggccccagattccgttcgtttggaaaagaccaggcgagatcgtcaaaaatcctgaattcattctagggggagctacccgaacagacatttgccaaggcgagctgggcgactgttggttgctcgccgcaattgctagtctgacacttaatcagaaagcattggcccgagttattccccaggaccaaagcttcggcccaggctacgccggaattttccattttcaattctggcagcactccgagtggctggacgtggtaattgatgaccgattacccacgtttcgggataggttggtatttctgcacagcgccgaccataacgaattttggagtgcactgctcgaaaaagcctatgccaagttgaatggatcatatgaggcattgaagggagggtctgctatcgaggccatggaggacttcactggtggagtggcagagacctttcagactaaggaggcccctgagaatttctatgagatcttagaaaaggccctcaaacggggatctctgttaggatgctttatagacacgcggagtgcagcagagagcgaagccagaacacctttcggattaataaaggggcacgcatacagtgtgaccggtatcgatcaggtgagttttagaggtcagaggattgagctaatccgcattcgaaacccttggggtcaggtggagtggaacgggtcctggtctgacagttccccagagtggaggtcagtgggaccagccgagcagaaaagactctgccacaccgccttagatgatggcgagttctggatggctttcaaggacttcaaagcccattttgataaagtggagatctgtaatttgacccctgacgctcttgaagaggatgccattcataagtgggaggttactgtgcatcagggaagctgggtccgagggtctaccgctggaggctgcagaaactttttggacacattctggacgaatcctcagatcaaactgtccctgacagaaaaagatgaggggcaagaagaatgctcctttctggtagcgctgatgcagaaagacaggcgtaagctgaaacggttcggagctaatgtccttacaataggatatgccatctacgagtgtccggataaagacgaacacttaaataaagatttcttcaggtaccatgcttctagagcgaggagcaagacatttataaacctacgtgaggtcagcgatcggttcaagcttccaccaggagaatatatcctcataccgtctacctttgagcctcatcaggaagcagatttctgcctccggatcttcagcgaaaagaaagcgattacgcgggacatggacggaaatgttgacattgatttgcctgagccacccaaacccacacctcccgatcaagagaccgaagaagaacagaggttcagggcgctgttcgaacaggtggctggcgaagatatggaagtcacagcggaagagttagagtacgtcttgaacgctgtgttacagaagaaaaaggacatcaaatttaagaagctctcccttatcagctgtaaaaacattatctcgctgatggatacgtctggcaacggaaagctcgagttcgacgagttcaaagttttttgggataagcttaaacaatggataaacctgtttcttcgcttcgatgcagacaagtctggaaccatgtccacctacgagctgcggaccgcgctcaaagccgcagggtttcagctgtcatcccacctccttcagctgattgtgctccgctacgcagatgaggaattgcagctagatttcgatgactttttgaattgcttggtaaggctggaaaatgcatccagagtgttccaggccctgagcactaagaacaaagagttcatccacctaaacatcaatgagttcattcacctgaccatgaacatctag

SEQ ID NO: 216798 - DNA, 1995 bp, synthetic construct
  misc_feature 1..1995: note = Description of Artificial Sequence: Synthetic coding sequence
  source 1..1995: mol_type = other DNA
atgccttatctttatagagcacctgggccacaggcccatcctgttccaaaggacgctcggattacccactcctctggccagagctttgaacagatgcggcaggagtgtttgcaacgtggaacgctgtttgaggacgcggatttcccagcatccaatagctcacttttttacagtgaaagacctcagatcccttttgtgtggaagaggccgggagagatcgtcaaaaacccggagtttattttaggtggagctacgaggacggatatctgccagggggagttgggcgattgttggctccttgccgcaattgcgagcttgacgctgaatcagaaggccctggcgcgtgttatccctcaagaccagtcattcggcccaggctacgcaggtattttccatttccaattctggcagcattccgagtggctcgatgttgtgattgacgatcgcctgccaacgttccgcgacagactggtgttccttcattcagcggatcataatgaattctggtcagctctgcttgaaaaagcctatgccaagctcaatggctcatacgaggccctcaaggggggatcagcaatagaggccatggaggactttaccggaggggtcgctgagacattccaaacgaaagaagcgccagagaatttttacgagattctggagaaagccctcaagaggggaagtctgctaggatgctttattgatacgcgtagtgcggctgagtcagaagcacgcaccccttttggcctaatcaaggggcacgcatatagtgtgacaggtatcgatcaggtgagtttcaggggacagagaatcgagttaatccggatacggaatccgtggggtcaggttgagtggaacggtagttggtccgacagaatggctttcaaggatttcaaagcccatttcgacaaagtcgagatttgcaatctgacaccagacgctctggaggaggatgctatacataagtgggaagttacagttcaccagggatcctgggtgcgcggatctacagcagggggatgtagaaatttcctggacacattctggactaacccccaaataaaactctctctgaccgagaaggatgaggggcaggaagaatgtagcttcctcgtggccctaatgcagaaggaccgcagaaagctgaagcgatttggcgctaacgtgctcacaatagggtacgctatctacgaatgcccggacaaggacgagcatttaaacaaggattttttcaggtaccatgcgagcagagcgaggtcaaaaacattcattaacctgcgggaagtgtccgacagatttaagctgccaccaggcgaatatattttaattcctagcacttttgaaccacatcaagaggcggacttctgtttgaggatcttcagcgagaagaaggctattacccgtgacatggacggaaatgtggatatagacctcccagaaccacctaagccaaccccccctgatcaggaaacggaggaggaacaacgattccgtgccctcttcgagcaggtcgccggagaggatatggaggttacagccgaagagcttgagtatgtcttaaatgccgtgcttcagaaaaaaaaggacattaagtttaaaaagctctccctgatcagttgcaaaaatattattagcctcatggacactagcggtaacgggaagctcgagttcgatgaattcaaggtgttttgggacaagttgaagcagtggattaacctgttcttgagattcgatgccgacaaatcaggcacaatgagcacctacgaattaagaacagccttgaaggcagcaggcttccagctgtctagccatttgctgcagctcattgtgctgcggtatgcagatgaggagctgcagctggactttgatgacttccttaactgcctagtgcggctcgagaacgcttcccgggtgtttcaagcactgagcaccaagaataaggaattcatccacctcaatatcaacgagtttatccatctgactatgaatatctag

SEQ ID NO: 216799 - DNA, 1884 bp, synthetic construct
  misc_feature 1..1884: note = Description of Artificial Sequence: Synthetic coding sequence
  source 1..1884: mol_type = other DNA
atgccatacctttaccgcgctccaggtccacaggcccaccccgtcccaaaggatgccaggattacccacagctccggtcagtcctttgaacaaatgcggcaggagtgtctccagaggggtaccctctttgaggatgctgacttcccagcatcaaatagttccctcttctacagcgaacggcctcagattccattcgtctggaaacgacctggcttttggcaacattctgagtggctggatgtcgtcatcgatgaccgcctaccgacattcagggaccgtctggtcttccttcatagtgccgaccacaacgaattctggagcgcgttactggagaaagcttatgcaaaacttaatggaagctatgaggctttaaaggggggatcggccatcgaagccatggaggacttcaccggcggtgtagcagaaacgttccaaaccaaagaggccccagaaaacttctatgaaattctggagaaggccctcaagcgcggttcccttttgggttgtttcatagacacgcggagcgccgctgaatccgaggccagaacccctttcggtctgatcaagggccatgcatacagcgttacagggatcgatcaggtttctttcagggggcagaggatagaactgattcggatcagaaacccttgggggcaggttgagtggaatggcagctggtccgactcctctcctgagtggcggtcagtcgggcctgccgaacaaaagcgcctgtgtcacacagcattagacgatggagaattttggatggccttcaaagacttcaaagcccacttcgacaaggtcgagatttgcaatctgacccctgatgcccttgaggaagacgctattcataagtgggaagtcactgtgcaccagggatcttgggtgcggggttccacagctggagggtgccgcaactttctggacactttctggaccaacccgcaaatcaagctctcactaacagaaaaagatgaaggtcaggaagaatgctcctttctagtggctcttatgcagaaggatcggagaaaattgaaaagattcggtgctaacgtgctgaccataggctatgccatctatgagtgtccggataaagatgaacacctcaataaggattttttcaggtaccacgcatccagggccaggagcaagacttttattaacttaagggaggtgtccgataggttcaagttacccccaggtgagtatatcctgatcccttctacgtttgagccacaccaggaagccgatttctgtttgagaatattctccgaaaagaaagctatcactagagacatggatgggaacgtggacatcgatctcccagagcctccaaagccgactccgcctgaccaggagactgaggaggaacagcgctttagagcgctgttcgagcaggttgcaggggaggatatggaggtgactgctgaggagcttgaatacgtattaaatgccgtgctgcagaagaaaaaggatatcaaatttaaaaagctaagcctgatcagctgcaagaacattatttctctaatggataccagcgggaacggtaagctagaattcgacgagtttaaagtgttttgggacaagctgaaacagtggatcaatctcttcctgcggttcgacgccgataaatcaggtaccatgagcacatacgagttacgtactgcgctgaaggctgctggatttcaactgagctcccacttgctacagctgatagtcctgcgctacgcggatgaggaactccagctggactttgacgattttctcaactgcttagtgcgcttagagaatgctagtcgtgttttccaagcgctttccaccaaaaataaagagttcattcacctaaacatcaacgaattcattcacttgaccatgaacatttag

SEQ ID NO: 216800 - DNA, 807 bp, synthetic construct
  misc_feature 1..807: note = Description of Artificial Sequence: Synthetic coding sequence
  source 1..807: mol_type = other DNA
atgttcctggtgaattccttcctgaaaggcggtgggggtggaggaggcggagggggaggactcggcggagggcttggaaatgtgctgggagggctgatttcgggcgctggcggaggcggaggtggcggtggcggaggtgggggaggcggagggggtggtggtggaggcactgcgatgaggatcctcggcggtgtcataagcgcaatcagtgaggccgcagcgcagtacaatcctgagcctccaccaccgagaactcattacagtaacatcgaggcaaatgagagcgaagaagtccgtcagttccgcaggctgtttgcccagcttgcgggtgatgatatggaggtaagcgccactgagctgatgaatattcttaacaaggtcgttacccgccaccctgatttgaagaccgacggctttgggatagatacttgcaggtcaatggtagcggtgatggattctgacacaacgggtaaactaggattcgaagagttcaagtacctttggaacaatataaagagatggcaagccatatacaagcagtttgatactgatcgctccgggacgatctgttctagcgaactccccggagccttcgaagcagcgggtttccacctgaatgagcacctttataacatgattatccgacgatacagtgatgagtctgggaacatggatttcgataacttcatttcttgtctagtgcgactcgatgcaatgtttagagcttttaaaagcctcgataaggatggaactggacagatccaggtgaatatccaggaatggctacagctgacgatgtatagctag

SEQ ID NO: 216801 - DNA, 2061 bp, synthetic construct
  misc_feature 1..2061: note = Description of Artificial Sequence: Synthetic coding sequence
  source 1..2061: mol_type = other DNA
atgaacccgacggagaccaaggccgtgaaaacagaaccggagaaaaagtcgcaaagcacgaagttgtctgtggttcatgaaaaaaagtcccaagaggggaaacctaaagaacataccgagcctaagagtctacccaagcaagcttctgacaccggctctaacgatgcacacaacaaaaaagctgtctcacgcagcgctgaacagcaaccaagcgagaagagcactgaacctaaaactaagccacaggatatgataagtgcagggggagaaagtgtggctgggatcacagcgatttctgggaagccaggcgataagaaaaaggagaagaaatcccttacccccgctgtgcccgtggaatcgaagcctgacaagccctcaggaaagagcggtatggacgcagcgttggacgacctgattgatacgttaggtggacccgaggaaaccgaggaggagaatacgacctacacagggccagaggtctcagaccccatgagctccacctacattgaggaattgggcaagcgggaggtaacgattccccctaagtatagagaattgctggccaaaaaagagggcattaccggaccacccgcagattcgagcaaacccatcgggccagatgatgctattgatgctctgtcgagcgattttacctgtggcagtcccacggccgcaggcaaaaaaacagaaaaagaggaatcaaccgaggtcctcaaagcccaatctgccggtactgtgcgttcagccgctccaccacaggaaaagaagaggaaagtcgaaaaggatactatgtcagaccaggctctggaagccctgagcgcatctctgggcactcggcaagcagagccagaactcgacttgcgatctataaaagaagtggatgaggctaaggccaaagaggagaaactggaaaagtgcggcgaggacgacgaaaccatcccctccgagtatcgtctcaaaccagccaccgacaaggacggtaaaccccttcttcccgagccagaagaaaagcctaaaccaagatcagaaagcgaattaatcgacgaactgagcgaggacttcgataggtccgagtgcaaagagaagccctcaaaaccaaccgaaaaaactgaggaaagcaaagctgctgctcctgcacctgtcagtgaagccgtgtgtagaacttccatgtgctcaatccagtccgcccctcccgagcctgctactctcaagggaaccgttccagacgatgccgtcgaggcactggccgattctctgggcaagaaagaagccgacccagaggatgggaagcccgtgatggataaggtcaaagaaaaggcaaaggaggaggacagagaaaagctgggggagaaggaagaaactatcccccctgactacagattggaagaagtgaaagacaaggatgggaaaccactgttacctaaagagagcaaggagcagcttccccctatgtcggaggactttcttctcgacgccctgtctgaggacttcagcggtcctcaaaacgcctccagtcttaagttcgaggatgccaagctcgccgcagctattagcgaagttgtgtcacaaacacctgcttcaaccacccaggcaggtgcacctccccgagacaccagccagagcgataaagacttggacgacgcccttgataaactatcagactcgctcgggcagaggcagcccgatccagatgagaacaagcccatggaggataaggtcaaggagaaagccaaggctgaacacagagataaactgggcgagagggatgataccattccacccgaataccgacacctacttgacgacaacggccaggataagccagtgaagccgcctactaaaaaaagtgaggattccaaaaagccagcagatgaccaagatcccattgacgcgctgagcggggatctcgacagctgcccgagcaccacagaaacatcccaaaataccgctaaagacaagtgcaagaaggctgctagctccagcaaggcaccaaaaaacggcggaaaagcgaaggactcggcgaagaccaccgaagaaacctcaaaaccaaaggacgactag

SEQ ID NO: 216802 - DNA, 2271 bp, synthetic construct
  misc_feature 1..2271: note = Description of Artificial Sequence: Synthetic coding sequence
  source 1..2271: mol_type = other DNA
atgtctcagccaggtcagaaacccgctgcatctcctaggccacgtcgcgctgccgctgcaagaaggacccacgagcacgtgtcagaaaaaacttctgaaagtcctagcaagccaggcgaaaaaaaagggagtgacgagaagaaggccgcttctttggggtcctcacagagctccaggacgtatgctggagggaccgcctcagcaactaaggttagtgcatcctcaggtgctacatctaagtcctcctccatgaaccctacagaaactaaagccgttaaaacagagcctgagaagaagtcacagtctaccaaattgtcagttgttcacgaaaagaagtcacaagaagggaagcctaaagaacatacggaacccaagagtctacccaagcaggctagtgatactggcagcaatgacgcacacaacaagaaagcggtttcacgatctgctgaacagcaaccgagtgagaaatccactgagccgaagaccaaacctcaggatatgatttccgccggaggcgagagcgtagctggaattaccgcgatcagcggtaagcccggagacaaaaaaaaagagaaaaagtccctgacaccagcagttcctgtcgagtccaagcccgataagccgtccggaaaaagcggaatggacgccgctctggacgatttaatcgacaccttgggcggtccagaggagactgaggaagagaacacaacatataccggccctgaggtgagtgatccaatgagttcaacctatatagaggagctgggtaaacgggaggtcaccatcccacccaaatatcgagagctgctggctaagcccattggccctgacgatgccatcgacgctctttctagcgattttacttgcgggtcccccactgcggctggtaagaagactgagaaagaagagtctaccgaggtgttgaaagcgcagtccgccggaacagtccgctcagccgctcctccacaggagaaaaaacgaaaggtggagaaagataccatgtccgaccaagcactcgaggcgctgagcgccagtctgggaacacgccaggcagaaccggagttggatctaagatcgattaaggaagtggacgaagcaaaggcaaaggaggagaagctggagaaatgtggggaggatgacgaaaccatcccatctgagtataggctgaaacctgccactgataaagatggcaaacccctccttccagagcccgaagaaaaacccaagccacgtagcgaatcggaactcattgatgaactgagcgaggactttgataggtcggaatgcaaggagaagccctccaaacctactgagaaaaccgaggagtcaaaagcagccgctcccgctccagtcagcgaggctgtctgtagaaccagcatgtgttctattcagagtgcaccaccagagcccgcaaccttgaagggcaccgtgcctgacgacgccgtagaagcgctggccgacagcctgggcaagaaggaggccgaccccgaggacggaaaaccagtcatggacaaggtgaaagagaaggcaaaggaggaggaccgagaaaaattaggtgagaaggaagagaccatccccccagactacagacttgaggaggtcaaagataaggatggcaaacccttactgcctaaagagtcaaaagagcagctaccccctatgtctgaggattttctactcgatgctctgtccgaagatttctccgggccacaaaatgcatccagcttgaaattcgaggacgccaagctcgccgcagctattagcgaagtagtttctcagactccagcctcaacgacccaggctggtgcaccccctcgcgatacctcacagtctgataaggacctcgatgatgctctcgataagctcagcgatagtttagggcaaaggcaacctgatccagacgagaataagcctatggaggataaagtgaaagagaaggctaaagcagaacatcgggataaactaggagaaagagacgacaccatccccccagagtacaggcacttactggacgataacggtcaggacaaacccgttaagccccctacaaaaaaaagcgaggactcaaaaaagccagccgatgatcaggatcccatcgatgctctctctggtgacctcgactcctgcccatctactaccgagacgtcccagaacactgcaaaggacaaatgcaagaaagccgcaagctctagcaaggctccaaagaacgggggaaaagcaaaggattccgctaagactacagaggagactagcaaaccaaaggacgattag

SEQ ID NO: 216803 - DNA, 2088 bp, synthetic construct
  misc_feature 1..2088: note = Description of Artificial Sequence: Synthetic coding sequence
  source 1..2088: mol_type = other DNA
atgaatcctactgagaccaaagccatcccggtgtcccagcagatggagggtccccatctccccaataagaaaaaacacaaaaaacaagccgtgaagacggagcccgagaagaaaagccagtctacgaagctcagcgtcgtccatgagaagaagagtcaggaaggaaaaccaaaggagcataccgaaccgaaatccctgccaaagcaggctagcgatactggatcgaatgatgcgcacaacaagaaggccgtctccaggagtgccgagcaacagcctagcgaaaagagtactgagcctaaaacgaaaccacaggacatgatcagtgcgggtggggaaagtgttgccggtataacagcaattagcgggaaacctggtgataaaaagaaagagaaaaaaagtctgactccggcagttccagtggaaagcaaacctgacaaaccaagcgggaaatctggcatggatgctgcacttgacgatctaatcgacacattgggcggacccgaggagaccgaggaagaaaacactacatacacaggacccgaggtttcagatccaatgagctcaacctatatagaagagctgggcaagcgagaggttaccattccacccaaataccgcgagctgctggctaagccaatcggccctgatgatgctatagacgccctcagctcagatttcacttgtggctcccccactgccgcagggaaaaagacagagaaagaggagagcacagaagtacttaaagcgcagagtgccggaaccgtccgttcggccgcaccaccccaggagaaaaaaaggaaagtggagaaggataccatgtctgatcaggctctggaggccctgtcagcctcactgggcactagacaagcagagccggagctcgatttgcgctcaattaaggaggtcgatgaggccaaagctaaggaggaaaaactggaaaaatgtggcgaagatgacgaaaccattcccagcgagtatcggctgaaacccgctactgataaggacggtaagccgctgctcccggaacctgaggagaaacccaagcctcggtcagaatctgaacttatagacgagctgtccgaagactttgatcggagcgaatgtaaggaaaagccaagcaagcctacggaaaaaaccgaagaatctaaggcagcagcgccagccccagttagtgaggcagtgtgtcgcacatcaatgtgttcaattcaatccgctcctcccgaacctgcgacccttaagggcaccgtgccagatgatgccgtggaggccctcgcggatagtctcgggaaaaaggaagccgaccccgaggacggcaaacctgttatggacaaagtcaaggagaaagcaaaggaagaagatcgagagaagttgggcgagaaagaagagaccattcccccagactaccggcttgaagaggtcaaagataaggatggtaagcctttactacccaaggaaagcaaggagcaactgccacccatgtctgaagatttcctcctcgacgccctttcggaagacttctctgggcctcaaaacgctagcagcttgaagtttgaagatgccaaactggctgccgctatctcagaggtcgtctcccaaaccccagcctcaacaacccaggccggagcaccccctagagatacatcccagtctgacaaggatctggacgatgcacttgacaagttgtcagactctctggggcagcgtcaacctgatccagacgaaaacaagcccatggaggacaaagtgaaggagaaggctaaggcagagcatagggataagctcggggagcgcgacgatacaattccacccgagtaccggcatctgctcgatgataacggtcaagataagcccgtaaaaccccctaccaaaaagtccgaagactcaaagaaaccagccgatgatcaggatcccatagatgccctcagcggagatcttgacagctgtccttcgaccaccgaaaccagccagaataccgcaaaagataagtgcaaaaaagcagcatcctcctccaaggcccctaagaatgggggtaaagccaaagattcggccaaaaccacagaggaaacgagtaagcccaaggatgattag

SEQ ID NO: 216804 - DNA, 2127 bp, synthetic construct
  misc_feature 1..2127: note = Description of Artificial Sequence: Synthetic coding sequence
  source 1..2127: mol_type = other DNA
atgaatccgacagaaacaaaggccatccccgtgagtcagcaaatggaaggaccacatcttcccaacaagaaaaagcacaagaagcaggcggtaaaaacggagcctgaaaagaaaagtcaaagtacaaagctgtccgtcgtccacgaaaaaaaaagccaagaagggaagccgaaagagcatacagaacctaaaagtctgccaaaacaggcctcagacactggaagcaacgacgctcataacaaaaaagccgtctctagatcagcagagcagcagccgagcgagaagtctaccgaaccgaaaaccaagccccaggacatgatcagtgccggtggagaaagcgttgctggaatcaccgcaatctctggaaaaccaggggacaagaagaaggaaaagaaaagcctgacaccggcagtcccggtggagtctaaacccgataaaccaagcggcaagagcgggatggacgcagccctcgacgatctcattgacacattggggggtccggaagaaacagaagaggaaaacaccacttacacggggcctgaggtcagtgacccaatgtcctccacttatattgaggagctcggcaaacgagaagtgactattccgccaaagtaccgggaattgcttgccaaaaaggaaggaatcactggaccacctgccgatagttcaaagcccatcggcccagacgacgccattgacgcactcagcagtgacttcacatgcgggtcacccaccgccgctggcaagaagaccgaaaaagaagagtccacggaggtactgaaagcccagtctgctggaacagtgcgctccgcagcacctccccaggagaaaaagcggaaggttgagaaggacactatgagtgaccaagctctagaagctctctcggcctcccttgggacacgtcaagccgagcccgagctggacctgcgaagtattaaggaggtggatgaagccaaggccaaagaagagaaactcgagaaatgcggcgaagatgacgaaacaattccctcagaataccgcctgaagcccgctacagacaaggatggaaagcccttgttgccagagcctgaggagaaaccaaagccacggagcgagtccgagctgatcgatgaactgagtgaggacttcgaccgatcagagtgtaaggaaaaaccaagtaaacccactgaaaaaactgaagagagtaaggcagctgctcctgcgccagtttctgaagctgtgtgtagaacctccatgtgttcaattcagtccgcccctcccgaaccagcgacactgaaaggaacagtgcccgacgacgcggtagaagccctggccgacagcctgggtaagaaagaggccgatcctgaagacggcaaaccagtgatggataaagtgaaagaaaaagcaaaggaggaggatcgggagaagctcggcgagaaagaagagacaattccccctgattaccgactcgaggaagtgaaggataaggacggtaagcctctgttgccgaaagaatccaaggagcaattgcccccaatgtccgaggatttcctgttagatgccctctccgaagattttagtgggcctcagaatgctagtagcttaaaattcgaagacgctaagctggccgctgccatttctgaggtagtcagccagacgccagccagtacgacccaggccggtgctcctccacgggatacaagtcagtcagataaagacttggacgacgccctcgacaaactgagcgacagtctggggcaaaggcagccggatccagatgagaacaaacctatggaagataaggtgaaggagaaggctaaggccgaacatagggacaaactgggtgaaagagatgacaccattccccctgagtaccgccatctcttggacgataatggccaagataagcctgtcaagccgcctaccaagaagtccgaagactctaagaagcccgcagatgatcaggacccaatcgacgccctgagtggtgatctcgatagttgcccctccactaccgaaaccagtcagaacaccgctaaggacaagtgtaaaaaggctgcttccagcagcaaggctcccaagaacggtggaaaggctaaagactctgcgaagaccactgaggaaacgtccaagccaaaggacgactag

SEQ ID NO: 216805 - DNA, 2319 bp, synthetic construct
  misc_feature 1..2319: note = Description of Artificial Sequence: Synthetic coding sequence
  source 1..2319: mol_type = other DNA
atgtcccagccaggccaaaagccagcagccagcccacgaccacgacgtgcggctgcagccaggcggacccatgagcacgtgagcgagaagacaagcgaatcgcccagcaagcctggagagaaaaagggctccgacgagaaaaaggcggcaagcctcggtagctcgcaatcatcgcgcacttatgccggaggcacagcatctgctaccaaggtgtcagctagcagcggagcaacaagcaaatcaagctcgatgaatccaaccgagaccaaggctatccccgtcagccaacagatggaaggccctcatctgcccaataagaaaaagcataagaagcaggcggtgaaaaccgagcctgaaaagaaatcacaatccactaagccaaaatctctgcccaagcaggccagcgataccgggagcaacgatgctcataataagaaggccgtctcccgctcggccgagcaacaacctagcgaaaaatctacggaacccaaaactaagccccaagacatgatcagcgccggtggcgagtccgtagctggcatcacggcaatctcaggaaaacccggtgataaaaagaaagaaaaaaaaagtctgactccagctgtaccagtggaaagtaaaccagataaaccttcagggaaatccggcatggatgctgccctggatgacctcatcgacacactgggtggccctgaagaaacagaggaggaaaatacaacctatacagggccagaagttagtgatcccatgagtagcacgtatatcgaagagctgggaaagagagaagtgaccatccccccaaagtacagagaactccttgccaagaaggaaggcatcacgggaccgcctgccgattctagcaaaccaattgggcctgacgacgctattgatgcactatcaagcgacttcacatgtggttctcctactgcagccggaaagaagactgaaaaagaggagtctacagaggttttgaaagcacagagcgcgggaactgtaagaagcgcagcccctccccaagaaaaaaagcgtaaggttgagaaagatacaatgtcagatcaggcgctggaggcactgagcgccagcttaggcacccggcaagccgaacctgagctagacttgcgttccatcaaagaagtggacgaagccaaggctaaggaagaaaagcttgaaaagtgcggcgaggatgacgagacgattccatccgagtatcggttgaagcccgctactgataaagacggaaaaccactgttaccagaaccagaggagaaaccgaagcccaggagcgaatccgaactgatagatgagctgtcggaagattttgaccgtagcgagtgcaaagaaaagcctagtaagcccaccgaaaaaacggaagagtccaaggcagccgctcctgctccagtgtctgaggcagtctgtcggacgtcaatgtgctctatacaatctgctcctccagagcccgctacgttgaaaggaaccgtgccggacgacgcagttgaagccctggcagatagtctcggaaaaaaggaagccgaccccgaggatgggaagcctgtaatggacaaggtgaaagaaaaggccaaagaggaagaccgtgagaagctgggagagaaggaagagactatcccccctgactatagactggaggaggttaaagacaaagacggaaaacccctgcttccaaaggagtccaaagagcagcttcccccaatgtcagaagacttcctgctggatgcgctgagcgaggattttagtggaccacagaacgcgtcctctctgaagttcgaagatgctaagttggctgcagctatcagcgaggtggtgtcacagacccccgctagcacaactcaggctggcgcaccgccacgtgatacaagccagtctgacaaagatctagatgatgcgctggacaaacttagcgattcactgggccagcggcagcctgatcccgatgaaaataagccgatggaagacaaagtgaaggagaaggcaaaggccgagcaccgggataagctaggggagcgcgacgacaccatcccacccgaataccgccatctgctggacgacaacggacaagataaaccagtgaagcctcccacaaagaagtcggaggactccaagaagccagccgacgaccaggacccgattgatgccttgagcggcgatttggattcttgccccagtaccaccgaaacttcccagaacacggccaaagataagtgtaagaaggctgcatcttcgagtaaggccccaaaaaatgggggtaaagctaaagacagtgcaaaaaccacagaggaaaccagtaagccaaaggatgattag

SEQ ID NO: 216806 - DNA, 2376 bp, synthetic construct
  misc_feature 1..2376: note = Description of Artificial Sequence: Synthetic coding sequence
  source 1..2376: mol_type = other DNA
atgtcgcagcctggccagaaaccagctgcctctccgcgtcctagaagagccgctgcagctaggagaacccacgaacacgttagcgagaagacctcagaaagcccaagcaaacctggcgagaaaaagggctcagacgaaaagaaggccgcatcacttggaagtagccagtccagtcggacttacgccggagggacagccagcgcaaccaaggtttcggctagttcaggggcaaccagcaagtcttcgtctatgaaccctactgagacaaaggcaattccggtttcccaacagatggaagggccacacctccccaataagaaaaagcacaagaagcaggccgtgaaaacagagcccgagaagaagagccaatcaaccaagttgtctgtggttcacgaaaagaagtcacaggaagggaaacctaaagagcataccgaacctaagtcgttgcccaagcaagcgtctgacactgggagtaacgacgcccacaacaaaaaggccgtaagcaggagtgccgaacagcagccaagcgaaaagtctactgagcccaaaacaaagccccaagacatgattagcgccggtggggagagcgtagccggaatcacagccatctctgggaagccaggtgacaagaaaaaagagaagaaatcgttaacacccgcagtcccggtggagagtaagccagataagccttcaggaaagtccggcatggatgctgcgcttgatgatcttatcgacacattgggcggtcccgaagaaaccgaggaggagaacaccacctatacagggccagaggtgagcgatccaatgtccagcacgtatattgaggagctgggaaagcgggaggtgactatccccccaaaatacagagagctgctggccaaaaaagaaggaattactggccctccagccgactcatcaaagcccataggacccgacgatgctatcgacgccctgtctagtgacttcacctgtggctccccaactgctgcgggaaagaagactgagaaagaggagtcaacagaagtcctgaaggcgcagtctgccggaaccgtgcgttctgctgctccaccccaagagaagaagcggaaggtcgaaaaagataccatgagcgatcaagctcttgaggctctgagtgcttctctggggacgcggcaggcagagccagagctcgacctaaggtctatcaaagaggtagatgaggctaaggccaaggaagaaaaactggaaaagtgcggcgaggacgatgagacaatcccaagcgaatacagactgaagccggctacagacaaagatggcaagcccttactgccggagcctgaggagaagccaaagcctcgcagcgagtccgaattaatagatgagttgagtgaggacttcgacaggtcagagtgcaaggagaagccatctaaaccaactgagaagaccgaggaaagtaaggccgcagccccagccccagtgtcggaggcagtttgtcgcacatcaatgtgttccattcaatctgcacctcccgaaccggcaaccctcaaaggcactgtgcctgacgatgccgtggaggcactggcggactccctcggcaaaaaagaggccgatccagaagacggaaagccggtgatggacaaggttaaggagaaggcaaaggaagaggaccgtgagaagcttggggaaaaggaggagaccattccacccgactatagactggaggaggtgaaggataaggatgggaagccattgctgcctaaagaaagcaaggagcagctgccaccgatgagtgaggatttcctgctggatgctctctccgaagacttctccggccctcagaacgcttccagcttgaaattcgaagatgcaaagctagcagcggcaattagcgaggtggtctcacagacacctgcttctacaacccaggccggagccccacccagggatacttctcagagcgacaaggatcttgatgatgcccttgataagctgtctgatagcctggggcagcgccaaccagaccctgatgaaaataagcctatggaggataaggtgaaagagaaagctaaggctgaacacagagataagctcggggaaagggatgacactataccacctgaataccgacatctgcttgatgacaacgggcaggacaaaccagtgaaaccccctactaagaagagtgaagactcaaaaaaaccagccgatgaccaggatcccattgacgccctgagcggagatctggattcatgtccgagtaccaccgaaacctctcaaaacactgcaaaggataaatgcaagaaagccgcttctagttcaaaggcacccaagaacgggggaaaggcaaaggattccgctaaaactactgaagaaacttcaaagccaaaggatgattag

SEQ ID NO: 216807 - DNA, 2265 bp, synthetic construct
  misc_feature 1..2265: note = Description of Artificial Sequence: Synthetic coding sequence
  source 1..2265: mol_type = other DNA
atggctttcgcgagctggtggtataagactcatgtgtctgagaagaccagtgagtctcccagcaaacccggtgaaaagaaaggtagcgatgaaaaaaaagccgcttccttgggctcaagccaatcttcccgcacttatgcaggtggcactgcctccgccactaaagtctctgcttcctccggcgcaaccagcaaatcctcatctatgaaccctaccgaaaccaaagccgtcaagaccgagcctgagaagaagtcccagtccacaaagctgtccgtggttcacgaaaagaaatcacaggagggaaagcctaaagagcacacagaaccaaaatccctccctaaacaggcctccgatacgggaagcaatgacgcccataataagaaagcagtatctcgatccgccgaacaacagccgtccgagaaatccacagagcccaaaactaaaccgcaggatatgattagtgcaggcggtgagagcgtcgcgggtattaccgctattagcgggaaaccaggagataagaagaaggagaaaaagtcgctgacacccgcagttcctgtcgaaagtaagcccgacaagcctagcggcaaaagcggcatggatgccgctctcgacgatcttatagacacgttagggggacccgaggagacggaggaggaaaatacaacttacaccgggccagaagtgtccgaccctatgtcatcgacctacatagaggaactcgggaaaagggaagttactatacccccaaagtaccgggaactgcttgcaaaaaaagaggggattaccggcccaccagctgatagctccaaacctatcggacccgatgacgctattgacgctttaagtagtgatttcacttgcggctcaccaaccgctgctggcaaaaaaacggagaaggaggaatcaacagaggttctgaaagctcagtccgccggtacagttaggtcggcagcacctccacaggaaaaaaaacgaaaagttgaaaaggacaccatgtcagatcaggcacttgaggccctttctgcatccctcgggacccgccaggcggagcccgaattggacttgaggagtataaaagaggtggatgaggctaaggccaaggaggaaaagcttgagaagtgcggcgaggatgatgagacaatcccgtcagagtatcgactaaaacctgctacagataaggacgggaagcctttgctgcccgaacccgaagaaaagccaaagcccagaagcgagagcgagttgatcgacgaactgagcgaggatttcgataggtccgagtgcaaagaaaagccttctaagccaactgagaaaaccgaagaatctaaggccgctgcccctgcccctgttagcgaggccgtgtgtagaacaagcatgtgttctatccaatcagcaccaccggagcccgctactctgaaaggcaccgtgcctgatgacgccgtcgaggcacttgccgacagtttgggaaagaaggaggccgatcctgaggacggcaaacccgtgatggacaaagttaaggagaaggcaaaggaagaggatcgggagaaactcggggagaaggaggagactataccacctgactaccgtttggaagaggtgaaagataaggatgggaagccgctcttgcccaaagaatcgaaggaacagcttcctcccatgtccgaagattttcttctcgacgccctgtccgaagatttttccggcccacagaatgcttcatcgctgaagttcgaggacgccaagttggccgcagcgatcagtgaagtggtgtcacagacaccagcgtccactactcaggcaggagctccacctcgggacacatctcagtctgacaaggacctagatgatgcgctagacaagctgagtgactcattggggcagcgccagcctgatcctgatgagaacaaacctatggaggacaaagtgaaagaaaaagcaaaagcagagcaccgcgacaagcttggagaaagggatgatacaattccacccgaataccggcaccttctggacgataacggacaagacaaacccgtgaagccgcctacaaagaaatcagaggacagcaagaagcccgctgatgatcaggatcccattgatgctcttagtggtgatctcgactcttgcccctccactaccgaaaccagtcagaatacagctaaggacaagtgtaagaaagctgccagtagtagtaaggctcccaagaatggcggaaaagctaaggatagcgctaagacaacagaggaaacgtctaaaccgaaggacgattag

SEQ ID NO: 216808 - DNA, 2376 bp, synthetic construct
  misc_feature 1..2376: note = Description of Artificial Sequence: Synthetic coding sequence
  source 1..2376: mol_type = other DNA
atgagccagcccggtcaaaagccggcagcttccccacgacccagacgcgcagctgcagccaggaggacacacgaacacgtctccgagaaaacatctgagtctcctagcaagccgggagaaaagaaagggagcgatgagaagaaggccgctagtctgggcagtagccagagttcacgaacatacgccggaggaaccgcctctgcaactaaagtgtcagccagttctggcgcaacgagtaaatctagctcgatgaaccccacggaaaccaaagccattccggtatcacagcaaatggaaggtcctcacctgccgaataagaaaaagcacaagaagcaggctgtcaagactgagcccgagaagaagagtcagtccaccaagctgagcgtggtccacgagaagaagtcacaggaaggaaaaccaaaggagcacaccgagcctaaaagtctgcctaagcaggcgtcggataccggatccaacgatgcccataacaagaaagccgtttccagatccgctgagcaacagccgtccgagaaatctaccgaacccaagactaagccgcaagatatgatttccgccggaggtgagagtgtcgctggcattaccgctatttctgggaaacccggagacaaaaaaaaggagaagaagagcctcactccagcagtacctgtggaaagcaagccggacaaacctagcggcaagtcaggaatggacgcagccctcgatgatctgatcgatacactagggggaccagaagagaccgaagaagagaacacaacctatacgggccctgaggtctcagatccaatgtcttcaacctatatagaggaattgggaaaaagggaagtcacaattccaccaaagtaccgggagctcctggctaagaaagagggtatcactggcccaccggctgatagcagcaagcctatcggacccgacgatgctattgacgccttaagcagtgattttacatgtgggtctccaactgccgcaggcaagaagaccgaaaaagaggagtcaaccgaggtgctgaaagcccagtccgccggtacagtccggagtgccgcaccccctcaggagaaaaagaggaaggttgaaaaggacactatgagcgaccaggccctcgaagctctgtccgcttccctcggaaccaggcaggccgagcccgagcttgatctgcggtctataaaagaagtggacgaggcaaaagcgaaagaggagaaattggagaagtgtggtgaagatgatgagaccatccctagtgagtaccggcttaaacctgcaacagacaaagacggaaaacccctgctcccggagcccgaggaaaagcctaagccacgcagcgagtcagagttgatagacgagctcagcgaggacttcgaccggtcagaatgtaaagaaaagccgtctaaacctactgaaaagacagaggagagcaaagccgctgcacctgccccagtgagtgaagctgtgtgtcgcacatcaatgtgtagcattcaaagtgcgcctccagaacccgctaccttaaaaggcacggtgcctgacgatgccgttgaggccctggctgacagtttgggaaaaaaagaagctgaccctgaagacggaaagcctgttatggacaaagtaaaggagaaggccaaagaggaggatcgggaaaagctgggagaaaaagaagagaccattcctccggattataggcttgaggaggtgaaagataaagatggaaagccactgttaccaaaggaatccaaagaacaattacccccaatgagcgaggatttcctccttgacgcgttgtctgaagacttcagtggacctcaaaacgcctcctctctgaaattcgaagatgccaagctggccgctgcaatttccgaagtggtatcccaaacccctgcctccaccacccaggccggagccccaccaagagatacatcacagtctgacaaagatctggacgatgctctggacaagctgtccgacagcctgggtcaaagacagccagatccagatgaaaataaaccaatggaggacaaagtaaaggagaaggccaaggccgaacatagagataaattaggagaacgcgacgataccattcccccagagtatcggcacctcctcgatgataatggacaagacaaacctgtgaaaccgccaaccaaaaaatcagaagattcgaagaagccagcagacgatcaggaccctattgatgctttatcaggggatctggacagttgtccctccaccactgaaacaagccaaaacacagctaaagataagtgcaaaaaggcggcaagcagctcaaaggcacctaaaaacgggggaaaggcaaaagatagcgcgaagaccacagaggagacaagtaaaccgaaagacgattag

SEQ ID NO: 216809 - DNA, 1929 bp, synthetic construct
  misc_feature 1..1929: note = Description of Artificial Sequence: Synthetic coding sequence
  source 1..1929: mol_type = other DNA
atgaacccaaccgagacaaaagctatccccgtgagccagcagatggaaggccctcatctccccaacaagaaaaaacacaagaagcaagctgtgaaaactgagccggaaaagaaatcacagagtaccaagctctctgtggtgcacgagaaaaaatcccaggagggcaagcccaaggagcatacagaacccaaatcactccccaaacaggccagcgacacaggcagcaatgatgcccacaacaaaaaggcggtctctaggagtgctgagcagcaaccatctgagaaatcgaccgagcccaaaacaaaacctcaggacatgattagcgccggaggggagagcgtggctggcatcactgcgatctcgggcaaaccgggtgataagaagaaagaaaagaagagcctgacgccagcggtgcccgtagagagcaagcccgataagccatctgggaaaagcggcatggacgccgcactggatgatctgatcgatactcttgggggacctgaggaaaccgaggaggaaaataccacttatactggccctgaagtgtccgatcccatgagctccacgtatattgaagagctgggcaagagggaagttaccattccgccaaagtatcgggaactactggcaaagaaggagggcatcactggtccgccagcagatagtagtaaacccatcggtccagatgacgccattgatgcactctcttccgatttcacttgtggtagtccaacagccgctgggaagaaaacggaaaaagaggaatccaccgaggtcctcaaggcccagtcggcaggaaccgtccgaagtgcagccccacctcaggaaaagaagagaaaggttgagaaggacactatgtctgatcaggctctcgaggctctctccgcctctctgggtactagacaagcagagccggaacttgacctccgatctattaaggaggtggacgaggccaaggctaaagaagaaaagctggagaaatgcggagaggacgacgaaaccatcccgtccgagtaccggttgaagccagctaccgacaaggatggcaagccactactgcccgaacccgaagaaaagcccaaaccacgatcagagtccgaactgattgatgagcttagcgaggatttcgataggtctgaatgtaaggagaagcccagcaaacccaccgagaaaaccgaggaaagcaaagcggcagcccctgcccctgtctcggaggccgtctgcaggacatccatgtgtagtatccagtccgctccccctgagcctgctacactgaagggcaccgtccccgacgacgccgtcgaggctttggccgattcattaggtaagaaggaggccgaccccgaagacggcaagccagtgatggataaggtaaaggagaaggcgaaggaggaggatagggagaaactgggagagaaagaagagacaatcccaccagactaccggctcgaagaagttaaggacaaggacggcaaaccactcctgcccaaggagagcaaagagcaattgccaccaatgtccgaggacttcctcctcgacgctctgagtgaggacttcagtgggccacaaaacgcaagctccctcaagttcgaagacgcgaaattggcagccgctatctcggaagtagtgtcccaaacacccgcatcaaccacccaggccggagcacccccaagagacacttcccagagtgataaggatctggacgacgccctggacaagctgagcgatagcttagggcaacggcagcctgatcctgacgagaataagcctatggaggataaggtgaaagagaaggcaaaagccgagcacagggataagctcggagaaagagatgacactatccccccagagtaccgacatcttctggacgataatggacaagataaacctgtaaagccacctaccaaaaagagtgaggacagcaaatag

SEQ ID NO: 216810 - DNA, 2085 bp, synthetic construct
  misc_feature 1..2085: note = Description of Artificial Sequence: Synthetic coding sequence
  source 1..2085: mol_type = other DNA
atggaaggtccacatcttcccaacaaaaagaaacacaaaaagcaagccgttaaaaccgagcctgagaagaagtcacagtctaccaaacttagcgtggtccacgaaaagaaatcacaggaaggtaaacctaaagagcacaccgagccaaaatcactgccaaagcaggcgagcgacacaggcagcaatgacgcccataacaagaaagcagtgtcgaggagcgctgagcaacagccttcagagaagtcaaccgagcccaaaaccaagccacaggatatgatttcagctggcggagagagcgtggctgggatcacagcgattagtggaaagcccggtgacaaaaagaaggaaaaaaaaagcctgactccggctgtaccagtggagagcaagcctgacaagccttccggaaaaagcggcatggacgcagcactggacgatcttattgacaccctgggcggaccggaggagacagaagaagaaaacacaacatacaccggaccagaggtctcggaccccatgtctagcacatatattgaggaactgggcaagcgggaggttacaattcctccaaaataccgagaactgctggccaaaaaagagggtataaccggtccccctgcggactctagcaagccgatcggcccagatgacgcgatcgacgctctatcttcggactttacatgtggttcacccacagcagccggtaaaaaaactgaaaaagaagaatctaccgaggtacttaaagctcaaagcgcagggaccgttagatcggccgcacctccccaagaaaaaaaacgcaaagtcgagaaagacacgatgagcgaccaggccctggaagcactgagtgcaagcttaggaactagacaggctgaacctgagctcgacctgagaagtatcaaggaagtcgacgaagcaaaggccaaagaagaaaaattggaaaaatgcggggaagacgacgaaactatcccaagtgagtatcgcctgaaaccggcaactgacaaggatggaaaacctttgctgcctgagccagaggagaagccaaagcctcgttctgagagcgaactcatcgatgaactcagcgaggatttcgacaggagcgagtgcaaagagaagccttccaagcctacagagaaaaccgaggagagcaaggccgctgccccagctcccgtgtcagaggcagtgtgtcgtacctccatgtgcagcatacagagcgcaccgcctgagccagccactctgaagggaacggtgcctgatgatgccgttgaagctttggccgatagcctcggcaagaaagaagccgacccagaggacggcaaaccagtgatggacaaagtcaaagagaaggccaaggaggaagacagggaaaagctgggtgaaaaagaagaaactattccaccggactaccgcctggaggaagttaaagacaaagacggtaagcccctgcttccgaaagagagcaaagagcagttgccaccaatgtcagaagactttctcttggacgcactgtctgaggatttcagcggaccacagaacgcttctagcctgaaatttgaggatgctaaattggccgcagccatttccgaagtggtgtctcagactcccgcaagcacaactcaagctggggcaccgccaagggatacttcccagtccgacaaagatctggacgacgccctagataagctgagtgactctttaggtcagagacagcccgacccagacgaaaacaaacctatggaagacaaggtgaaggagaaggctaaagccgagcacagagacaaattgggcgagagagacgacacaattcctccagaatatcgacatctactcgacgataatgggcaggataagcccgtaaagcctcctacaaagaagtcggaggactctaagaagcctgccgacgatcaggacccaattgacgccctctcaggtgacctggatagctgtccctctaccactgagacttcccagaatacagcgaaggataagtgtaaaaaggcagcttcatctagtaaagcacccaaaaacgggggtaaggcaaaggactccgctaaaactaccgaggagacttcgaagcccaaggacgattag

SEQ ID NO: 216811 - DNA, 2253 bp, synthetic construct
  misc_feature 1..2253: note = Description of Artificial Sequence: Synthetic coding sequence
  source 1..2253: mol_type = other DNA
atgtcccaaccagggcagaagccggctgctagtcccaggccacgacgggctgccgcagccaggcgcacccatgagcacgtttcagagaaaacttctgagtcccctagcaaacctggcgagaagaagggaagcgatgagaagaaagccgctagcttgggtagtagccaatcctcacgcacctacgctggcggtacagccagtgctaccaaggtttccgcctcttcaggggctacaagtaagagtagctccatgaatcctacagaaaccaaagcggtaaagaccgaacccgaaaaaaaatctcagagtaccaagcccaagagcctgcctaagcaggcatctgataccgggagcaatgacgctcataataagaaagctgtcagcagatccgctgagcagcagccttcagaaaaatcaacagaacccaaaactaaaccccaagatatgatttcagctggtggagaaagcgttgctggtatcaccgcgatatcagggaagccaggtgacaaaaaaaaagaaaaaaagagcttaactcccgctgtgcccgtcgagtcaaagccggacaagccttcagggaaaagcggcatggatgccgctctcgacgatctcatcgacacccttgggggtcccgaggagacagaggaggagaacacgacttatacggggccagaagtgagcgaccccatgagctccacatatatcgaggaactgggaaaaagagaggtcaccatccccccaaaatatagagaattgctggccaaaaaagagggcattactggaccgccagccgatagtagtaagcccattgggcctgatgatgccatcgacgctctgagcagcgacttcacttgcggttctcccacagcggcaggcaagaaaacggaaaaggaagagtctaccgaagtactcaaggcccaatcagctggtactgtaagaagtgctgcccctccccaagagaaaaaacgtaaggtggaaaaggacactatgagcgatcaggcactcgaggctctctccgcttccctggggacccggcaagctgagcctgagcttgaccttcggagcatcaaggaagtggacgaggccaaagctaaagaagagaagttagaaaaatgcggagaggatgacgagactattcccagcgagtataggcttaaacccgcaacagataaggatggcaagcctcttctgcctgagcctgaggaaaagccaaagcctcgcagtgagagcgaactgattgatgaactgtcagaagattttgacagaagcgaatgcaaggaaaagccgtcaaaacccacagagaagacagaggaatcaaaggctgctgcccctgctcccgtgtctgaggctgtgtgtcgaacatctatgtgttcaatccagagtgctccccctgagcctgcaaccctgaagggaacggttcccgacgacgcagttgaggccttagcagattctctgggtaagaaagaggcagacccggaggatggaaagcccgtgatggacaaggtcaaggagaaggccaaggaagaagaccgcgaaaaactgggagagaaggaagagacaatcccccctgattaccggctggaggaagtgaaagacaaagatggtaaacccctcttaccaaaggaatccaaagaacaactacctcccatgtcagaagacttcttactggacgccctgtctgaggatttcagcggtccacagaacgccagcagtctgaaatttgaagatgccaagttggcggcagctatttctgaagtcgtgtcccagacccctgcctctaccacacaagctggggcaccccctagagatacaagccagagcgataaagatctcgacgatgcgctcgacaagctcagcgattcactgggccagcgccagccagaccccgatgagaacaagcctatggaggacaaggtcaaggaaaaggccaaagctgaacaccgcgataagctgggagaacgcgatgatactatccccccagaatacagacacttgctggacgacaatgggcaggataaacctgtgaaacctccgaccaagaagagcgaagatagtaagaaacctgcggatgatcaggacccaatagatgcccttagtggcgatctcgattcgtgtcccagtaccacagaaacgagccaaaacactgcaaaggacaaatgcaagaaggccgcaagcagcagtaaagctcctaaaaatggcggtaaggcgaaagactcagccaaaacaaccgaagagacatcaaaacctaaagatgactag

SEQ ID NO: 216812 - DNA, 1254 bp, synthetic construct
  misc_feature 1..1254: note = Description of Artificial Sequence: Synthetic coding sequence
  source 1..1254: mol_type = other DNA
atgctgttaagcgtgcccttgttattagggctgctgggtttagctgtggcggaaccagcggtctatttcaaggagcagttcctggacggggacggctggacaagcaggtggatcgagtccaagcataaatccgacttcggaaaattcgtccttagtagtgggaagttctatggtgatgaagagaaagacaaggggctccaaacttctcaagacgccagattctacgcattgagcgcgagctttgaaccattttcaaataagggacagaccctggttgtgcagttcaccgttaagcacgagcaaaacattgattgcggaggaggttacgtgaagctgttccccaatagcctggatcagaccgacatgcatggagattcagaatataacatcatgtttggtcctgatatttgtgggccaggtacgaagaaggtccacgtgatcttcaattacaagggtaaaaatgtgctcatcaataaagatattaggtgtaaagacgacgaattcactcacctgtacacccttatcgtccgaccggataatacgtatgaagtcaagattgataattcacaagtcgagtcaggatctctcgaagacgactgggacttcttaccccctaaaaagatcaaagaccccgacgcttcaaagcccgaggattgggatgagcgggcaaagatcgacgacccaactgatagcaagccagaagactgggacaaaccagagcacattcctgatcccgacgctaagaaacccgaagactgggacgaggagatggacggcgaatgggaacccccagtgatccaaaatcctgaatacaagggagaatggaagccaagacagatcgacaaccctgactataagggtacctggatacacccagaaattgataatccagagtacagccccgacccctcgatctatgcttacgataattttggagtgctgggccttgatctctggcaggttaagtccgggaccatttttgataactttctgatcaccaatgacgaagcctacgctgaagagtttggtaatgaaacctggggcgtgaccaaggcagctgagaaacaaatgaaggacaaacaagatgaagaacagaggcttaaggaggaggaagaggacaagaaaagaaaggaggaagaggaggctgaagacaaggaggatgatgaggacaaggacgaggatgaggaggacgaagaggataaagaagaagacgaggaggaagacgtacctggccaagcaaaggatgaactgtag

SEQ ID NO: 216813 - DNA, 891 bp, synthetic construct
  misc_feature 1..891: note = Description of Artificial Sequence: Synthetic coding sequence
  source 1..891: mol_type = other DNA
atgcacggcgattccgagtacaatattatgttcggccctgatatttgcggacctgggacaaaaaaagtccacgttatctttaactacaaaggtaaaaacgtactgatcaacaaagacatccggtgtaaagacgacgagttcacacacctgtatactctaattgtacgtcccgacaatacctacgaggtaaaaatcgacaactcgcaggtggaaagcggctcactggaggacgactgggactttctaccaccaaagaagattaaagacccagacgcaagcaagcctgaagactgggatgagcgggcaaaaatcgacgacccaactgatagtaaaccagaggactgggataagcccgaacacattccggaccctgacgctaagaaacccgaagattgggatgaagaaatggatggggagtgggaacctcccgtgatccagaacccagaatacaagggcgagtggaagccaaggcagattgacaaccccgattataaggggacttggatacatcccgaaattgacaatccagagtatagtcctgacccttctatttatgcatacgataatttcggggtgctgggtctggatctctggcaggttaaaagtgggactatatttgacaactttctgattaccaatgatgaggcttacgccgaagaattcggaaatgagacttggggtgtgaccaaggctgcagaaaaacagatgaaagacaagcaggacgaagaacagcgcttgaaggaagaggaagaagacaaaaagcgcaaagaagaagaggaagctgaagataaagaggatgatgaagacaaagacgaggatgaggaagatgaggaggataaagaagaagatgaggaagaggatgtgcctggacaagcaaaggacgagctgtag

SEQ ID NO: 216814 - DNA, 1155 bp, synthetic construct
  misc_feature 1..1155: note = Description of Artificial Sequence: Synthetic coding sequence
  source 1..1155: mol_type = other DNA
atggctcgggctcttgttcagttgtgggccatctgcatgctcagagtagccctagccacagtgtactttcaggaagaatttctagacggagagcattggagaaaccgatggttgcagagtactaacgactctagattcgggcacttccgcttaagcagcgggaagttctatggtcacaaggagaaggataagggcctccagaccacgcagaacgggcgattttacgccatttccgctcgtttcaagcccttcagcaataagggcaaaactctagttatccagtacaccgtgaaacacgagcaaaagatggactgcggtggcggatacattaaggtgtttccggcagatattgaccagaagaatctgaatggaaagtctcagtactatattatgttcggaccagatatatgtggctttgatattaagaaagttcacgtaatacttcattttaagaataaataccacgagaacaagaagctgatccggtgtaaggtggatgggttcacccacctatacacgttgattttaagacccgatttgtcctatgacgtgaagatcgacggccagtcaatagagtcaggatctatcgaatatgattggaatctgacaagcttgaaaaaggagaccagcccagcagagtcgaaggactgggagcagactaaagataataaagcacaggattgggagaagcactttctggacgctagtacatccaagcagagcgactggaacggggaccttgacggcgattggcccgcaccgatgctgcagaagccgccttatcaggacggtctaaaacctgaaggcatacacaaggacgtttggctgcatcgtaaaatgaaaaatacagattacttaactcagtacgacctctccgagtttgaaaacatcggcgctattgggctcgagctctggcaggttcggtctggcaccatcttcgacaatttcttgatcacagatgatgaggagtacgcagataatttcggtaaagctacatggggagaaacaaaaggcccagagagggaaatggatgccatccaggcgaaggaggagatgaagaaggcaagagaggaggaggaggaagaattgctaagtggcaaaattaaccgccacgagcactactttaaccagtttcatcgcaggaacgaattatag

SEQ ID NO: 216815 - DNA, 1191 bp, synthetic construct
  misc_feature 1..1191: note = Description of Artificial Sequence: Synthetic coding sequence
  source 1..1191: mol_type = other DNA
atgtcggctaccgaccggatgggaccacgcgcagttccgggtctgcggctggccctgcttctattattagtgcttggaactccaaagtctggtgtgcaggggcaggagggcctcgattttcctgagtacgatggtgttgaccgcgttattaatgttaacgctaagaattacaaaaatgtatttaaaaagtatgaagtccttgccctgttatatcatgagcctcccgaggatgacaaggcatcccagcgccagttcgaaatggaggaactcatactggagctggctgcccaggtcctggaggacaagggtgtcggcttcggcctggtggatagtgagaaggacgcagcagtggccaagaagctcgggctcactgaagtggattctatgtatgtatttaaaggagatgaagtgatagaatacgacggggagttctccgctgacacaatcgtcgagtttttgctcgatgttctggaggatcccgttgaactgattgaaggagaaagagagctgcaggccttcgagaatatagaggacgagatcaagctgattggttactttaagtccaaagacagtgagcattacaaagcattcgaggacgccgcagaggagttccatccctatataccattctttgcgacattcgacagtaaagtcgctaaaaagcttaccctgaaattgaacgaaattgatttctatgaggcttttatggaggagcccgtgactattcctgataaaccgaattccgaggaagagatcgtgaacttcgtggaggagcatcgcagatccaccctgaggaaactgaagccagagtcgatgtatgaaacctgggaagacgatatggacgggatacacatcgtggcgttcgccgaggaagccgacccagatggtttcgaatttctggagacgctcaaggccgtggcccaggataacaccgaaaatcctgacctctctataatatggatcgaccccgatgattttcctttacttgtgccctactgggaaaagacgtttgacatcgatctcagcgctccacagattggggtggtaaatgttaccgatgccgacagcgtctggatggagatggacgacgaggaggacctgccctctgcagaggagctagaggattggctagaggatgtgcttgaaggagagatcaatacagaagatgatgacgatgatgacgacgattag

SEQ ID NO: 216816 - DNA, 1173 bp, synthetic construct
  misc_feature 1..1173: note = Description of Artificial Sequence: Synthetic coding sequence
  source 1..1173: mol_type = other DNA
atggggccaagggcagtacccggattgcggctggcactgctgctgttgttggtactgggcaccccaaagtctggcgtgcaaggacaagagggcctcgattttcctgaatatgatggggtcgaccgggtcattaatgtgaacgccaagaactataaaaacgtgtttaaaaaatacgaagtgctggccctactgtatcatgagccccctgaagacgacaaggcctcccagaggcagttcgagatggaggagctaatcctggagctcgccgctcaggtcctggaagataagggcgtcggttttggactggttgattctgagaaggacgcggcagtggctaaaaagctcgggctaacggaggttgatagcatgtacgtgtttaagggcgatgaggtcatagaatatgacggcgagttttccgccgacacaatcgtcgagtttcttctggacgtgttggaagatcctgtagagctgatcgagggggagagagagctccaggcatttgagaacatcgaggacgagattaagctgatcgggtactttaagtccaaggactctgagcactataaggccttcgaagatgccgctgaggaattccatccttacattcccttctttgccactttcgactccaaggtagccaaaaagttgacgttgaagttgaacgagatagacttttatgaggcatttatggaagaacctgtcaccatcccggacaaacccaatagtgaggaggagattgtaaattttgtggaggagcatagacggagtactctccgcaagctcaagcccgagtctatgtatgaaacctgggaagacgacatggacggtattcacatcgtcgcctttgccgaagaggccgatccagatgggtttgagtttctggagactctgaaggctgtggcgcaagataacaccgagaatcctgacctcagtataatctggatagatcctgacgacttcccattgctggtcccttactgggaaaaaacatttgacatcgatctgagcgcccctcaaatcggagtcgtcaacgtcactgatgcggacagcgtttggatggaaatggacgacgaggaggaccttccctctgcagaagaactggaggactggctagaagacgtgctggaaggagaaatcaataccgaggacgacgacgacgacgacgacgactag

SEQ ID NO: 216817 - DNA, 936 bp, synthetic construct
  misc_feature 1..936: note = Description of Artificial Sequence: Synthetic coding sequence
  source 1..936: mol_type = other DNA
atgtccatgcaacgtactactagaatgtgtagtaggagcatgcgctgctggcattcctccaccatgaacccgcctaggatgactcgcccacacaaggataactcactcggcctgaccgaagtcgactccatgtatgtcttcaagggagatgaagtgattgagtatgatggcgagttttcggccgataccattgtagagtttcttctcgacgtgcttgaagatcccgtggagctcattgagggcgagagggagcttcaggcgtttgagaacatcgaggacgagataaagcttatagggtactttaagtccaaagacagcgagcattacaaggcttttgaggacgctgccgaagagtttcatccgtatattccattcttcgccactttcgactccaaagtcgccaaaaagctcaccctgaagttaaacgaaatcgatttctatgaagcctttatggaagagcctgtgacgataccggataagcccaacagtgaagaagaaatcgtgaatttcgtcgaagagcacaggaggtctaccctaaggaaattaaaaccagagtctatgtatgagacctgggaggatgatatggacggcatacatatagttgcttttgccgaggaagctgacccagacgggttcgagttcttagagactcttaaagccgtggcccaggataacactgaaaatcctgatctgtcaatcatttggatcgaccctgacgactttcctttactggtgccatattgggaaaagacctttgacatcgacctctctgcacctcagatcggagtcgtcaacgtaaccgatgctgactctgtctggatggaaatggatgacgaggaagatctgcccagtgccgaggagctcgaggactggctggaagatgtcctggaaggtgagatcaatacagaggacgatgatgacgacgacgatgattag

SEQ ID NO: 216818 - DNA, 1200 bp, synthetic construct
  misc_feature 1..1200: note = Description of Artificial Sequence: Synthetic coding sequence
  source 1..1200: mol_type = other DNA
atgaagaggacccacctcttcatcgtggggatctattttctatcatcttgccgcgctgaagaaggacttaactttcctacgtatgatggcaaggacagagtggtctcgctctctgagaagaatttcaaacaggtactgaagaagtacgatctgctgtgtctctactaccatgaaccagtaagcagcgataaggtgacacagaagcagttccagttaaaggagatcgttttggagcttgtggctcaggttcttgaacataaagctatcggctttgtgatggtcgacgccaaaaaggaagccaaactcgccaagaagctcggtttcgacgaggagggttcactctatattctgaagggcgacaggactatcgagttcgacggcgaattcgccgctgatgtgctggtcgaatttctccttgacttaatcgaggatccagtcgagatcatctcctctaaactggaggttcaggcctttgagcggattgaagactacattaagctcataggcttcttcaaatctgaagacagcgaatactataaggcgttcgaggaggctgctgaacacttccagccttacatcaaattttttgctactttcgacaagggcgttgccaagaagttgtcactcaagatgaacgaagttgatttttacgaaccatttatggatgagcccatcgcaatccctaacaagccatacactgaagaagaactggtcgaattcgtgaaagaacaccaacgacctacactccggaggcttagacccgaagagatgtttgaaacatgggaagatgatctgaatggaatccacatagtggccttcgccgaaaagagcgaccctgacggctatgaatttctcgagatccttaagcaagttgcacgagacaataccgacaatccggacctttctatactgtggattgatcccgacgacttcccactgctagttgcttactgggaaaagacttttaaaatagacctgttcaggcctcaaatcggtgtcgtgaacgtcacagatgctgacagtgtgtggatggagatacccgatgacgacgatctgcctactgcagaggagttagaagactggatagaggacgtcttgtcaggcaagataaacactgaagacgacgacgaagatgatgatgatgacgataacagcgacgaggaagataacgacgacagcgacgatgacgatgatgagtag

SEQ ID NO: 216819 - DNA, 1062 bp, synthetic construct
  misc_feature 1..1062: note = Description of Artificial Sequence: Synthetic coding sequence
  source 1..1062: mol_type = other DNA
atgaagcggacccacttgttcatagtcggaatttacttcctgagttcatgtagggctgaagaagggctgaactttcctacatacgatggcaaggacagggtggtttcactttctgagaaaaattttaaacaagtactcaaaaagtatgacctcctgtgtctgtattatcacgagccggtgtccagtgataaagtgacacagaagcagtttcagctgaaagagatcgtcctggaacttgtggcgcaggtcctggaacataaggccattggattcgtaatggtagacgcaaaaaaggaagccaagctggcgaaaaaactcggttttgacgaggagggctctctttacatcctaaagggcgatagaacaattgagttcgacggagagtttgcggcagatgtgcttgtggaatttctcctggacctcatcgaagaccccgtcgaaattatatcgagtaagctggaagtgcaggcatttgagagaatagaagattatattaagcttattgggtttttcaagtccgaggattccgaatattataaggcatttgaagaggctgccgagcatttccagccttacatcaaattctttgcaacatttgacaaaggggttgcgaagaaactgagcctgaagatgaacgaggttgacttttacgagccctttatggatgaaccgatcgccatcccaaataagccctacacagatgggtatgagtttctcgagatactgaagcaggtagctagagataacactgataaccccgatcttagcatcttgtggatcgacccagacgacttcccattactggtcgcatactgggagaagacatttaaaatcgatctgtttaggccccagataggagtcgtgaacgtgactgacgccgatagcgtgtggatggagattcccgatgatgacgatctgcctaccgcagaggagttggaggactggatcgaagatgttctgtccgggaaaataaatacagaggacgatgacgaggacgacgatgacgacgacaactcagatgaagaggacaacgatgacagtgacgacgacgatgatgagtag

SEQ ID NO: 216820 - DNA, 987 bp, synthetic construct
  misc_feature 1..987: note = Description of Artificial Sequence: Synthetic coding sequence
  source 1..987: mol_type = other DNA
atgaagaggacccatcttttcattgtcggaatctatttcctcagttcttgtcgagccgaggagggattgaattttcccacttatgacggaaaagatagagtcgttagtctgagcgagaagaatttcaagcaggtccttaagaagtacgacctgctttgcctttattatcacgaacctgtctctagcgacaaagttactcagaaacagttccaactaaaggagattgtgctggaactcgtggcccaggtgttagaacacaaagcaatcggctttgtcatggtggacgccaaaaaagaggccaaactcgccaaaaaattggattacaaagcctttgaagaggccgctgagcattttcagccttatattaagttcttcgccaccttcgacaagggtgttgcaaagaagttgtccttgaagatgaacgaagtagatttttacgaacccttcatggacgaacctattgccattcccaacaagccttacacagaggaggaactcgtcgaattcgttaaggagcatcagagaccaacactgagacgtctgcggccagaagagatgtttgagacctgggaggatgatcttaatggtatccacattgtggcattcgctgaaaagtccgaccccgacggctacgaatttcttgaaatactgaagcaggtggctagggataataccgacaatcccgatttgagtatactgtggattgatccggacgattttcctttactagtcgcctactgggaaaaaacgtttaagatagatctttttagaccacaaatcggcgtcgtaaatgtgacagatgcggatagtgtatggatggagattccggacgacgacgatctgccaacagctgaggagttggaagactggatagaagacgtgttgtccgggaaaattaatacagaggatgacgacgaggatgatgacgacgatgataactccgatgaagaggataacgatgatagtgatgatgatgatgacgagtag

SEQ ID NO: 216821 - DNA, 948 bp, synthetic construct
  misc_feature 1..948: note = Description of Artificial Sequence: Synthetic coding sequence
  source 1..948: mol_type = other DNA
atggacctgaggcaattcctaatgtgtttgtcactctgcacagcttttgccctgtccaagcctacagagaagaaggaccgggtgcatcatgagcctcagttaagcgataaagtgcataatgacgcgcagagcttcgattacgatcacgatgcattcttgggggcagaagaggctaaaacattcgatcagttgaccccggaagagagcaaagagagacttggtaagattgtgtctaaaatcgacggagacaaggatggattcgtgaccgtggacgaactcaaggactggatcaagtttgctcagaagagatggatctacgaagatgtcgaacgccagtggaagggacacgacttaaatgaggatggcttggtgagctgggaagagtacaaaaacgccacttacggatacgttctggatgatccggatccagatgacgggtttaactataagcagatgatggtccgcgatgagagacggttcaagatggctgataaggacggcgacttgattgcaactaaagaagaattcactgcatttctgcatcccgaagaatacgattacatgaaggatatcgtggtacaggaaacaatggaggatatcgataaaaacgctgatggattcatagacctggaggagtacatcggggacatgtacagccacgacgggaacactgatgaacctgaatgggtgaagaccgagcgggagcagttcgtagagtttagagataagaatcgagacggtaagatggacaaagaggaaaccaaggattggattctacccagcgactatgatcacgccgaggctgaggctcgccacctggtgtatgagagcgatcaaaacaaagatggcaaactgacaaaagaagagatagtcgacaagtacgatttgttcgttggcagccaagccactgacttcggtgaggctctagtacggcatgatgagttttag

SEQ ID NO: 216822 - DNA, 465 bp, synthetic construct
  misc_feature 1..465: note = Description of Artificial Sequence: Synthetic coding sequence
  source 1..465: mol_type = other DNA
atggacctcaggcaatttttgatgtgtctgagcctttgtaccgcattcgctctttccaaaccaaccgaaaaaaaggatcgcgtgcaccatgagccacagctgtctgacaaggtgcataacgacgcccaatccttcgactacgatcatgatgcttttctaggtgccgaggaagcgaaaaccttcgatcagctgacaccagaggagtcaaaggagaggctcgggaaaatcgtgtcaaagattgacggggacaaagacggcttcgttacagtagatgagctcaaagactggatcctgccatctgattacgaccacgccgaagccgaagccaggcatttagtctacgagtctgatcagaataaggacggaaaacttacaaaggaggaaatcgtggacaaatatgacctgttcgtagggagccaagcaaccgattttggcgaagctttggtcaggcacgacgaattctag

SEQ ID NO: 216823 - DNA, 948 bp, synthetic construct
  misc_feature 1..948: note = Description of Artificial Sequence: Synthetic coding sequence
  source 1..948: mol_type = other DNA
atggacctgaggcagttccttatgtgtctgtctctatgtaccgccttcgctctcagcaaaccgaccgagaaaaaggatagagtgcatcacgagcctcagcttagtgacaaggtgcataatgatgcacaaagcttcgactacgaccacgatgcttttctaggcgctgaagaagcaaaaacttttgaccagttaactccggaggagagcaaagaacgcctgggaatgattgttgataaaattgatgccgataaggacgggttcgtgaccgaaggagagctgaaaagctggatcaagcacgcacaaaaaaaatacatctatgacaatgtcgagaaccagtggcaggagtttgacatgaatcaagatggcctgatctcttgggacgagtatcgtaatgtgacctatgggacatacctagacgacccggacccggacgatggcttcaactacaaacagatgatggtacgcgacgagcggaggttcaaaatggcagataaagacggggacctgatcgccactaaggaggaatttacagctttcctgcaccctgaggaatacgactacatgaaagacatcgttgtccaggagactatggaagatattgacaaaaatgctgatggctttatcgacctggaggaatacattggggacatgtatagccacgatggtaataccgacgaacctgagtgggttaagacggagcgggaacagtttgtagaattcagagacaagaacagggatggaaagatggataaggaggagaccaaggactggatattaccaagcgattacgaccacgcagaagccgaagcgcgacaccttgtttacgagtcagatcagaacaaagacggcaagcttacgaaagaagagattgtggataaatacgatctttttgtcggttctcaggccaccgacttcggtgaggctcttgtccggcatgacgagttctag

SEQ ID NO: 216824 - DNA, 972 bp, synthetic construct
  misc_feature 1..972: note = Description of Artificial Sequence: Synthetic coding sequence
  source 1..972: mol_type = other DNA
atgaaggaaactgatctgattataatggatttgcggcaatttttgatgtgcttgtcactgtgtaccgcctttgctctgagcaaaccaacagagaagaaggatagggttcaccatgagcctcagctctccgataaggtccataacgacgcccagagcttcgattatgaccacgatgcctttctgggtgcagaggaggctaagaccttcgatcagttgacacctgaggagtcaaaggagcggttaggaaaaattgtttccaagatcgacggcgacaaggatggattcgtaactgtggatgagctgaaggactggattaagtttgcgcagaaacgctggatctatgaagatgtcgaacgacagtggaaggggcacgatctgaatgaggatggactggtgagttgggaggagtacaaaaacgctacatacggatatgtcttagacgacccagatccagatgacggtttcaactacaaacagatgatggttcgggacgagcgtcgtttcaagatggccgacaaggatggtgaccttatcgcaacgaaagaagaatttaccgcgtttcttcaccctgaagaatatgactacatgaaggacatcgtggtgcaggagacaatggaggatatagacaaaaatgccgatggttttatcgatctggaagagtatataggggatatgtacagtcacgacgggaatactgatgagcctgagtgggtgaaaacagagcgcgagcagtttgttgagttcagagataagaatagggatggtaagatggacaaggaagagacaaaggattggattttgcccagcgattatgaccacgcagaggccgaggccaggcacttggtgtatgagagtgaccagaacaaagatgggaagctcactaaggaggagatcgtagacaaatatgacctttttgtgggctctcaggcgactgactttggcgaggctctcgtacggcatgacgaattttag

SEQ ID NO: 216825 - DNA, 444 bp, synthetic construct
  misc_feature 1..444: note = Description of Artificial Sequence: Synthetic coding sequence
  source 1..444: mol_type = other DNA
tgaattgctacaaaggaggagttcaccgctttccttcaccccgaggagtacgattacatgaaggatatcgtcgtacaagaaacgatggaggacatagacaagaacgcagacggcttcatcgatctggaggagtatatcggcgacatgtactctcacgatggcaatacagatgagcccgagtgggtgaagacggagagggagcaattcgtcgagtttagagataagaacagagatggaaaaatggacaaagaggagaccaaggattggattctaccttcagattatgaccacgctgaggctgaggccaggcatttagtgtatgaatccgatcagaataaggacggcaaacttacaaaagaggaaattgtggataagtatgacctctttgttggaagccaggccaccgatttcggtgaggcactagtgcgccatgatgaattctag

SEQ ID NO: 216826 - DNA, 675 bp, synthetic construct
  misc_feature 1..675: note = Description of Artificial Sequence: Synthetic coding sequence
  source 1..675: mol_type = other DNA
atggatctcaggcagtttcttatgtgcctatcactgtgtaccgccttcgctctttccaaacccacagagaaaaaagatagggtacaccacgagccacagctgagtgacaaggtgcataatgatgcccagagcttcgactacgaccacgacgccttccttggcgcagaggaggctaagacgttcgaccagctcaccccagaggagagcaaggagcggctcggcaagatagtctcaaagatcgatggtgataaagatgggttcgtaaccgtagatgaactcaaagattggatcaagttcgcccagaagcggtggatttatgaggatgtggagcgccagtggaaaggacatgatctgaatgaagatggcctagtatcatgggaagagtataagaatgccacatacgggtatgtgcttgacgatccagatcccgacgatggctttaattataaacaaatgatggtacgagacgaacggcgattcaaaatggctgacaaggatggcgaccttatcgccacgaaggaagaatttacagcatttctgcaccccgaagagtacgactacatgaaagatatagtagttcaggagaccatggaagacatcgacaagaacgcagatgggttcatcgaccttgaagagtacataggatggcaggcataccagggcggtgaccgctag

SEQ ID NO: 216827 - DNA, 444 bp, synthetic construct
  misc_feature 1..444: note = Description of Artificial Sequence: Synthetic coding sequence
  source 1..444: mol_type = other DNA
atgaaagagaccgatctcattatcatggatctcagacaatttttgatgtgtctatctctgtgtaccgcgtttgccttgtccaagcccaccgaaaagaaagaccgcgtccaccacgagcctcagttgagcgacaaagtccataacgatgcacagtctttcgactatgaccacgacgcctttctgggagctgaggaggcaaagacctttgaccagttaaccccagaggagagtaaggagaggctggggaagattgtatcgaagatcgacggggataaggacggctttgttaccgtggatgagctgaaagattggattaagttcgcccaaaaacgatggatctatgaagatgtggagaggcagtggaaagggcacgacctgaatgaagacggattggtttcatgggaagagtataagaatgccacatatggatatgtgctcgagtag

SEQ ID NO: 216828 - DNA, 513 bp, synthetic construct
  misc_feature 1..513: note = Description of Artificial Sequence: Synthetic coding sequence
  source 1..513: mol_type = other DNA
atggatctcaggcagttcctcatgtgcctcagtctgtgtactgcttttgcccttagcaagccgactgagaaaaaggatcgagtccatcacgaaccccaattaagcgacaaagtccacaacgatgctcagagcttcgactatgatcacgacgccttcctcggcgcagaggaggcgaagacattcgaccagttgactcccgaggagtcaaaagaacgcttggggatgatcgtagacaaaattgatgcagataaagacggttttgtcaccgaaggggagctcaaaagctggatcaaacacgctcagaaaaagtatatatatgacaacgtggagaaccagtggcaggagtttgacatgaatcaggatggcctgataagctgggacgagtaccggaatgtcacctacggcacctatttggatgacccagatcctgacgatggctttaattataaacagatgatggtgcgggatgaaaggcgatttaaaatggctgatcgcgctcgtgcagtgtgctag

SEQ ID NO: 216829 - DNA, 606 bp, synthetic construct
  misc_feature 1..606: note = Description of Artificial Sequence: Synthetic coding sequence
  source 1..606: mol_type = other DNA
atggatctgcggcagttcctgatgtgcctctccttatgcaccgccttcgcgctatccaagcccaccgagaagaaagaccgtgtgcatcacgaacctcaattgtcagataaagtgcacaacgacgctcagtctttcgactatgatcacgacgccttcctcggggctgaagaggctaaaacattcgatcagctgacccccgaagagagcaaggagagattgggaatgattgtggacaagatcgatgccgataaggacggcttcgtgactgagggggaactgaagagctggatcaaacacgcacagaagaaatacatctatgacaatgtggagaaccaatggcaagaattcgacatgaaccaggacggactgataagttgggacgagtataggaacgtgacatatgggacctacctggacgatcccgaccccgacgacggctttaactacaaacaaatgatggtgagggacgaacgccgatttaaaatggcagacaaagatggtgatctcattgctactaaagaggagattgtggataaatacgacctatttgtcggcagccaggcaaccgattttggggaggccctggtgcgacacgacgaattctag

SEQ ID NO: 216830 - DNA, 798 bp, synthetic construct
  misc_feature 1..798: note = Description of Artificial Sequence: Synthetic coding sequence
  source 1..798: mol_type = other DNA
atggacctgagacagtttcttatgtgtctgtccctttgcaccgcatttgccctgtccaagccaacagagaagaaggatcgtgtgcaccatgagccacagctctcagataaagttcacaacgacgcccaatccttcgactatgaccacgacgcatttttgggggcagaggaggcgaagacttttgatcagttgacgccggaagaatctaaggagcgccttggaaagattgtttcaaaaatcgacggtgacaaggacggattcgtgacagtcgacgagctcaaggattggattaagtttgcacagaagcgctggatctatgaagatgttgaaaggcagtggaagggccatgacttaaacgaagacggcttggtgtcctgggaagagtacaaaaacgcgacctatgggtatgttttggatgatccggatcccgatgacgggttcaactataaacagatgatggttagggatgagcgtagatttaagatggctgacaaagacggcgatttgatagccactaaggaggagtttaccgctttcctgcaccctgaggaatatgattacatgaaagacattgtagtgcaggaaaccatggaagacattgacaaaaacgctgacgggtttattgatctcgaggagtacataggtgatatgtactcccacgacgggaacaccgatgagtccgatcagaacaaggacgggaaacttaccaaggaagagattgtagataagtatgatctgtttgtcgggagtcaggcaacagactttggagaagctctggttcggcacgacgagttttag

SEQ ID NO: 216831 - DNA, 495 bp, synthetic construct
  misc_feature 1..495: note = Description of Artificial Sequence: Synthetic coding sequence
  source 1..495: mol_type = other DNA
atgatggtgcgggatgagagaaggttcaagatggcagacaaagacggtgacctgatcgctactaaagaagagttcactgcatttctgcatcccgaggaatatgattacatgaaggacattgtggtgcaggagacgatggaagacattgataagaacgctgatggattcatagatttggaggagtatatcggagatatgtacagccacgacggaaatacggatgaacccgaatgggtaaagacggagcgagagcagtttgtcgagtttagagataaaaatagagacggcaaaatggacaaagaagagaccaaggactggatcctgccttcggattatgaccatgcagaggctgaagctaggcaccttgtatacgagagtgatcagaacaaagacgggaagctgaccaaagaagaaatcgtggacaaatacgatctcttcgtagggtcccaggcgaccgattttggggaagctctcgtccggcacgacgagttttag

SEQ ID NO: 216832 - DNA, 972 bp, synthetic construct
  misc_feature 1..972: note = Description of Artificial Sequence: Synthetic coding sequence
  source 1..972: mol_type = other DNA
atgaaagagacagatcttattatcatggacctgcgtcagtttctcatgtgcttgagcctctgcaccgccttcgccctcagcaagcccacagaaaaaaaagatagagtgcatcatgaaccccagctcagcgataaggttcacaatgacgcccagagctttgactatgaccatgacgcttttctgggggcagaggaagccaaaacttttgatcagctgaccccagaggaatccaaggagaggctgggcatgattgtggacaaaattgacgccgacaaggacggattcgtaaccgagggcgagctaaagtcatggatcaagcacgctcaaaagaaatacatatacgataacgtggagaatcaatggcaagagtttgatatgaatcaggacggattgatttcgtgggatgagtacagaaacgtcacctacggcacatacctcgatgaccccgatcccgacgacgggttcaactataaacagatgatggtccgcgatgaaaggcgcttcaaaatggccgataaagatggagatctgatcgctaccaaggaagaattcaccgccttcctgcatcccgaggagtacgactatatgaaggatatagtggtccaggagactatggaggacattgacaagaatgcggatgggttcatagatctggaggaatacattggggacatgtactcacatgacggaaacacggacgagcccgaatgggtcaagacggagcgggagcagttcgttgagtttagagataagaaccgagacggcaagatggataaggaggaaaccaaagattggattctgcctagcgattacgaccacgccgaggccgaggccaggcatctcgtttatgagagcgatcagaacaaggacggaaagttgacaaaggaggagatcgtcgacaagtatgatctctttgtgggctcccaagccaccgacttcggcgaagctctggtgcgacatgatgaattttag

SEQ ID NO: 216833 - DNA, 1116 bp, synthetic construct
  misc_feature 1..1116: note = Description of Artificial Sequence: Synthetic coding sequence
  source 1..1116: mol_type = other DNA
atggagcttgagctggacgccggtgatcaggacttgctggcatttctactggaggaatccggagatctgggcaccgcaccagatgaagcagtgcgcgcaccattggactgggctttacctctcagcgaggtcccaagcgactgggaagtggacgacctgctgtgcagcctactgtcacccccagcttcacttaatattctaagttcatcaaacccatgcttggtacatcatgaccatacctattctctaccaagagaaaccgtctcaatggatctggagtctgaatcttgtcgcaaagaggggacccagatgacaccacagcatatggaggagctcgctgagcaggagatagcgagacttgtcctgaccgacgaggagaagagtctcttagagaaggagggcctaatcctgcccgaaactctacccctaacgaagactgaagagcagatattgaagagggttcgtagaaagattaggaacaaacgctctgcgcaagagtcaagacggaagaaaaaagtctacgtcgggggacttgaatcgcgggtgcttaagtacactgcacagaacatggaactgcagaacaaggtgcagctgctggaagagcagaaccttagcttgcttgatcagctgagaaaactgcaggcaatggtgatcgaaatctctaacaagactagctcctcatctacttgcatccttgtactccttgttagcttttgtctcctgctcgtcccggcaatgtatagttcggacacaagaggcagtctacccgcagagcatggtgtcctctcgcgccaactgagagcgctcccatcagaggacccctatcagctcgagctgcccgcactccaatcagaagtgcccaaggactccacccatcagtggctggacggctctgactgcgtccttcaagctcctggtaacacctcttgtctgctgcactacatgcctcaagcccctagcgcagagcctcctctggaatggccctttccagacctgttttctgagcctctttgcagaggccctattctgcccttgcaggccaatctcaccagaaaaggcggttggttgccaaccgggagcccttcagtcatcctgcaagacagatattctgggtag

SEQ ID NO: 216834 - DNA, 1386 bp, synthetic construct
  misc_feature 1..1386: note = Description of Artificial Sequence: Synthetic coding sequence
  source 1..1386: mol_type = other DNA
atgaacacggatcttgcagccggaaagatggcgtcagctgcgtgctcaatggaccctatcgattctttcgagttgctggacctcctctttgatagacaggatggcattctgcggcatgtggaactgggggaaggttgggggcacgtgaaggatcagcaggtgcttccaaatccagacagtgatgacttcttgtcatccatcttggggtcgggggatagcctgccctcttcccccctgtggtctcccgaaggatctgactccggcatctctgaagatctgccctctgaccctcaggacacacctcccagatctggccctgccacttcacccgcagggtgccacccggcacagcccggaaaaggcccttgtttaagttatcacccgggtaactcttgcagcacaaccactcccggaccagtcatccaagtacctgaggcatcagtcactatagatctggagatgtggtctcctggcggacgcatttgtgcggagaaaccagccgacccggtcgatttgtcaccccgatgtaatctgacagttaaggatcttttgctgagcggctctagcggcgacttgcaacaacaccatctaggggcatcctatctgctgaggccaggggcaggacattgccaggaactggtgctgacagaagacgagaagaaactgctggcaaaggaaggcattacattgccaacccagctgcccctgaccaaatacgaagaacgggtccttaagaagatcaggaggaagatcaggaacaagcagagcgctcaggagtcccgcaagaaaaagaaggaatacatcgacgggctggaaacccgaatgtctgcttgtaccgcgcagaaccaggaattgcaacgcaaagtcctgcacttagaaaaacagaatttgtcactgttagagcaactgaagaaattgcaggctatcgtcgttcagagcacctccaagagtgctcaaaccggtacgtgtgtagccgtgctgctgttgtctttcgccctcattattttgccatctattagcccctttggaccgaataagactgagagcccaggcgattttgcccctgtgcgcgtgtttagcaggactctgcacaacgacgccgcttcccgagtggccgctgacgcagttcccggatcagaggcccctggtcccaggcccgaagcagataccacacgagaggagtccccaggcagcccaggcgcagactgggggttccaagatacagccaatttaaccaatagcacagaagaacttgataacgctactctcgtcctgaggaatgcaaccgagggtctcgggcaggtcgcacttctggactgggtggctccaggcccaagcaccggcagcggtagggcaggattggaggcggcaggtgacgaattgtag

SEQ ID NO: 216835 - DNA, 900 bp, synthetic construct
  misc_feature 1..900: note = Description of Artificial Sequence: Synthetic coding sequence
  source 1..900: mol_type = other DNA
atggcgagcgccgcatgttcaatggaccccatagacagcttcgagctgctggatctgctctttgatagacaggacggaattctccggcacgtggagctgggtgagggatggggccacgtgaaagatcaggtcctccccaatcctgatagcgatgattttctctcgtcgatcctggggtccggtgactcccttcccagctccccattatggtcccccgaagggtcagacagcgggatctccgaagacttacctagcgatccccaggatacaccacccaggtcagggcctgcaaccagcccagccggatgccatcctgcccagccaggcaaagggccatgcctttcttatcacccaggaaacagctgttcaaccacgacccccggacccgtaattcaacagcagcaccacctgggcgcaagctacctgcttagacccggtgcaggacactgtcaggaactcgtactgacagaggacgagaagaagttgctagccaaggaaggcataacgttaccaacccaattgcctttgacgaagtatgaggagagggtgcttaagaagattaggcgaaagattcgcaacaagcagtctgcccaggaatctcgcaagaagaaaaaggagtatatcgatggtttggagacacgaagttgctgttgtccactgcccagctctagctcaccaccctctgctctgctggcgccaacgaagcctagggcactggggaccttgaggctatacgaatgttcacctgaattgtgcaccactatgttgccacccgcatggctgctgatgctgtgtcaggctcccagaccccaggatccagatcctcgtctaacgcaaccagagaagtctttgcaagaagccccagggcaaacaggcgcaagcaggaccccgaggacatag

SEQ ID NO: 216836 - DNA, 1260 bp, synthetic construct
  misc_feature 1..1260: note = Description of Artificial Sequence: Synthetic coding sequence
  source 1..1260: mol_type = other DNA
atgaataccgacctggctgctggcaaaatggctagcgccgcatgctcgatggacccgatcgactctttcgaactgctcgacctgctgttcgatcgccaggacgggattttgcgccacgttgaactgggagagggctgggggcacgttaaggaccagcaggtcctccccaacccagactccgatgattttctgagctcaatcctgggatcaggggattctctgccttcatcccctctgtggtctcccgagggctcagattcaggaatctcagaggatctgccaagcgatcctcaggatacacccccacggtccgggccagccacctcacctgccggttgccatccggctcaacccggtaagggtccatgtctctcatatcacccaggtaatagttgctccaccactacgcctggccctgtgatccaggtgcccgaggcatccgtgaccatagacctggagatgtggtctcccggaggcaggatatgtgccgagaagccagcagacccggtggacctgagcccaagatgtaatcttacagtgaaggatttgctcctgagcgggtcctcaggcgacctgcagcagcatcatctcggcgcaagctatctgttaagaccaggcgcaggccattgccaagagctggtgttaacagaagatgaaaagaagctgttggctaaggagggcattacccttcccactcaactccctctgaccaagtacgaggaacgtgtgctgaaaaaaattcggcgtaagattaggaataagcaatccgcccaagaaagccgtaagaagaaaaaggcgatcgtggttcaaagcaccagcaagtccgcccaaactgggacgtgcgtggcggttcttttactttcctttgccctcattatccttccttctatcagcccattcggaccgaacaagacagagagtcctggagactttgcaccggtacgcgtgttcagtagaacacttcacaacgacgccgcttcccgggtggctgccgatgccgtgccaggctccgaggccccaggtccccgaccagaggcagataccactagagaagaatcacccggaagtccaggagcagattggggcttccaggacacagctaacctgactaattctaccgaagagttggacaacgccacactggtcttgaggaatgccacggaggggcttgggcaggtggccctgttggactgggttgctcccggtcctagtaccggctccggccgtgctggcctggaggccgcaggtgacgagctgtag

SEQ ID NO: 216837 - DNA, 1188 bp, synthetic construct
  misc_feature 1..1188: note = Description of Artificial Sequence: Synthetic coding sequence
  source 1..1188: mol_type = other DNA
atggatctggggatccctgacctactcgacgcttggttagaaccgccagaggacattttttcaacgggttccgtgctcgagttgggtctgcattgtcctccacccgaagttcctgtgacacgcctccaggagcaggggctccaaggctggaaatctgggggagatcgtggctgtggcctgcaggagtccgaaccagaggatttcctaaagctgtttatagaccctaatgaagtgtactgctcagaggcgtctcctggaagcgattccggcatatctgaggatccgtgtcaccccgacagcccacccgctccccgtgccacttcttcccctatgttgtacgaagttgtctatgaggcaggagctctcgagcgcatgcagggggaaaccgggcctaacgtgggcttgattagcatccagctcgatcagtggagtccagcatttatggtacctgactcctgcatggtaagcgaattgccattcgatgcgcacgcacatatcttgcctcgcgcaggaacagtggcccctgtgccttgtacaaccctcttgccatgtcagactctgttcctcaccgacgaggagaaacggctgttgggccaggagggggtgtctctgccctcacatctccccctaacaaaagcagaagagcgtgttttgaaaaaggtcagaagaaagatcagaaacaaacagtcagcacaggacagcagacgacggaagaaagagtatatagacgggctcgaaagcagagtggccgcttgctctgctcaaaatcaggagctgcaaaagaaagtccaggaactggagcggcacaatatcagcctggttgcgcagctgcgccagctccaaaccttgattgcccagacatccaacaaggccgctcagacctcgacctgtgtgctgatcctactatttagcctggctctgatcatcctgccatcgttttctccttttcaaagtaggcccgaggccggatccgaggactatcagccccacggggtgacatctcgcaatatcctgactcacaaggatgtgacagagaacctggagacccaggtggtcgaatcacgcctaagagaaccaccaggcgctaaggacgccaatggctctacaagaactcttctagaaaagatggggggtaaaccgaggcctagtggtcggatcaggagcgtgttgcacgccgacgaaatgtag

SEQ ID NO: 216838 - DNA, 1128 bp, synthetic construct
  misc_feature 1..1128: note = Description of Artificial Sequence: Synthetic coding sequence
  source 1..1128: mol_type = other DNA
atggatctcgggattccggatctcctggacgcatggctcgagccacccgaggacatcttttccactggaagcgtccttgagctcggactgcactgtccgcctcctgaagtccctggattgcaggaaagtgagcctgaagattttcttaaattgtttatagaccctaacgaggtttactgcagcgaggcaagccctggaagtgattcaggaatcagtgaggatccttgccaccccgactcacctcccgctcccagagccacctcatcaccgatgctatacgaagtcgtgtacgaagctggcgctcttgagagaatgcaaggggagaccggaccaaatgtcggcttgatatccatccagcttgatcagtggtccccagccttcatggtgcctgactcatgcatggtctcggaactcccttttgacgctcacgcccacatacttcccagagctggcacggtggcccctgtcccctgtacgactctcttaccttgccagaccctcttcctcactgacgaggagaaacggctcctgggacaggagggagtcagccttcccagccacctgccactcacaaaggcggaagaaagggttttgaagaaggtccggaggaagattcggaacaagcagagcgcacaagatagtcgcagacgcaaaaaggagtatatcgacgggctcgagtccagggtggcagcctgtagcgctcagaatcaagaactgcagaaaaaagtccaggaactggagaggcataatatttccctggtcgcccagctgcgccagctgcagacgctcatcgctcagaccagcaacaaagctgcacagacaagtacgtgcgtcctgatactgttgttcagtctcgcgctgattatcctgccttctttctccccatttcagagccgcccagaagctggctcagaagattaccagcctcacggcgtgacgagtcgtaatatcttgactcataaagatgtcactgagaacctggagacacaggtggtggaatctcgactgagggaaccacctggggcaaaagatgccaatgggtctacgaggacacttctggaaaaaatgggtgggaaacctaggcccagcggccgaatccggtcggtcctccatgccgatgaaatgtag

SEQ ID NO: 216839 - DNA, 654 bp, synthetic construct
  misc_feature 1..654: note = Description of Artificial Sequence: Synthetic coding sequence
  source 1..654: mol_type = other DNA
atggacctaggcataccagacctgcttgacgcctggctagaaccaccagaggatatcttcagtacgggcagtgtactggaactggggttacactgtccgcctcccgaggtcccagtgacgagacttcaagagcaaggactccaagggtggaagtctggaggcgatcgaggttgtggtttgcaggaaagtgagcccgaagactttctcaagctattcattgaccctaacgaggtgtattgctccgaagctagcccgggatctgattcagggatttccgaggatccctgccaccctgactctccacctgccccacgggctacttcatctccaatgctgtatgaagttgtgtacgaagccggtgccctggagcgaatgcagggcgaaacaggaccgaatgtgggccttatatcaatacaactagatcagtggtcacctgcttttatggtgccagattcatgcatggtttcagaattgccgtttgatgcccacgcccacatcttgcctcgagccggaacagttgctccggtgccttgcacaactcttctgccctgtcagaccctcttcctcacagatgaagagaaacgacttctcgggcaagagggcgtgagtctgcccagccacctgcccctgacaaaggtgacttgttttccttag

SEQ ID NO: 216840 - DNA, 1188 bp, synthetic construct
  misc_feature 1..1188: note = Description of Artificial Sequence: Synthetic coding sequence
  source 1..1188: mol_type = other DNA
atggatttgggcatcccggacctattagatgcctggttggagcctcctgaggatatcttcagcacaggcagcgtactcgagctgggattgcactgtccacctcctgaggtccctgtcactaggctccaggaacagggactgcagggatggaagtccggaggcgatcggggatgtggtctgcaggagtccgaacccgaagacttcctcaaactctttatcgatcccaatgaggtgtactgctccgaggcttcccccggttcagacagcggaattagtgaggatccctgccaccctgattcgccaccagctcctcgcgctacctcctctcccatgctgtacgaagtggtatatgaggctggtgcactcgagagaatgcagggggagacgggcccaaacgttggcctcatctcgattcagttggaccaatggtcgccggcttttatggtgcccgactcttgcatggttagcgagttgccatttgatgcgcacgcccacattttaccaagggcaggaaccgtagcccctgtcccttgtacgacactgctaccctgtcagaccttgtttctcacagatgaagagaaacgcctgctgggccaggagggtgtttcactcccgtctcacctgcccttaactaaggcagaagaacgtgtgctgaagaaagtgcggcgtaaaattcgcaacaagcagagcgcccaggactcccgacgccgtaaaaaagagtatatcgacgggttagaatctagagtcgccgcttgttcggcccagaaccaggaattgcagaagaaggtgcaggaactggagcgacataatatctccttggtagctcaacttcgccagctgcagacgttgattgcgcaaacttctaacaaggccgcacagacaagtacctgtgttctgatccttctgtttagcctcgctctcataatcctccccagcttcagcccgttccaatcccggccagaggccggttcagaggactaccagccacatggtgttacatctcgaaatatactaacacacaaagacgtcaccgaaaacctggaaacacaggtagttgaaagtcgtctccgtgaaccgccaggagccaaggacgccaatggctctaccagaaccctgctggagaagatgggcggaaagcctcggcctagtggacgaatcagaagcgtgctgcacgctgatgagatgtag

SEQ ID NO: 216841 - DNA, 1188 bp, synthetic construct
  misc_feature 1..1188: note = Description of Artificial Sequence: Synthetic coding sequence
  source 1..1188: mol_type = other DNA
atggatctgggtataccagacctgctagatgcctggctcgaacctccggaagacatcttcagcactggctctgtcttagagctcggcctgcattgtccccctcccgaagttcctgtgaccagactacaagagcagggcctccagggatggaagtccggtggagaccggggatgcggcctgcaagagtctgagcctgaagatttcttaaaactgttcatcgatccaaacgaggtctactgctccgaagcttcgccaggatccgattctggaatcagcgaagacccttgtcaccctgattcccccccagcccctcgcgctacttcatctcctatgctttatgaagttgtgtacgaagccggtgccctggagcgcatgcagggagagaccggacctaatgttggcctcatttccatacaactggatcagtggagtccggcattcatggttcccgattcctgcatggtcagtgagcttccctttgacgcccacgcacatatcctgccacgggcaggcaccgtggcacccgtgccgtgtacaactctactaccctgtcaaacactgttccttaccgatgaagagaagaggttgctgggtcaggaaggtgtgtcactgccatcccacttacccttgacaaaagcagaagaacgtgttcttaagaaagtgaggcggaagattagaaataaacagagtgcccaggacagtagacgcaggaaaaaggagtatattgacggcctggagagtcgggtggccgcttgttcggcacagaatcaggaattgcagaagaaagtgcaggaattagaaaggcacaacattagcctggtggcccagctacgccagctccagacacttatagcacagacttctaacaaggccgcacagacctctacgtgcgttctgattctgttgttctcactggcacttattatactcccttctttttccccattccagtccaggcctgaggctggcagcgaagactatcagcctcatggcgttaccagtaggaacatcctcactcataaggacgttacagaaaatcttgaaacccaggttgtcgagagtagactaagggagccgccaggagcgaaagacgccaacggaagcaccagaacactattggagaagatggggggtaagccccgtccatcaggtagaattaggtccgttttgcatgccgacgagatgtag

SEQ ID NO: 216842 - DNA, 747 bp, synthetic construct
  misc_feature 1..747: note = Description of Artificial Sequence: Synthetic coding sequence
  source 1..747: mol_type = other DNA
atggtgcctgatagctgcatggtcagcgaactccccttcgacgcccatgcacatattctgcctcgtgcaggcactgtggctcctgtcccctgtaccactctcttgccttgtcagaccctattccttaccgatgaggagaagcgactactgggccaggagggagtttctctccctagtcatctgccactgactaaggctgaggagagagtcctcaaaaaggtgcggagaaaaatccgcaacaaacagagtgctcaggactctcgcaggagaaagaaggagtatattgatggcctggagtcaagggtggctgcctgctctgctcaaaatcaggaactgcaaaagaaagtgcaggagctggaacgccacaacatttcattggttgcccagctccgacaactgcagacactaatcgcccagaccagcaataaggctgcacagactagcacatgtgtgctgattctgcttttttccctagcgctaattattctaccaagctttagccccttccagtcccgtcctgaggctggcagcgaggattaccagccccacggcgtgacctcccgtaacattctgacccataaggacgtgactgaaaatttggaaacccaggtggttgaaagtcgcctccgggaacctcccggtgcgaaagacgctaacgggagtaccaggactcttctggaaaagatgggcggtaagccgagacccagcggtagaatcagatctgtgctccacgccgatgaaatgtag

SEQ ID NO: 216843 - DNA, 549 bp, synthetic construct
  misc_feature 1..549: note = Description of Artificial Sequence: Synthetic coding sequence
  source 1..549: mol_type = other DNA
atggatttgggcatccctgacttattggacgcctggttggagccacctgaggacatatttagcacgggctcagtgcttgagctgggcttacattgtccaccacctgaggtaccagtcactcggctgcaggagcagggcctacaaggatggaagtcaggtggggatcggggttgtgggttgcaggaatcagaaccagaggactttttaaaactgtttatagatcccaatgaagtctattgtagtgaagccagtccaggatccgatagcgggatatccgaggatccatgtcatccagactcacccccagcccctcgggcaaccagctctcctatgctttatgaggtggtttatgaggccggagccttagaacgaatgcagggggagacaggtccaaatgtggggctcatatctatccagctggatcagtggagtcccgcattcatggtgcctgattcttgcatggtgagcgaactgccattcgacgcacatgcacatatcctgcccagagctggcacagtagctccagtgccctgcaccacgctggtatag

SEQ ID NO: 216844 - DNA, 687 bp, synthetic construct
  misc_feature 1..687: note = Description of Artificial Sequence: Synthetic coding sequence
  source 1..687: mol_type = other DNA
atggatctgggcattccagacctcttggacgcatggctggagccaccagaggacatatttagcaccggtagcgtcctggagctcgggctgcactgtccgcctcctgaagtccctgggctccaggaatcagagcccgaggatttccttaaactatttattgatccaaatgaagtctactgctccgaggcatccccaggcagtgattccggcatttcggaagacccttgccacccagactcgcctcctgctccacgcgctacctcaagccctatgttatacgaagtcgtgtacgaggccggagctctggagcggatgcagggagagactggtccaaatgtggggctcatctctattcagctggatcagtggtcccctgcctttatggtgccagacagttgcatggtctccgaacttccctttgatgcacacgcgcacatccttccgagagcgggtaccgtcgctcctgtgccatgtaccaccctgctcccttgccagacgctgttccttactgatgaagagaagcgtctgctcggccaagagggggtgtccctcccctcccacctccccttgactaaagcagaggaaagggtgctgaaaaaagtgcgcaggaagatccggaataaacagtcagcccaagacagcagacgcaggaagaaagaatatatcgatggcctggaaagcagatag

SEQ ID NO: 216845 - DNA, 1047 bp, synthetic construct
  misc_feature 1..1047: note = Description of Artificial Sequence: Synthetic coding sequence
  source 1..1047: mol_type = other DNA
atgtccaagtgcgcacgcaagaaatacattaagaccaaccctagacagatgaccatggagacagtggagagccagcacgatgggtctataacagcgagcctgaccgagtcaaagtcagcccacgtgcaaacgcagaccgggcagaactccataccagccctggctcaagtgtccgttgcaggatccggcactcgcaggggcagccctgcagtcaccctggtgcaattgcccagcggacagaccatccacgttcagggtgttatccaaacacctcagccatgggtcatacagagctctgaaatccataccgtacaggtggcagccatcgctgaaacggacgagagcgcagaaagtgagggcgtgatcgactcacacaaacgcagggaaatcctgtcgcgcagaccatcttacagaaagatcctgaatgaactgagcagcgatgtgcccggagtgccaaaaattgaagaagagaggagtgaagaagaaggaacaccgccttccattgccaccatggcggttcccacatccatctaccagacgtcaactggccagtacattgctatcgctcaggggggaactattcagatctccaatcctgggagcgacggtgtccagggacttcaggccctgactatgaccaactctggcgctccacccccaggagccaccattgtccagtatgctgctcaatccgcggatggcacccagcaattcttcgtccccggatcccaggtcgtagtccaggcggctacaggagacatgccaacttatcaaatacgagcacccactgcggctctcccgcagggggtggtcatggccgcatcacccggatctttgcactcacctcagcagttggctgaggaggcaactcgcaagcgggagctgagactcatgaagaaccgggaagcggcaagggaatgtagaagaaagaaaaaggaatacgtcaagtgcctggagaatagggtggcagtactagagaatcaaaataagacactgatcgaagagttgaaggccctcaaggatttgtactgtcataaggtagagtag

SEQ ID NO: 216846 - DNA, 900 bp, synthetic construct
  misc_feature 1..900: note = Description of Artificial Sequence: Synthetic coding sequence
  source 1..900: mol_type = other DNA
atgagtaaatgcgcacgcaagaaatacatcaagaccaaccccaggcagatgactatggagacagtggagtctcaacacgacgggtcgattactgccagcctgacagaaagtaaatcagcacacgtgcagacacagacagggcaaaatagcatcccagctcttgcccaagtggctgctatcgctgagaccgacgagtcagccgaatcagagggagtcattgactctcacaagagacgtgaaatactctcacgacgcccatcttaccgtaaaatacttaatgaattatcaagtgacgtccccggtgttcccaagatcgaggaagaaaggagcgaagaagaggggacccctccgagtatcgccactatggcagtgcccacctccatctatcaaacttccacagggcaatatattgccatcgcgcagggcggaacaatccagatcagcaacccgggatctgatggcgtgcaaggtctgcaggcactcaccatgactaattcaggtgcccctcctccaggggctaccatcgttcagtacgcggctcagtccgccgatggaacccagcagttctttgttcctggcagccaggtggtcgtccaggccgcaacaggcgatatgcccacctatcagatcagagccccaaccgcggctctgccacagggcgtggtcatggcagcctcccctgggagcctgcattccccccaacagctggcggaggaagcaacccgcaaaagagagctgaggttgatgaaaaatagggaagcagctcgcgaatgcagacggaaaaagaaggagtacgtgaagtgtctggagaacagggtggccgtgttagagaaccagaacaagaccctaattgaggagttgaaggccctgaaggatctctactgtcataaggtggaatag

SEQ ID NO: 216847 - DNA, 738 bp, synthetic construct
  misc_feature 1..738: note = Description of Artificial Sequence: Synthetic coding sequence
  source 1..738: mol_type = other DNA
atggtggcagccatcgccgaaacagatgaatccgcagagtctgaaggagtcattgactctcacaagaggcgcgagattctctctcggagaccatcatatcgcaagattttgaacgagctgtcttccgatgtgccaggcgtgccgaaaatagaggaggaacgctcagaagaagaaggaacccctccatcaattgctactatggctgtccctaccagcatttatcagacttctaccggtcagtacatcgcgatcgcacagggcggaactattcagatctccaatcccggatctgatggggtgcagggactccaagccctgaccatgacaaacagtggcgcacccccaccaggagccacaattgttcagtacgctgcccagtccgccgatggcacgcagcagttcttcgtgcctggttctcaggtcgtagtgcaggctgcaacgggggacatgcccacatatcagatcagagcccctaccgctgcactgcctcagggcgtcgtgatggccgcatctccagggagcctgcactctccacagcagctggctgaagaagccacaagaaagagggaactgcgcttaatgaaaaatcgcgaggccgcaaaagaatgtcgcaggagaaaaaaggaatatgtgaagtgtctcgagagccgtgtggccgtgctggaggtacagaacaaaaaattgattgaagaactggaaacattaaaggatatctgcagcccaaaaacagattactag

SEQ ID NO: 216848 - DNA, 288 bp, synthetic construct
  misc_feature 1..288: note = Description of Artificial Sequence: Synthetic coding sequence
  source 1..288: mol_type = other DNA
atgcccacctaccagatccgcgctcccacagcagcactcccacagggtgtggttatggcagcctctcccggttctctccactctccacagcaactggctgaggaggctacccggaagcgcgaattacggctgatgaagaatagggaggccgcacgggagtgtaggaggaagaagaaagaatacgtaaagtgcctggagaatagagtcgcagtgctcgagaatcagaacaagacattgattgaagagcttaaagcacttaaggacctatattgtcacaaggtcgagtag

SEQ ID NO: 216849 - DNA, 903 bp, synthetic construct
  misc_feature 1..903: note = Description of Artificial Sequence: Synthetic coding sequence
  source 1..903: mol_type = other DNA
atgtccaagtgtgcgaggaagaaatacattaagaccaaccccagacagatgacgatggaaaccgtggagagtcaacacgatggatcaatcacagcctcgcttaccgagtccaagtcagcccatgtccagacacagacaggacagaactccatccccgcactggctcaggtggcagccatcgcagaaactgatgaaagcgctgaatcagagggggtgatagattcccataaaagacgagaaatcctgagccggcgacctagttacaggaagatcctgaacgaactgagtagcgatgtgccaggcgtacctaaaatcgaggaagaaagaagtgaggaggagggaaccccgccatctattgccaccatggcagtcccgacttccatctatcaaacatctacagggcagtatattgcaattgcccagggaggtaccatccagatctcaaaccctgggtcagatggcgtacagggattacaagccctgactatgacgaattctggggctcctcctcctggagcaaccatcgtacagtacgccgcacagagtgccgacgggactcaacaattttttgttccaggctctcaggtcgtcgttcaggcggctactggtgatatgccgacctatcagatcagagcgccaactgccgcactcccgcagggcgtagtgatggccgctagccccggtagtctgcacagcccacagcagttggccgaggaggctacccgcaagagagaattgagactgatgaagaatagagaggccgctaaagagtgccggaggcggaagaaagagtatgttaaatgtctcgagtcacgggtggctgtgttggaagtgcagaataaaaagctcattgaagagctggagacactgaaggatatatgctcgccaaagaccgactactag

SEQ ID NO: 216850 - DNA, 666 bp, synthetic construct
  misc_feature 1..666: note = Description of Artificial Sequence: Synthetic coding sequence
  source 1..666: mol_type = other DNA
atgactatggaaactgttgagtcgcagcatgacggttcgattaccgccagtctcacagaaagcaaatccgcccacgttcagacgcagacgggccaaaacagcattccggctctggcccaggtggccgcaatcgccgaaactgatgagtcggcagagagcgaaggtgtgatcgatagccataaacggagagagattctctccaggcgacctagttaccggaaaatccttaacgagctgtcctcggacgtgcccggagtgcccaagatcgaggaggagcggtctgaggaggaaggaacccccccatccattgccaccatggccgtacctaccagcatataccagacatctacaggccaatatactgcaaccggagacatgccgacttatcagatcagagctcctacggctgcccttcctcagggagtcgttatggccgctagccctggtagcttgcacagcccgcagcagctggcggaggaagctacccggaagcgtgagttgagactcatgaagaatagagaggctgccaaagagtgtcgtagacggaaaaaagaatacgtgaagtgcctcgaaagcagagtggccgttctcgaggtgcagaacaagaagctcatagaggagctggaaactctgaaagatatttgtagtccaaaaactgattactag

SEQ ID NO: 216851 - DNA, 747 bp, synthetic construct
  misc_feature 1..747: note = Description of Artificial Sequence: Synthetic coding sequence
  source 1..747: mol_type = other DNA
atgagtaagtgtgcccgtaaaaagtatattaagactaacccccgacagatgactatggagacagttgagagccagcacgatggtagtattaccgcatcactcaccgagtccaagtcagcacatgttcagacgcaaaccgggcagaatagtatccccgctctagcgcaggtggccgctattgccgaaactgacgagtctgccgagtctgaaggggtgatcgactcccataagcgcagagagatactttcacgcagacccagttacagaaagatcctcaatgagttgtcttccgatgttccaggtgtgcctaaaatcgaggaggagaggagcgaggaggagggaactccgccatctattgcgaccatggcagtgcctacctctatttaccagacttctaccgggcaatacaacgaagaaaccgaactggcccctagccatatggccgctgctacaggagacatgccgacttaccagatccgcgcacccacagctgctctcccccagggagtcgtaatggctgcgtctcctggatccctgcattccccgcagcagttggctgaggaggccacaagaaagagagagttacgtctgatgaagaatagggaggccgcaagagagtgtcgtagaaagaagaaggagtacgtgaagtgtctggaaaatagggtggctgtgctggagaatcaaaataagacacttatcgaagagctcaaagcacttaaagacctttactgccacaaagtcgagtag

SEQ ID NO: 216852 - DNA, 327 bp, synthetic construct
  misc_feature 1..327: note = Description of Artificial Sequence: Synthetic coding sequence
  source 1..327: mol_type = other DNA
atggctgtgactggggatgatacagccgctacaggggatatgccgacttatcaaattcgtgcaccaactgctgctttgccacagggggtggtgatggccgcaagcccagggagcctgcatagcccccagcaactcgcggaagaggccacccgtaagcgagagctccggctgatgaagaaccgcgaggctgctcgggagtgcaggcggaagaagaaggagtacgtcaagtgccttgagaatagagttgcagtgctcgagaatcagaataagacattgatagaggagttgaaagctttgaaagacctatattgtcacaaggtcgagtag

SEQ ID NO: 216853 - DNA, 813 bp, synthetic construct
  misc_feature 1..813: note = Description of Artificial Sequence: Synthetic coding sequence
  source 1..813: mol_type = other DNA
atgtggtggcatcagcacaatctgtgctttcggaggccaatcgaagaagactatagttccggcgacgtggaagaaaaagtcgcggcaatagccgaaactgatgagtcggccgagagtgaaggggtcatcgatagccacaagcgtcgcgagatcctgtccaggaggccttcttataggaagattcttaacgagctcagctccgatgtgcccggagtgcctaaaatagaagaagagcgcagcgaggaggaaggaaccccccctagcatcgctaccatggctgtccctacctccatttatcagaccagcacaggccagtatatcgctatcgcccagggaggcaccatccaaatatcaaacccaggatcagacggtgtgcagggcctccaagctctgacaatgaccaatagcggtgccccaccgccaggtgccactattgtgcagtacgccgcacagtcagccgacggcacccagcagttttttgtgcccggtagccaggtggtagtgcaggctgctacaggggatatgccaacctatcaaattagggctccgaccgcagccttgcctcagggggtagtgatggccgcatcaccaggcagtctacatagtccccagcaacttgcggaggaagccacccgaaaaagggaactcaggctgatgaagaaccgcgaagcggctaaagaatgccgtcgcagaaaaaaagagtacgtgaagtgtttggagagccgagttgcggtgctggaggtgcagaataagaaactgattgaagaactcgaaactctgaaagacatttgttctccaaaaactgattattag

SEQ ID NO: 216854 - DNA, 999 bp, synthetic construct
  misc_feature 1..999: note = Description of Artificial Sequence: Synthetic coding sequence
  source 1..999: mol_type = other DNA
atgactatggagaccgtggagtctcagcacgacggcagtatcaccgcgtctttgaccgaaagcaagagcgcgcacgtgcaaacacagacggggcagaattcaattccagcactagcgcaagtcagcgtcgcaggctcaggcacccgcaggggctcacctgctgttacgctcgtgcagctgccgtcaggtcaaaccatacacgtccagggtgtaattcagacccctcagccttgggtcatccagtccagcgagatccacaccgtgcaggtcgcagctatcgcggagacggatgagagcgcagaaagtgaaggcgtgatagactcacataagagacgtgaaatcttgtccagaagaccaagttaccggaaaattctaaatgagttgtcatctgatgttcccggagtccctaaaatcgaggaggagcgttcagaggaggaaggcacccccccaagcatcgctacaatggcggtgcctacatcaatatatcagacaagcaccggacagtatatcgcaatagctcagggaggcactatacagatcagtaaccctggtagtgatggtgtacaaggacttcaagccctcaccatgaccaactccggtgcaccaccacccggagcgactatcgtacagtacgcagcccaatctgctgatgggacacagcagttttttgtcccagggtcgcaggtggttgttcaggctgctacaggcgacatgcccacgtatcagatccgggctcccaccgccgctttaccacaaggtgtggttatggctgcatcacctggttccctgcacagtccccaacagctggccgaggaagctacgagaaagcgcgaactccggctcatgaagaaccgcgaggctgccagagaatgtcgcaggaagaaaaaagagtacgtgaagtgcctcgagaatagggttgccgtgctggaaaatcaaaataagacactgattgaggagctcaaggcccttaaagacttatattgccacaaagtggagtag

SEQ ID NO: 216855 - DNA, 1002 bp, synthetic construct
  misc_feature 1..1002: note = Description of Artificial Sequence: Synthetic coding sequence
  source 1..1002: mol_type = other DNA
atgaccatggagaccgtagaaagccaacacgacggatctatcactgccagtctcaccgaaagtaaatcagcgcatgtgcagacacaaacaggacagaattccatccccgctctagcacaggtgagtgtggccggaagtggcactcgtcgaggttcaccggcagtgaccctggtccaactgccatccggccagacaatacacgtgcaaggagtcatacagaccccccagccttgggtgatccagagttctgagatacacacagtccaggtggcagcaatcgcggagaccgatgaaagtgctgagtcagaaggggtgatcgactcgcataagcgtagagagatcctgagtagacggccttcctaccgtaagattctgaacgaacttagctctgatgtacccggtgtgccaaagattgaggaggagcgctctgaagaggaagggactccacccagcatcgccactatggccgtgcccactagcatttaccaaacaagcaccggtcagtatattgcaattgcgcagggaggcacgattcaaatctctaacccgggttcagatggagtacaaggactgcaggccctcaccatgaccaactcaggcgctccaccccctggcgctactattgtgcaatatgccgcacagtcggctgacggcactcagcaattttttgtgccagggagccaggtggtcgtgcaagctgcaacaggcgacatgccaacatatcaaatcagggccccaaccgccgctctgccacaaggggtggtaatggcagccagcccgggatctctacatagcccgcaacagcttgcagaagaagccaccaggaaacgggaactccggctgatgaaaaaccgcgaagctgctaaagaatgtcgaaggcggaaaaaagagtacgtaaagtgcctggagtcccgcgtggcggtcctggaagttcagaataagaagctgatcgaagagctggaaacactcaaggacatttgctcccccaaaacagactattag

SEQ ID NO: 216856 - DNA, 414 bp, synthetic construct
  misc_feature 1..414: note = Description of Artificial Sequence: Synthetic coding sequence
  source 1..414: mol_type = other DNA
atgactatggaaactgtcgagtcccagcacgatggtagtatcaccgccagcctgacagaaagcaagtctgcgcatgtgcagacccagaccggccagaattcaattcccgcattggcgcaggtagccgctattgctgagacagatgagtcagccgaatcagaaggggtgatcgattcccacaaaaggcgagagatactgtctcgccgaccatcctacaggaagatactaaatgaattatcaagtgatgtccccggtgtacccaagatcgaggaggaacgatcggaggaggagggcaccccccctagcatagcaacgatggccgtgcccacctccatctaccagacttctacaggacagtactccatgtacgctgcgattcggtacgataccgtgttggccctgtccctgctttag

SEQ ID NO: 216857 - DNA, 666 bp, synthetic construct
  misc_feature 1..666: note = Description of Artificial Sequence: Synthetic coding sequence
  source 1..666: mol_type = other DNA
atgactatggagaccgtggagtctcagcatgacggaagcattacagcctctcttactgagtccaaatccgcgcatgttcagacgcagaccgggcagaactccatcccagccctggcacaggtagccgctattgcagagactgacgaatcggcagagtccgagggagtgatcgactcccacaagcgccgtgagatcctatccagaaggcctagttacagaaaaatcctcaatgaattgtcaagcgacgtcccgggtgtacccaaaattgaagaggagagatctgaagaggaaggcacacccccatccatagccacgatggcagtacctacctctatctaccaaacttcaacgggccagtacaccgcaacaggagatatgcccacctatcagattcgggcacctactgcagctctcccgcagggggtggttatggccgcttcacccggaagcctacattccccccagcagctcgcggaggaggccacccgcaaacgggaactgaggctgatgaaaaacagggaggccgctaaggaatgtcggcgaaggaaaaaggaatacgtcaaatgtttggagagccgggtggcggtattagaagtccagaacaaaaaactcatcgaggagctggagactctcaaggacatctgtagccctaagactgactattag

SEQ ID NO: 216858 - DNA, 711 bp, synthetic construct
  misc_feature 1..711: note = Description of Artificial Sequence: Synthetic coding sequence
  source 1..711: mol_type = other DNA
atgtccaagtgtgccagaaagaaatacatcaaaaccaatccgcgacagatgactatggagaccgtggagtcgcaacatgatgggtctatcaccgccagtctaacagaatctaagtcagcccacgtccaaacgcagaccggacagaatagcatacccgctcttgctcaagtagccgcaatcgctgaaaccgatgagtctgccgagtcagaaggagtaattgattcccacaagcggagggaaatactgtctagacgtccctcttaccgaaaaattcttaacgagttatcatcagacgttcctggcgttcctaaaatcgaagaagagaggtcagaggaggagggcaccccaccgagcattgcaaccatggctgtcccaactagtatctatcagacctctacaggccagtacaccgccaccggcgacatgcctacataccaaattcgtgcccctaccgccgcactgcctcaaggtgtggtcatggcagcttcaccaggctctctccactctccccagcagctggccgaggaagccacaagaaagcgtgagctgagactgatgaaaaatagagaagctgctcgagaatgcaggagaaaaaagaaggagtacgtgaaatgccttgaaaatcgggtggcagttctagaaaatcagaataagaccctgatcgaggaacttaaagcattaaaagacctctattgtcataaagtagagtag

SEQ ID NO: 216859 - DNA, 849 bp, synthetic construct
  misc_feature 1..849: note = Description of Artificial Sequence: Synthetic coding sequence
  source 1..849: mol_type = other DNA
atgtggtggcaccaacacaatctctgctttcgccgaccaattgaggaggattacagttccggagacgtggaggaaaaggtggccgctatcgccgaaactgatgaaagtgcagagtctgagggggttattgatagtcataagagacgggaaatcctgtcccgtagaccatcataccgcaagatcctgaacgagctctcctcggacgtgccaggagtgccaaagatcgaggaagaaaggagcgaggaggagggaacacccccttcgatcgctactatggcggtgccaacgagtatctaccagacgtccaccgggcagtacatagcaattgcacaggggggaaccatccaaatctctaaccctggtagcgacggggtccagggcctgcaggccctaaccatgacaaactctggggctccacccccaggcgctaccattgttcagtatgccgctcagtctgccgacgggacacagcagttctttgtcccaggctcccaggtggtagtacaggacgaagaaacggagctggctccaagccatatggctgctgctacaggggatatgcctacttaccagatccgagcacctacagccgctcttccacagggggtagtgatggcggctagtccgggatccttgcactctccgcagcaacttgctgaggaggcgaccagaaagagggagctgagactgatgaaaaaccgcgaggccgctaaggagtgcagaagacggaagaaggagtatgtaaaatgtctcgaaagcagggtggccgttctcgaagtccagaacaagaaactgattgaggaattagagactcttaaggacatttgctccccgaagacagactactag

SEQ ID NO: 216860 - DNA, 1086 bp, synthetic construct
  misc_feature 1..1086: note = Description of Artificial Sequence: Synthetic coding sequence
  source 1..1086: mol_type = other DNA
atgtccaagtgtgccaggaagaagtatatcaagactaaccctagacagatgactatggagacggtggagtcgcaacacgatgggtccattaccgcttcacttacagagtctaagagcgcccacgttcagacacagaccggccaaaactccattccagccttagctcaagtgtcagtagcaggatctggaacaagaagaggaagcccagcagtgactcttgtgcagctgccgagcggacagaccattcacgtgcagggcgtaatccaaacgccacagccttgggtcatccagtcgtcagagatccatactgtgcaagtggccgctattgcggaaaccgatgagtctgctgagagcgaaggcgtgattgactcacacaaaaggcgagagattcttagtcgtaggcctagttaccgaaaaattctgaacgagctgtctagcgacgtgcctggtgtaccaaagatagaggaggaacgctccgaggaggaaggaactccaccttcgattgccacgatggcagttccaacaagtatttatcagaccagcacggggcagtacatagcaatcgcccagggcggtacgatccagattagcaaccccggttctgatggcgtacaggggctacaggctctaacaatgaccaactccggagcccctccgccaggcgctacaatagttcaatatgccgctcagagtgcggacggaactcagcagttcttcgtcccgggttcccaggtggtggtgcaggatgaagaaactgaattagccccatctcacatggctgccgctaccggcgatatgcctacctatcaaatccgggctcccactgcagccctgcctcagggtgtggtcatggcagcatcgcctggctccctgcactctcctcagcagctagcagaagaagccactcgcaaaagggagctgagactcatgaagaatcgtgaagcagcaaaagagtgccggcgacggaagaaggaatatgttaagtgtttggagagtcgcgtcgcagtgctagaggtacagaataagaagctcattgaagagctcgagacccttaaggatatttgcagccccaaaacagactactag

SEQ ID NO: 216861 - DNA, 474 bp, synthetic construct
  misc_feature 1..474: note = Description of Artificial Sequence: Synthetic coding sequence
  source 1..474: mol_type = other DNA
atgagcaagtgtgccaggaaaaagtatataaaaacaaaccctcggcagatgacgatggagaccgttgagtcccagcatgacggtagcataacagcctcactgactgaaagtaagtcggctcacgttcagactcagaccggacagaactcaattccagcgctcgcacaggtcgccgcaatcgctgagactgatgagtcggcggaatctgaaggcgtgatcgactctcataagaggcgggaaatcttatcgcgcaggccctcctaccgaaagatcctcaacgagctgtctagtgacgtcccgggagtgcccaagatcgaggaggaaaggtccgaggaggaaggaacccctccttccattgctacaatggctgtgccaactagtatttatcagactagcacgggccagtacattgccatagctcaggggggaaccattcagatctctaatcctggctctgacggtgtccaagggtag

SEQ ID NO: 216862 - DNA, 1038 bp, synthetic construct
  misc_feature 1..1038: note = Description of Artificial Sequence: Synthetic coding sequence
  source 1..1038: mol_type = other DNA
atgaccatggagacggtcgaatcgcagcacgacgggagcattaccgccagcctgactgaatctaaaagcgcccacgtccagactcagaccggccagaactctatcccagctctggcccaggtatcagtggctggtagcggaacaaggcgagggagccctgccgtgacactggtgcagctgccctccgggcagactattcatgtccaaggggtgatccagaccccacaaccctgggtcattcagtctagtgaaatccacacagttcaagtggctgcgatcgccgagactgatgagtccgcggaatctgaaggtgtgattgactctcacaaacgcagagagatactgagccgccgtccctcctatcgcaagatcctgaatgaacttagcagcgacgtcccgggagtgcccaagatcgaggaggagcggagcgaagaggagggtaccccacctagtattgccacgatggcagtgccaacttcaatttaccagacctccacaggtcaatatatagctatagcccaagggggtactatccagatttccaatcctgggtccgacggcgtccaaggcctgcaggccctaactatgaccaattcaggggcaccacctcccggagccacgattgtccaatacgcagcccagagcgcagatggaacccagcagtttttcgtgcccggatcccaggtcgttgtgcaggacgaagaaactgaactcgccccttcccatatggccgcagcaactggcgacatgccaacttaccagattcgcgctccgaccgctgcactaccacaaggggttgtgatggcggcaagtccaggcagcctgcatagccctcaacagctagccgaggaggcaacaagaaaaagagaactacggctgatgaagaaccgcgaagctgcaaaagaatgtcgtagacggaaaaaggagtacgtcaagtgcctcgaaagtcgtgtagcagtcttagaggtccaaaataagaagctgatcgaggagttggagaccttgaaggatatttgttcaccgaagactgattattag

SEQ ID NO: 216863 - DNA, 858 bp, synthetic construct
  misc_feature 1..858: note = Description of Artificial Sequence: Synthetic coding sequence
  source 1..858: mol_type = other DNA
atgtctaaatgcgcccgtaagaagtacataaaaacgaatccaaggcagatgacaatggaaactgtggaaagccagcatgacggttcaattaccgccagtctcactgagtctaaaagcgcccacgtgcagacccaaaccggacagaatagtatcccagctctggcccaagtgagcgttgccggatctggcacaaggaggggcagcccagccgtgacactggtgcagttaccaagcggacaaactatccacgtgcaaggcgtgattcaaacaccccagccgtgggtgatacagtcgtcagagattcataccgtgcaagttgctgccatcgctgaaactgatgagagtgccgagtcggagggggtgatcgatagtcacaaaagaagagagattttgtctagacgtccaagttaccggaaaatcctgaacgagctttcgtctgatgtccccggagtgcctaaaattgaggaggaaaggtccgaggaggaaggcacgcctccttctattgcgactatggccgttcctacaagcatctaccagaccagcacagggcaatacactgcaaccggagacatgccaacttatcaaatcagggctcctaccgccgcactccctcaaggcgttgtgatggcagcctcaccgggaagcctgcactccccgcaacagttggctgaagaggccacacggaaacgagaacttcgtctgatgaagaatagagaggccgctagagagtgccgaagaaagaagaaggagtacgttaaatgcctggagaaccgtgtggccgtcttggagaaccagaacaagacacttattgaggagctcaaggccctgaaagatttatactgtcataaggtggagtag

SEQ ID NO: 216864 - DNA, 288 bp, synthetic construct
  misc_feature 1..288: note = Description of Artificial Sequence: Synthetic coding sequence
  source 1..288: mol_type = other DNA
atgcccacctatcagattagggctccgacagccgctctgccccaaggagtggtcatggccgcaagtccgggaagcttgcattctccacagcagttggccgaggaggctactcgtaaacgcgaactaagacttatgaagaatcgcgaggccgctcgcgagtgccgcaggaagaagaaagagtatgtgaaatgccttgagaaccgagtggcagtgttagaaaaccaaaataagaccctgattgaagaactgaaagccctgaaagacctctattgtcacaaagtggaatag

SEQ ID NO: 216865 - DNA, 810 bp, synthetic construct
  misc_feature 1..810: note = Description of Artificial Sequence: Synthetic coding sequence
  source 1..810: mol_type = other DNA
atgacaatggaaacagtcgaatcccaacatgatggatccattacagcaagcttgaccgaaagtaagagcgctcacgtgcaaacccagactggtcagaattccatacctgctctggctcaagtgagtgtcgcaggatcaggtactagacgaggttcacctgcagttacactggtccagttaccgtccggccagacaattcacgtccagggagtcatccagacaccccagccatgggttatccagagcagcgagattcatactgtccaggttgcagcgatagctgagaccgatgagagtgctgaaagcgagggcgtgatagattcccacaaacgacgcgaaattctgtctcgccgtcccagctataggaaaattctgaacgaattgtcctccgacgttccaggtgtcccaaagatcgaggaggagagaagcgaagaagagggcacccctcccagcatcgcgactatggccgttcccaccagtatctaccaaaccagcaccgggcagtatactgcaaccggagacatgccaacctaccaaattcgggcacccactgctgcattaccccagggagtggttatggccgcatcaccagggagcctgcactcccctcaacagttagccgaggaggcgacacgcaagcgggagctccgcctcatgaagaaccgggaggccgctagagagtgtagacggaagaagaaggaatacgttaaatgtctggagaatagggtggccgtattagagaaccagaataagaccttgatcgaagaattgaaagcccttaaggacctctactgccacaaagtggaatag

SEQ ID NO: 216866 - DNA, 585 bp, synthetic construct
  misc_feature 1..585: note = Description of Artificial Sequence: Synthetic coding sequence
  source 1..585: mol_type = other DNA
atggtggctgctattgccgaaacagacgaatccgctgaatccgagggagtcatcgacagccacaaacgaagggaaatcctgagccgccgaccaagctatagaaaaatcctgaatgaactgagctcagacgtgccgggagtgcctaagatcgaggaagagcgctcggaagaagagggcacacctccttccatcgccaccatggctgttcccactagtatttaccaaactagcactggtcaatacaacgaagaaaccgagctcgccccaagtcacatggcggctgctacaggagatatgcccacctaccagatcagggcaccaacagccgctctcccccagggagttgtaatggctgccagcccgggtagtctccactcaccccagcagctcgccgaggaggccacaagaaagcgcgagctgagacttatgaagaatcgggaagctgctaaggagtgcagacgtaggaagaaggagtacgtgaaatgtttggagtcacgcgttgctgtactggaggttcagaataagaaattaattgaagagttggagacacttaaggatatttgttcccctaaaacagactactag

SEQ ID NO: 216867 - DNA, 363 bp, synthetic construct
  misc_feature 1..363: note = Description of Artificial Sequence: Synthetic coding sequence
  source 1..363: mol_type = other DNA
atggcagtcacaggggatgatacagacgaggagaccgaactggcaccgtcccacatggccgcagcgacaggcgatatgccaacctatcagatccgagctccaaccgccgctctgccccagggcgtagtgatggccgcttccccaggctctctgcattccccccagcagctggcagaagaagcgactagaaagcgggaactccggctgatgaagaacagggaggccgcaagagagtgtcggaggaaaaagaaggagtatgtaaaatgcctagaaaatagagtcgctgtgctggaaaaccagaacaagacgttgatcgaagagttaaaggcactgaaggacctctactgtcacaaggtggagtag

SEQ ID NO: 216868 - DNA, 291 bp, synthetic construct
  misc_feature 1..291: note = Description of Artificial Sequence: Synthetic coding sequence
  source 1..291: mol_type = other DNA
atgcctacttaccaaatcagagctccgaccgccgctctcccccaaggcgtcgtaatggccgcatcccctggctccctgcacagtcctcagcagttggcagaagaggccactcggaagcgggagcttaggctcatgaagaatagggaagctgcaaaggagtgtcgcaggaggaaaaaagagtacgtgaaatgcctagaatcaagggtggcggtcctggaggtgcaaaataaaaaattgattgaggaattggaaaccctgaaagatatttgtagccctaaaacagattattag

SEQ ID NO: 216869 - DNA, 339 bp, synthetic construct
  misc_feature 1..339: note = Description of Artificial Sequence: Synthetic coding sequence
  source 1..339: mol_type = other DNA
atgaacaggacacaggaactgtccggacaactaagcgccgcaactggagacatgcccacgtaccagattcgagcaccgacagcagccctgccccaaggagttgttatggctgcgagccccggatcgttacacagcccacagcaattggctgaggaggcaactcggaaaagagaactccggttaatgaagaatagagaagctgccagagagtgccgccgtaaaaaaaaggagtatgtgaagtgtctggagaaccgcgtagcagtgcttgagaatcagaataaaactttgatagaggagttgaaagccctcaaggatttatattgccataaagtggagtag

SEQ ID NO: 216870 - DNA, 939 bp, synthetic construct
  misc_feature 1..939: note = Description of Artificial Sequence: Synthetic coding sequence
  source 1..939: mol_type = other DNA
atgagcaagtgcgccagaaagaagtatatcaaaacgaatccacgccaaatgaccatggagactgtcgagtcgcaacacgacggttcaataactgcctctttgaccgaaagtaagtcagctcacgttcagacgcaaacagggcaaaattccatacccgctcttgcccaggttgccgcaatagcagagaccgacgagtcagcagagtccgagggcgtgatcgactcccacaaaaggcgggagatcttaagtcgcaggccgagttacagaaagatactaaatgagttatcatccgacgtcccaggcgtgcctaagattgaagaagagcgttctgaagaggaggggactcccccaagcatcgctactatggcggtgcccacctctatctaccagacctctacaggacagtacatcgccatcgcgcaggggggaaccatccaaataagcaatcccggttccgatggggtacagggattgcaggccttgacaatgaccaactctggcgctccacctcctggtgccaccattgtacaatacgcagctcagtcagccgacggtactcagcagttctttgtaccaggttcacaggtggtagtgcaagatgaagagaccgagttagctccctctcacatggccgctgccacaggggacatgcctacttaccagattagagccccaactgctgcactgccacaaggggtggtgatggctgcttcccctggcagcctgcattcgccacagcaattggcagaggaagcaactcgaaaacgcgaactgaggctgatgaagaaccgggaagctgccaaagaatgtcgtaggagaaagaaggagtacgtgaaatgtctggagtcacgggtggccgtgcttgaagttcagaacaaaaaactgattgaagagctggaaacgcttaaagatatttgctcccctaagaccgattactag

SEQ ID NO: 216871 - DNA, 660 bp, synthetic construct
  misc_feature 1..660: note = Description of Artificial Sequence: Synthetic coding sequence
  source 1..660: mol_type = other DNA
atgtggtggcaccagcacaatctatgctttagaagaccgattgaagaagattacagttccggagacgtcgaggaaaaggtagctgcaattgcggaaaccgacgaatctgccgaaagcgagggggtgatcgattcacacaaacggagggagattcttagtcggcgtccgtcctaccgcaagatactcaacgagctctccagcgacgtacctggagtgccaaaaatcgaggaagaaagaagtgaggaggaaggcactcctccatccatcgctacaatggccgtgcctactagtatataccaaacctctacaggtcagtataatgaagaaactgaactcgcgccttcgcacatggctgcggctacaggggatatgcccacctaccagattcgcgctccaaccgctgcccttcctcagggggtcgtgatggccgcatcccccggaagcctgcactctccacagcagctcgccgaggaagctacccgtaagcgagagctgaggctgatgaagaatagggaggctgccaaggagtgcagacgtaggaagaaagaatacgtgaaatgtctggagtctagagtagccgtattagaggttcagaataagaaacttattgaggagctggagactctaaaggatatctgctccccaaagacggattattag

SEQ ID NO: 216872 - DNA, 366 bp, synthetic construct
  misc_feature 1..366: note = Description of Artificial Sequence: Synthetic coding sequence
  source 1..366: mol_type = other DNA
atggcagtgactggcgacgacacggacgaagagactgagctggcaccatcacacatggctgccgctacaggggacatgccaacataccagatcagagcgccaactgcggcactacctcagggcgtggttatggccgcttctcccggaagcctccattccccgcaacagctggcagaggaggctacaaggaagagggaactgcgtctgatgaaaaatcgcgaggcggcaaaagagtgtcgcagaagaaaaaaagaatacgtcaagtgccttgaatccagggtggccgtgctcgaagtccagaacaagaaactaatcgaagagctggagacactcaaggatatatgcagtccaaaaactgattattag

SEQ ID NO: 216873 - DNA, 330 bp, synthetic construct
  misc_feature 1..330: note = Description of Artificial Sequence: Synthetic coding sequence
  source 1..330: mol_type = other DNA
atggctgtcacaggcgacgacactgccgctaccggagatatgccaacctatcagatccgagcccctacagccgctctgccacagggcgtggtgatggccgcatcaccaggcagccttcatagtccccagcaattggccgaggaggccacccgtaagcgagaactccgactcatgaagaatcgcgaggcggcaaaggagtgccggcgtcgaaagaaagaatacgtcaagtgtctagagtctcgggtggctgtcctcgaagtgcagaataagaaattgatcgaagagttggagaccctgaaagatatttgcagcccaaaaacagactattag

SEQ ID NO: 216874 - DNA, 309 bp, synthetic construct
  misc_feature 1..309: note = Description of Artificial Sequence: Synthetic coding sequence
  source 1..309: mol_type = other DNA
atggccgcagcgacaggggacatgcctacctatcagattcgcgctcctactgccgcattgcctcaaggagttgttatggcagctagccctggaagcctgcattctccccaacagctggccgaggaggcaaccaggaaacgggaattgcgtctcatgaagaaccgggaggccgctcgcgagtgcagacggaaaaaaaaggagtatgtaaagtgtctggagaacagagttgcagtgctcgaaaatcagaataagactctgatagaggaactgaaggctttgaaggatctctattgtcacaaggttgagtag

SEQ ID NO: 216875 - DNA, 414 bp, synthetic construct
  misc_feature 1..414: note = Description of Artificial Sequence: Synthetic coding sequence
  source 1..414: mol_type = other DNA
atgactatggagaccgtggagtcgcagcacgacggttccatcactgcctctttgaccgaaagcaaatccgcgcacgtgcagacccagaccgggcagaactcaatccctgcactggcccaggtggctgccattgcggagacagacgaatcggcggagtcagagggagttatcgatagtcataaacgcagggagatcctgtccaggaggccaagctatagaaaaatactaaatgagctgagcagcgatgttccgggtgttcccaagatcgaagaggaaaggtctgaagaggaggggacaccaccatcaatagcaactatggccgtcccgacctctatctaccaaacctccacagggcaatacagcatgtatgctgccataaggtacgacacagtgctcgcactcagcctgctttag

SEQ ID NO: 216876 - DNA, 618 bp, synthetic construct
  misc_feature 1..618: note = Description of Artificial Sequence: Synthetic coding sequence
  source 1..618: mol_type = other DNA
atgaccatggagacagtggagagtcaacacgatggaagtatcaccgcaagtctcacggaatctaaaagtgcccacgtccagacccagactggtcagaattccatacccgcactcgctcaggtggtggccatcgcccaggggggaacaattcagatcagcaatccagggagcgacggcgtgcagggccttcaggccctgactatgacaaactcaggcgcaccgcctcccggagcaacaatcgtacagtacgccgcacaaagcgcagacggcactcagcagtttttcgtgcccggttcacaggtggtcgtacaggcggcaacgggtgatatgccaacatatcagatcagggcgcctaccgcggctctgccccaaggggtggtgatggcagccagtcctggttcactccactctccccagcagttagccgaggaggccacacggaagcgagaattgcgactgatgaagaaccgcgaggcggctaaggaatgtaggagacgcaagaaagagtatgtgaaatgtctcgagtcccgggtggcagtattggaggttcagaataagaagctcatcgaagagctcgaaaccttgaaagacatttgcagcccaaagacagactattag

SEQ ID NO: 216877 - DNA, 813 bp, synthetic construct
  misc_feature 1..813: note = Description of Artificial Sequence: Synthetic coding sequence
  source 1..813: mol_type = other DNA
atgaccatggagacagtcgagagtcaacacgatggctcgattaccgcatctctgaccgaatctaaaagcgctcacgttcagacccaaactggccaaaattcgattcctgccctggctcaagtgtctgttgcagggtcaggtacacggaggggttctccagccgttactcttgtccagctgccctctggccagacaattcatgtccaaggcgttatacagacgcctcagccttgggttatccagagtagtgaaatccatacagtgcaggtagcagctatcgccgagacagatgaaagcgctgagtcagaaggggttattgattcccacaaacggagggagatcctgtcccgcagaccgagctacagaaagattctgaatgaactgtcatctgacgtccctggcgtgccaaagattgaggaggaacgcagtgaagaagagggcaccccaccaagcatcgctaccatggcggtcccaacgtctatttatcagacctcaactgggcagtataccgctacaggagacatgcccacctatcagatcagggccccaacagctgcattgccccaaggagttgtcatggccgcttcacctgggtcacttcattctccgcagcagcttgcggaagaagccaccaggaaacgggagctccggcttatgaagaatagagaggctgccaaggaatgtcggcgaaggaagaaggaatacgttaaatgtttggaaagtcgagttgccgtgttggaagtgcagaacaagaaactcattgaggaacttgagaccttgaaagatatttgctcccctaaaactgactactag

SEQ ID NO: 216878 - DNA, 342 bp, synthetic construct
  misc_feature 1..342: note = Description of Artificial Sequence: Synthetic coding sequence
  source 1..342: mol_type = other DNA
atgaataggacgcaggagctgagcggccagctctccgccgctaccggggacatgcctacttaccagatcagagcacccactgccgcactgccgcaaggagtcgtgatggccgcatcgcccggatcactccactcgccacaacagctggctgaagaagcaactcgaaaacgggagctcaggctcatgaagaatagggaggccgctaaggagtgccggagacgaaaaaaggaatatgtaaaatgtttagaatccagggtggctgtgttggaggttcaaaataagaagctcattgaagagctggagaccctgaaagatatatgttcaccaaaaactgattattag

SEQ ID NO: 216879 - DNA, 465 bp, synthetic construct
  misc_feature 1..465: note = Description of Artificial Sequence: Synthetic coding sequence
  source 1..465: mol_type = other DNA
atgactatggagaccgttgagtctcagcatgatggcagcataacagcctccctcactgagtctaagtccgcccacgtgcaaacacagactggacagaacagcatcccagctctggcccaggtggatgaagaaaccgagctagcaccttcacatatggctgcagccacaggcgatatgcccacataccagataagggccccaacagctgcgctgccccaaggcgtcgtcatggcagcgtccccaggctcgctgcattcccctcagcagttagctgaggaggctacccggaagagagagttgcgactgatgaagaacagggaagctgcaaaggagtgccgtcgccgaaaaaaggaatacgtaaagtgcttggagagccgggtggcagtgttggaagttcaaaacaagaaactaatcgaagagctggagaccttgaaggatatttgctccccgaaaacagattattag

SEQ ID NO: 216880 - DNA, 339 bp, synthetic construct
  misc_feature 1..339: note = Description of Artificial Sequence: Synthetic coding sequence
  source 1..339: mol_type = other DNA
atgagtgcggaggtacctgaggccgcatccgctgaggaacaaaaggagatggaagacaaggtgaccagtcccgagaaagctgaggaagctaagctgaaggctagatatccacatctgggtcagaagccgggaggttccgacttcctgcgaaagaggttacagaagggccagaaatatttcgactccggcgattacaacatggcaaaagccaagatgaaaaataagcagctacccacggccgctcctgataagacggaggtcaccggagaccacattcccacccctcaggacctcccccagaggaagccctctttggtcgcatccaagcttgctggctag

SEQ ID NO: 216881 - DNA, 1926 bp, synthetic construct
  misc_feature 1..1926: note = Description of Artificial Sequence: Synthetic coding sequence
  source 1..1926: mol_type = other DNA
atgacggaaaagcctgaattccaatcgcaagtgtataattacgccaaagataacaacataaaacaggattccttcaaggaggaaaaccccatggagacctccgtctctgcaaatactgaccaacttggaaacgaatacttccggcagccccctcctcgcagtccccctctgatccattgttcaggagaaatgctgaaattcacagaaaagagtttggccaaatcgattgccaaagagtctgccctcaaccccagccagcctccctctttcctgtgtaagacagcagttcccagcaaggaaatacaaaactacggggaaattcccgagatgtccgtgtcatatgagaaagaggtaacagccgaaggagtagaacgcccagaaatagtgtctacgtggtcgagcgccggaatttcatggcgtagcgaggcatgtagggagaattgcgaaatgcctgactgggaacagagcgctgaatcattacagccagtacaagaggatatggcactaaacgaagtcctccaaaaactcaaacacactaacagaaagcaagaggtcaggatccaggagttacagtgttcgaatttgtaccttgagaagcgagtgaaagaactgcagatgaagattacaaagcagcaagtcttcatagatgtgattaataaattgaaagagaatgtggaggagcttatcgaagacaagtacaagattattctggaaaaaaatgataccaaaaagactctccagaatctcgaggaggttctcgcaaatactcagaagcacttgcaggagtcaaggaacgataaagagatgctccagctgcagttcaagaagataaaggctaattacgtgtgtctgcaagaacggtatatgacagagatgcagcaaaagaacaaaagtgtttctcagtacctcgagatggataaaaccctgagtaagaaggaggaggaggtggaacgcctccagcaacttaaaaaggagctggaaaaggcaactgcttctgctctcgatctgctgaagcgcgaaaaggaagcgcaggagcaagaatttttgagtctgcaggaggaattccagaaactggagaaagaaaatttggaggaaagacagaagctaaaatcacggctggagaagctgctgactcaggtgcgcaacctgcagttcatgagcgagaacgagcgaaccaagaatatcaaactgcagcagcagatcaacgaggtgaagaatgagaacgctaagctgaaacagcaggtggctagaagtgaagaacaaaattacgtacctaaattcgaaactgcccagctcaaagaccagctggaagaagtgctcaaatccgatataacgaaggacacaaagaccactcactcaaacctgctccctgattgctccccatgcgaggaacgtctcaatcctgcagatattaagagggcatcccagctcgctagtaagatgcatagtctattggcacttatggtagggctactgacctgccaggacatcattaattctgatgccgaacatttcaaagaatccgagaaggtgtcggatatcatgttgcagaaactgaaaagtctgcatctgaaaaagaagacacttgacaaggaggttatcgattgcgattcagacgaggccaagtcaattagggacgtcccaacgctccttggtgcaaagctagataaataccatagcctcaacgaggagctggattttcttgtcaccagctacgaagagatcatcgagtgcgcagaccagagactcgccatttcccattctcagattgcgcacctagaagagcgaaataagcacttggaagatctcatccgaaagccccgagaaaaggctaggaaacctaggtctaagtcattggagaaccatcccaagtccatgacaatgatgcctgccttattcaaagagaatcgaaacgatctcgattag

SEQ ID NO: 216882 - DNA, 2475 bp, synthetic construct
  misc_feature 1..2475: note = Description of Artificial Sequence: Synthetic coding sequence
  source 1..2475: mol_type = other DNA
atgaataaggactaccagaaattctggagctcccctagtgaccctgtgcacttcgaagttgataccagccacgagaaggtggagtccatgagcgagtctgacactatgaatgtctccaacctgtctcaaggtgtaatgctctctcacagcccgatctgcatggaaaccacagggactacatgcgatctcccgcagaatgaaatcaaaaatttcgagcgggaaaacgagtatgaatcgaccttgtgcgaggatgcctacgggacgctggacaacctcctcaatgacaataatattgagaactatagcactaatgcactcattcagcctgttgacaccattagcattagttccctgagacagttcgagactgtttgcaagttccactgggtcgaggccttcgatgacgaaatgactgaaaaacccgaatttcaaagtcaggtctacaactacgcaaaggacaacaatatcaaacaggacagctttaaggaagagaatcctatggagactagtgtttctgccaacacggaccaattgggtaacgaatattttcggcagccgccaccaaggagtccacccctgatccactgctctggtgaaatgctaaagttcacagaaaagtccctagccaagagcattgcaaaggagtcggccctgaatccatcacaacccccaagtttcctgtgtaagaccgctgtgcctagtaaagagattcagaattacggagagattcctgaaatgtcagtatcttatgaaaaggaggtcacagccgaaggtgtcgaacgacctgagattgtttctacttggagctctgctgggataagttggcgtagcgaagcttgtagggaaaattgcgagatgcctgactgggaacagtctgcggaatcgctacagcccgtgcaggaggatatggccctcaatgaggtactgcagaaacttaaacacaccaaccgcaaacaggaagttaggatccaggaactccagtgttctaacttatacctggagaagagggttaaagagttgcagatgaaaattacaaaacagcaagtgttcatagacgtgatcaacaagctcaaagagaatgtcgaagaactaatcgaggataagtacaagattatcctcgagaagaatgacaccaaaaagaccttacagaatctggaagaggtgcttgccaacacacagaaacatctccaagagtcacgcaatgataaggagatgctgcagttgcagttcaaaaagattaaagctaactatgtgtgtctgcaggagcgatacatgactgagatgcagcagaagaacaagagcgtttctcagtacctagaaatggacaaaaccctatccaaaaaagaagaagaggtggagcggcttcaacaactgaaaaaggaacttgaaaaggcaacggccagcgccctagatttactaaagcgggaaaaggaggcacaggaacaggaattcctgagtctccaggaagagtttcaaaaattggagaaggaaaatttggaggaaaggcagaagctcaagagcagattagaaaagctgctgacccaggtgcgcaacctccagttcatgagcgagaacgagaggacaaaaaacatcaagctccagcaacagatcaacgaggttaagaatgagaacgcgaaactcaagcaacaagtggccagaagcgaggaacagaattatgtacctaagttcgagacggcccagctgaaggaccagcttgaagaagtgctaaaaagtgatattacaaaggatacaaagaccacacattccaacctgctgccggattgctccccttgcgaagaacggctgaaccccgcagatattaaaagggcaagccagttagcatctaagatgcactcccttctggcactcatggtgggactgcttacctgccaggacatcattaacagcgacgccgagcattttaaggaaagtgagaaagtgtctgacataatgctgcagaaactcaagtccctgcacctaaagaaaaaaacacttgataaggaacttttaaagcacaaggatcggattacaacgtttcgcgagctcatcgccaaggaaaaggcctttcaggatcacgccattaaagtgatcgactgcgattccgacgaagcaaaaagtatcagagatgtgcccactctgctgggagcaaaactcgacaaataccactcgttaaacgaggagctagactttctcgttacctcctatgaagaaatcattgaatgtgctgaccaacgcttggctatatctcacagtcaaatcgctcatttggaagagagaaataaacatctcgaggaccttattaggaagcctcgggaaaaggccagaaaaccaaggagcaaatctctggagaaccatcctaaatctatgaccatgttggcttataatctgtacatttttattggatatagactgggggctgttgcagacgcctgcaacccatctactttgggcggtagaggagggtggataacgtag

SEQ ID NO: 216883 - DNA, 2334 bp, synthetic construct
  misc_feature 1..2334: note = Description of Artificial Sequence: Synthetic coding sequence
  source 1..2334: mol_type = other DNA
atgaacaaggattatcagaaattctggagcagtccatccgaccctgtgcacttcgaggtagatacatcacatgaaaaggtcgaaagtatgagtgaatccgataccatgaacgttagcaacctgtcccagggtgtgatgctcagccactcgcccatttgcatggaaacaaccgggaccacatgcgatttacctcagaacgaaataaagaacttcgagcgggagaacgaatatgagtccacactgtgcgaagatgcctacggtacacttgataatcttcttaacgacaacaatatcgagaactattccaccaatgccctgattcaacctgtggatacaatcagtatcagcagccttcgccagtttgagaccgtatgtaaattccattgggtggaagctttcgacgatgagatgacagaaaaacctgaattccagtcacaggtgtataactatgctaaggacaataacatcaaacaggactccttcaaagaagagaacccaatggagaccagtgtctctgcaaataccgaccaactcgggaatgaatatttcaggcagcccccaccccgaagcccgcctctgatccactgctcaggggaaatgctcaaatttaccgagaaaagtctggccaagagcatagcaaaggagagcgctcttaacccctcccagcccccttctttcctctgcaaaacagcagtcccgagcaaagagatacaaaactacggtgaaatacctgagatgtcagtgagttacgaaaaggaagtaacggcagagggcgtggaacgccctgaaattgtcagcacctggtcatctgcgggtatctcctggaggtcagaggcctgccgggagaactgcgagatgcccgattgggagcagagcgctgagtcattgcagccagtgcaggaagacatggcactcaacgaggtcctgcagaagcttaaacataccaaccggaagcaagaggtaagaatccaggaattgcagtgtagtaatctctacctcgagaagcgtgtgaaggaattgcagatgaagattacaaagcagcaggtttttattgatgttattaataagctgaaggagaacgttgaagagttgatcgaagacaagtataagattatcttagaaaagaacgatactaaaaagaccctgcaaaatcttgaggaggtattggctaatacacaaaaacacctacaggagtcaagaaacgacaaagagatgttacaacttcagttcaagaaaattaaagccaattatgtgtgcctacaggagaggtatatgacagaaatgcagcagaaaaataagagcgtgtcccagtacttggagatggacaaaacactttcgaaaaaggaagaggaggtagagagactacagcagctgaaaaaagagttggaaaaggccaccgcgagcgcgctggacctcctgaaaagggagaaggaggctcaagaacaggagtttctctctctgcaggaagagttccagaagctggagaaggagaatctggaggaaagacaaaaactcaaatcccgattagaaaagttactgactcaagtccggaacctgcaatttatgagcgaaaacgaacggaccaaaaacataaaattgcagcaacagattaatgaggtgaagaacgaaaatgcgaagcttaagcaacaggttgcacggtctgaggagcagaattacgtcccaaaattcgagaccgcccagctgaaggatcaacttgaagaagtgctgaaatcagatatcacaaaggatacaaagactacccacagcaacctactgcctgactgctctccgtgtgaagaacgtttaaacccagctgatatcaagcgcgcaagccagctcgcatcaaaaatgcattcgttgctggccctcatggttgggctgctcacatgtcaggatattataaattctgatgctgaacactttaaggagtccgagaaggtgtcagatatcatgcttcagaaactgaagtctctgcatctgaagaagaagacactcgacaaggaggtgattgactgtgatagcgatgaggcaaagtctattagggatgttcctacactgctcggcgctaaactggataaatatcattcccttaacgaggagctggatttcctggtgacctcctacgaggaaattattgagtgcgccgatcagaggcttgcaataagtcactcccagatagctcatctcgaagagcgaaataagcatttagaggatttgattagaaaacctagagagaaggctcgcaagcccaggtctaaaagcctcgaaaatcatcccaagagcatgacaatgatgcccgcactgtttaaggagaataggaacgacctcgactag

SEQ ID NO: 216884 - DNA, 2103 bp, synthetic construct
  misc_feature 1..2103: note = Description of Artificial Sequence: Synthetic coding sequence
  source 1..2103: mol_type = other DNA
atgaacaaggattaccagaagttctggtcctctcccagcgatcctgtccactttgaggtggacacctcccacgagaaggtggaatccatgtccgagagcgacacaatgaatgtatctaacctgagccagggggtgatgttaagtcactcaccgatctgcatggagaccacgggcaccacatgtgatttgcctcagaacgagatcaaaaactttgaacgggaaaacgaatacgaatccactctttgtgaagacgcatacggcacactggataatttgttaaatgacaataatattgagaactacagcaccaatgccctgatacagcctgtcgacactatctccattagcagtctccgacaattcgagaccgtctgcaagtttcactgggtcgaggctttcgacgacgagatgacagagaagccagaattccaaagccaggtgtataactacgccaaggataacaatatcaagcaggactctttcaaagaagagaatcctatggagacctcagtgagcgcaaataccgaccaacttgggaatgaatactttcgacagcctcctccacgctcacccccactcatacactgcagtggggagatgctaaaatttaccgagaagtcactggccaagagtatcgccaaggaaagtgcccttaacccgagccagccacctagttttttatgtaaaactgctgttccctccaaagagatccaaaactacggggagatccctgagatgagcgtgtcttacgagaaagaggttacagccgagggagttgaaaggcccgaaatcgtgtccacatggtccagtgctgggatatcctggagaagtgaggcctgccgggagaactgcgagatgccagactgggagcagtctgcagagtcactccaacctgtccaagaagatatggcgctgaacgaagtactccaaaaattgaaacacacaaataggaagcaggaggtgcggatacaggaactccagtgttcaaatctgtacctcgaaaaacgggtcaaggagctccagatgaaaatcactaaacagcaggtgttcatcgacgtaatcaataaattgaaagagaacgtggaggagttgattgaggataaatacaagatcattctggaaaaaaatgacactaagaaaaccctccagaacctcgaagaagttctcgccaatacacagaaacacttacaggaatccagaaacgacaaggagatgctacagctccaattcaaaaagatcaaggcaaactacgtgtgcctccaagagaggtacatgacagaaatgcaacaaaagaacaagagcgtgtcacagtacttggaaatggataaaaccttgagcaagaaggaagaagaggtagagagactccaacaactgaagaaggagctggagaaagcaacagcctctgccttggacctgctgaagagggaaaaggaagctcaagaacaggagttcctgtccctgcaagaggagttccagaagttagagaaagagaacctcgaggagcggcaaaagctcaagtctcgcctcgagaagctcctaacccaggtgcgcaatctgcagttcatgagtgagaacgagagaaccaaaaacatcaagctgcagcagcagataaacgaagtgaaaaacgagaatgctaagctaaaacagcaagttgctagaagcgaggagcagaactatgtgcccaagttcgagacagcacagctcaaggatcagctggaagaagtactcaagtctgacataaccaaggacacaaaaactactcacagcaacctcctgcctgactgctccccatgcgaggaacgcctgaatcctgccgacattaagagagcttcccagttagcatccaagatgcactccttgctggccctaatggttgggctgctgacctgtcaagacattataaatagcgacgcagaacatttcaaagagtccgagaaggtatctgacatcatgctccagaaactgaaatcactgcacctaaagaagaagacactggacaaggagctgctgaagcataaggacagaattaccactttcagggaactgatcgctaaggaaaaggccttccaagatcatgccatcaaggtgtttcagggtgtctag

SEQ ID NO: 216885 - DNA, 2520 bp, synthetic construct
  misc_feature 1..2520: note = Description of Artificial Sequence: Synthetic coding sequence
  source 1..2520: mol_type = other DNA
atgaataaagactaccagaagttttggagttctcccagtgatcccgtgcatttcgaggtggacacatcacatgaaaaagtcgaatccatgagtgagtcggacactatgaatgtcagcaaccttagtcagggagtgatgctcagtcactctccaatctgtatggagaccacaggcacgacctgcgatctgccccaaaacgagatcaagaatttcgaacgagaaaacgaatatgagtcaacgttatgtgaagacgcctacggaacactggacaacctgttgaatgataataatatcgagaattacagtactaacgccttgatacaaccagtggataccatctctatcagctcactcagacagttcgagaccgtctgtaagttccactgggtggaagccttcgatgacgagatgacagaaaaaccagaattccaaagccaggtgtataattatgcgaaagacaataacatcaaacaggattcttttaaggaggagaacccaatggaaacctccgtaagtgccaatactgatcagttggggaatgagtactttaggcagccacccccacgcagccctccactaatccactgctccggggagatgctgaagttcaccgaaaagtcacttgctaaatcgatcgcaaaggagagcgccctgaatccctcgcagcctccgtcattcctgtgtaagactgccgtccccagcaaagagattcagaactacggtgagatacccgaaatgagcgtgtcatacgagaaggaggttacagcggagggagtggagaggcctgagatcgtgagcacctggtcatcggccggaatatcctggaggtccgaggcttgcagagagaattgcgagatgccagattgggagcagtccgccgagtccctacaacctgtgcaggaagatatggcactaaatgaggtcctacagaaactcaaacataccaaccggaagcaagaggttcggattcaagagcttcagtgttctaatctctatctggaaaaacgtgtgaaggaactccagatgaaaataaccaaacagcaggtcttcatcgacgtcattaacaaactcaaagaaaacgtcgaggaattaatcgaagacaagtataaaatcatcctggaaaaaaatgacaccaagaagacgcttcagaacctggaggaggtgctggcaaatactcaaaagcatttacaagaatctaggaacgacaaggagatgctgcagttacagttcaaaaagatcaaggcaaattacgtctgtctccaggagagatatatgacagagatgcagcagaaaaataaatccgtaagtcagtacttagagatggacaaaaccttgagtaagaaggaggaggaggtagagcggttacagcagctcaaaaaagagctggagaaggcgactgctagtgcccttgacttgctcaagagagaaaaagaggcccaggaacaggagtttctttcattacaagaggaatttcagaaactcgagaaggagaacctggaagagagacagaaattgaagtctcgtcttgaaaagcttctaactcaagttaggaatctgcagtttatgtcagagaacgaaaggacaaagaatataaagctccagcagcagatcaacgaggtcaagaatgaaaacgccaagctgaaacagcaggtagccagatcagaagagcagaactacgtgccgaaattcgaaaccgcccagctgaaggatcaactggaggaagtgttaaaaagtgatattaccaaggacactaaaaccacccactccaatttgctgccggattgttccccctgtgaggagcgtctcaaccctgcggatatcaagcgagctagtcagctggccagcaagatgcacagcttgcttgccttgatggtgggccttctcacatgccaggacattatcaatagtgacgctgaacactttaaggagtctgaaaaagtatccgacattatgctgcagaaactgaaatccctccaccttaagaaaaagaccttagacaaggagttgctaaaacacaaagatcggataactactttccgggagttaatcgccaaggagaaagcttttcaggatcacgctatcaaagtgatagattgtgacagtgatgaagcgaagtcaattagggacgtccctacgcttttgggcgcaaaactggacaagtaccattccctgaatgaagagctcgactttcttatcactaaactgggacacttgctggagtcaaaagaaaatcattgcaaccgcctgatcgaggagaatgacaagtaccagcgccacctgggtaacctaataaagaaagttaccagttacgaggagattattgaatgtgctgaccagcgcctggcgatttctcacagccagattgcacacctggaagaaaggaacaaacatcttgaagatttgattcggaagccaagagagaaggccagaaagccccgaagcaaatcccttgaaaatcatcccaagagcatgactatgatgccagcgttatttaaggagaataggaacgacctggactag

SEQ ID NO: 216886 - DNA, 2112 bp, synthetic construct
  misc_feature 1..2112: note = Description of Artificial Sequence: Synthetic coding sequence
  source 1..2112: mol_type = other DNA
atggcagatcgacgcaggcagagagcctcccaggatacggaggatgaagagtcaggagcctctggctcagatagcggcggatctcctctgcggggaggtgggtcttgctctgggtctgccggaggcggaggctcaggctctctgccatcccagaggggtggacggactggcgctctccatctcaggagagttgagtctggcggagcgaaaagcgctgaggagtccgagtgcgagagcgaagatggcattgaaggcgatgctgtcctttccgactatgagtccgcagaggattccgaaggggaggagggcgagtacagcgaggaggagaatagcaaagtcgagctgaagagtgaggctaatgacgccgttaattcatccactaaagaggaaaagggcgaggagaaacccgatactaagtccaccgttaccggtgagcgtcagtcaggggacggccaagagagcacagagcccgttgaaaataaggtaggcaaaaaagggccaaagcacctggacgacgatgaggaccgcaagaaccccgcatacattccccgtaagggtctgtttttcgagcacgacctgcgcggtcaaacacaagaagaggaggtcagacctaaggggaggcagcggaaactgtggaaagatgaaggccgatgggaacacgacaaattccgagaggatgagcaagccccaaaaagcaggcaggagctgattgccttgtatgggtacgatatccggagcgctcacaaccccgacgatattaagccccgtaggattcgaaagccaaggtatggttcaccccctcagagggacccaaattggaatggtgagagacttaataagtcgcatcgccaccagggccttggcggaaccctgccacctcgtacattcatcaaccgcaatgctgccggtaccggacgcatgtccgcccctcggaactatagtcgcagtgggggttttaaggagggacgtgccggtttcaggccggtggaagctgggggacagcacggcggtaggtccggcgaaacagtgaagcatgagatctcgtatcggagtcgcagactggagcaaaccagcgtgcgcgaccccagccccgaggcggacgctccagtgcttgggtccccggagaaagaagaggccgcttccgaacctcccgcagccgctcccgatgcagcccctccacctcctgaccggccaatcgaaaagaagtcctatagtcgtgctcgtcgcactaggacgaaggtgggcgacgcagtgaaactcgctgaagaagtgccaccccctcctgaaggtcttatcccagcccctccggtgcctgaaactacacccactcctcccactaagacgggtacttgggaagcccctgtggatagcagtacaagcggcttggagcaggacgtggcacagcttaatatcgcggagcagaattggtctccgggacagccttctttcttgcagccacgagaactaaggggcatgcccaatcatattcacatgggggctggcccaccgccacagttcaaccggatggaagaaatgggtgtgcagggcggtagagcgaagcggtattctagccagcggcagcggcctgttccagaacctcctgctccccctgtacacataagcatcatggagggtcattattatgacccactccagtttcagggtcctatctatacccacggagactcccctgccccattgcccccacagggaatgctcgtgcagcccggaatgaacttgccacacccaggcctacatccccatcaaacccctgcccctcttcccaacccagggttgtatccacctcctgtgtccatgtctccaggccagcccccaccccagcagctactcgctcctacgtattttagcgcccctggcgtgatgaacttcggaaacccatcctatccttatgcaccgggagctttgcccccacctcctcctccccatctgtatcccaatacccaggcgcctagccaagtttatggtggggtgacgtactacaatcccgctcaacagcaagtccagcccaaaccgtctcccccaaggcgaactccccagcctgtaactatcaagcctccgcctccggaagtcgtttctagagggagttcgtag

SEQ ID NO: 216887 - DNA, 2112 bp, synthetic construct
  misc_feature 1..2112: note = Description of Artificial Sequence: Synthetic coding sequence
  source 1..2112: mol_type = other DNA
atggcagaccgacgaagacagagagccagtcaggatacagaggacgaggagagtggtgctagcggaagcgattccggcggaagccctcttcgtggaggtggcagctgttccggaagtgctggagggggaggctctgggtctttgcccagccaacggggaggcagaacaggggctctccacctccgccgtgtggagtctgggggagccaaatcagctgaggagagtgagtgcgagagtgaggacggaattgagggagatgcggttctgagtgactacgagtcagcagaagacagtgagggagaggaaggcgagtatagtgaagaggaaaacagtaaagtcgagctgaagagtgaagctaatgacgccgtcaactcctctacgaaagaggagaagggcgaggagaagcccgacactaaaagcacagtgaccggagagagacagagcggcgatggacaggaatcgaccgaacctgtggagaataaggtcgggaaaaaagggccaaagcatttagacgacgacgaagaccggaagaatcccgcttacatccctcgtaaggggctgtttttcgagcacgatctgcggggacagacacaagaagaagaggttaggcccaagggcagacagaggaaactgtggaaagatgaaggaagatgggaacatgacaagtttcgggaagatgaacaggctcccaagtctcggcaggaactcatcgctctttacggctacgacatcaggagtgcacacaaccccgacgacattaaacctcgaaggatccgcaagcccaggtacggctcgcctccacagcgcgatcctaattggaacggcgaacggcttaacaaatcacacagacaccaggggctggggggaacattaccaccacggaccttcataaacaggaatgccgcaggcacaggcaggatgtcagcccctcgcaattactctagatccggcggattcaaggagggacgagccggattccgccctgtggaggctggagggcaacatggcggacgatcaggtgagaccgttaaacacgagatcagttataggagtcgacggctggagcagacttctgtgcgagacccaagtccagaggctgacgccccagtcctgggatcgccggaaaaagaagaggcagcttctgagccacctgctgccgcaccagacgcggctccacccccaccagatcggccaatcgaaaaaaagtcttacagccgcgcaagacgcacacggaccaaggtcggagatgcggtcaagctggcggaggaagtgcccccaccccctgaggggctaattccggcaccccctgtacctgaaactacccctaccccacccacaaagacagggacttgggaggccccagtcgatagttccaccagcggcctggagcaggatgtggctcagctcaacattgctgagcagaactggagtccgggacaaccaagtttcttgcaacccagagaactgagagggatgccgaaccacatccatatgggtgcagggccaccccctcaattcaacagaatggaggaaatgggcgtgcagggcggtagagcgaagcggtactcttcgcagcgccaacgccctgtgcctgagcctcccgctccacccgtccacatcagcattatggaaggacattattatgacccgttacaatttcagggccctatctacacccacggagattcaccggctcctctaccccctcagggaatgctggtgcagccaggtatgaacttgccacatcccggtcttcacccacatcagacaccagcaccattacctaatccagggctgtacccccctcctgtctccatgagtcccggtcagccgcctccccagcagctgctggcacccacctatttctcagccccaggcgttatgaactttgggaatccaagctatccttatgccccaggagccttgccccctccaccccctcctcacttgtatcctaacacgcaggcgccatcacaggtctatgggggagtgacgtactataacccagcccagcagcaggttcaacctaagccatcccccccacggagaactcctcagcccgtgacaatcaagccaccaccccctgaggtggtgtccaggggcagctcttag

SEQ ID NO: 216888 - DNA, 1926 bp, synthetic construct
  misc_feature 1..1926: note = Description of Artificial Sequence: Synthetic coding sequence
  source 1..1926: mol_type = other DNA
atggccgaccgtcgaagacagagggcttcccaggataccgaagatgaagagagcggcgcatctggttccgactctggtgggtctccattgagggggggtggttcatgtagcgggtctgcagggggagggggatccggctctttgccttcccagcgaggagggcgtaccggcgctcttcacctgcgccgagttgagtccggaggcgcaaagagtgccgaggaaagtgaatgcgaaagtgaagatggtatagagggggatgccgtcctttccgattatgaaagcgccgaggacagcgagggggaagagggcgaatactctgaagaggagaatagcaaggtggagcttaaaagtgaggcgaacgatgcagtgaatagctctaccaaggaggaaaaaggcgaagaaaaaccggacaccaaatctactgttactggggaacggcaaagcggggacggccaggagagcaccgagccagttgagaataaagtcggcaagaaaggccctaaacacctggatgacgatgaagatcgcaagaacccagcgtatattccgcgaaaaggactgttttttgaacatgatcttcggggacaaacacaggaagaagaggtacgacctaagggcaggcaacgcaagctctggaaagacgaaggcagatgggagcacgacaaatttcgggaggacgaacaagccccaaagtcacgccaggagcttatcgcactttacggctatgacatccggtccgcccacaacccggacgacatcaagccgaggcgaattagaaaacccaggtacgggtcacctccgcagagagaccccaattggaatggagagagactcaataagtcccaccgtcatcagggtctcgggggtacattgcccccaagaacattcataaaccgaaatgccgctggcacaggtcgcatgtctgctcctcgcaactattctagatccggaggctttaaggagggccgagcagggtttcgaccggtggaagccggtggacagcacggcggacgctcaggcgagacagtcaaacatgagatttcttaccgctctcgccgattggaacagacttccgtgcgagatccatcacctgaagcagacgccccagtgctgggtagcccggagaaagaagaggcggcaagcgagccgccagctgctgcgccagatgctgcaccccctcctcctgaccggccaatcgaaaagaaatcctactctcgtgctaggagaacaagaacaaaagtgggggacgctgtaaaactggccgaagaagtgccccctccccctgagggcttgatcccggctccccctgtacctgaaacaacccctacacccccaaccaagactggtacctgggaggccccagtcgattcctcaacaagcgggctcgagcaagacgtggcacagctgaatattgccgagcagaactggtccccagggcagccctcctttcttcagccacgcgaactccgcggaatgcctaatcatattcatatgggtgccggacctcctcctcaatttaatagaatggaggagatgggggtgcaagggggacgggctaagcgttattcttcccagaggcaaaggccagtgcctgagccccctgcccctcctgtgcatatcagtataatggaaggccactactacgatcccctgcaatttcaaggcccaatttacacgcacggagatagccctgcccctctgccaccacaaggcatgcttgtgcaaccagggatgaatctcccacaccctgggctgcacccccatcagacccctgcatgtcctgatagtcagaccctgcgacattgtgaatcatgtctctgctggagcacagtgttctcttgtaaagatttttccatgtgtgggggtgtcttctgttactgttttaagggatgccctttcgtgattagtattgttacttggcgttag

SEQ ID NO: 216889 - DNA, 543 bp, synthetic construct
  misc_feature 1..543: note = Description of Artificial Sequence: Synthetic coding sequence
  source 1..543: mol_type = other DNA
atgcaagctgaagggcgaggcacaggtggatctaccggagacgccgacggcccaggcggacctggcattccagacggacccggaggtaatgccggtggccctggagaggcgggtgccaccggagggaggggcccacggggagctggcgcagccagagccagtggaccgggaggaggggctcctcgcggacctcacggcggtgcagcttcagggctcaatggctgctgtcggtgcggggctcgcggacccgagagccgtctactggaattctatctggccatgccatttgccacccctatggaagctgagctggcgcgtagatctctggcacaggatgctcctcctctccctgtgcctggggttctcttgaaagaatttacagtttccgggaacatcctgaccattcgactgacagccgctgaccaccgccagctgcagctgtccatttcttcttgtctacagcagctctcactcttgatgtggatcacccagtgttttctgcccgtctttctggcgcagcccccttctggacagcgtagatag

SEQ ID NO: 216890 - DNA, 570 bp, synthetic construct
  misc_feature 1..570: note = Description of Artificial Sequence: Synthetic coding sequence
  source 1..570: mol_type = other DNA
atgaccgataaaacagagaaagtcgccgttgatccagaaacagtgttcaagcgtccaagagagtgtgacagcccaagttatcagaagcgccagaggatggcactcctcgcacgcaaacaaggcgctggcgatagtctcattgctgggtccgctatgtcaaaggctaagaaactcatgaccggccacgccattccaccatctcaactggattctcagatcgatgacttcaccggattcagtaaagatagaatgatgcagaagcctggtagcaacgcgcctgtcgggggaaatgttacttccagcttctctggtgatgatctggagtgtagagagacagccagctcccctaagtcccaaagagaaattaacgctgatattaaacgtaaactcgttaaggaattaaggtgtgttgggcagaaatatgaaaagatattcgaaatgctggaaggagtgcaggggccaaccgctgtgcgtaagaggttcttcgagagtattatcaaggaagcggctaggtgcatgcggcgagatttcgtgaagcatttgaaaaaaaagctgaagcgaatgatttag

SEQ ID NO: 216891 - DNA, 570 bp, synthetic construct
  misc_feature 1..570: note = Description of Artificial Sequence: Synthetic coding sequence
  source 1..570: mol_type = other DNA
atgacagacaagacggaaaaggtggcagtcgacccagaaaccgtgttcaagcgacccagagaatgcgacagtcccagttaccagaagcggcagcggatggcacttttagcgagaaagcagggcgcaggcgacagtctgatcgccggatccgctatgtcaaaagagaagaagctgatgacaggacatgcgatccctcccagccagctagactcccagatcgacgacttcaccggattctccaaagaccgtatgatgcaaaaaccaggctccaacgccccagtcgggggaaacgtgacgagcagcttttcaggtgacgacttagagtgccgggagaccgcgtcaagcccgaagtcccagcaggagatcaatgccgatatcaaaaggaaactagtcaaggaactccggtgcgtgggccagaagtatgagaaaatctttgagatgttggagggggtacaagggcctaccgcagtgcgcaagcggttttttgaaagcatcatcaaggaggccgcaaggtgcatgcggagggattttgtgaagcacctgaagaagaagctcaagagaatgatctag

SEQ ID NO: 216892 - DNA, 570 bp, synthetic construct
  misc_feature 1..570: note = Description of Artificial Sequence: Synthetic coding sequence
  source 1..570: mol_type = other DNA
atgactgacaaaaccgaaaaagtggctgtggaccccgaaaccgtgttcaagaggccaagagagtgtgatagcccttcctatcaaaaaaggcaaaggatggcccttttagcaagaaagcaaggtgccggagatagcctgatagctggcagcgctatgtctaaggagaaaaaattgatgactggacacgcaatcccaccttctcagctggacagccagattgacgacttcactggcttctcgaaagatcgcatgatgcagaagccgggtagcaacgccccagtgggaggaaacgttacgagcagcttctcaggcgatgacctcgaatgccgcgaaacagcatccagccctaagagtcagcaggaaatcaatgctgacatcaagcgaaaactggtaaaagaactgaggtgcgtcgggcagaaatacgagaaaatattcgagatgctggagggggtgcaggggccaaccgctgttcgtaaacgctttttcgagtctattattaaagaggccgctcgctgtatgcggagggatttcgtaaagcacctcaagaagaagctgaagcgcatgatctag

SEQ ID NO: 216893 - DNA, 570 bp, synthetic construct
  misc_feature 1..570: note = Description of Artificial Sequence: Synthetic coding sequence
  source 1..570: mol_type = other DNA
atgactgataagaccgaaaaagtggctgtcgaccccgaaacggtgtttaagcgccctagggaatgtgactctccctcgtaccagaaaagacagcgtatggcactgctggcacggaaacagggcgctggagatagcctcatcgccggtagtgccatgtccaaagaaaaaaaacttatgactggccatgcaatcccacccagccagctcgattcccagatcgatgatttcaccgggttctctaaagatagaatgatgcagaaaccagggagcaatgcccctgtgggaggtaatgtcacatcttcgttcagcggggatgacctagaatgtagggagactgcttcctcccccaaatcccagcgcgaaataaacgcagatatcaagcgcaagctggtgaaagagctgcgatgcgtcgggcagaagtacgaaaagatttttgagatgcttgaaggtgtgcaaggccctactgctgtacggaaacggtttttcgagtccatcataaaggaagccgcaagatgtatgcgcagagacttcgttaaacaccttaagaaaaagctaaaacgcatgatatag

SEQ ID NO: 216894 - DNA, 570 bp, synthetic construct
  misc_feature 1..570: note = Description of Artificial Sequence: Synthetic coding sequence
  source 1..570: mol_type = other DNA
atgaccgacaagactgagaaggtggccgtagatcctgagactgtgttcaagagacctcgtgagtgtgactcaccaagctaccagaaacgccagcgcatggcacttctggccaggaaacagggggctggggattccttgattgccggttccgcaatgtccaaagaaaagaaactgatgaccggccatgccattccaccgtctcagctggacagtcaaattgatgacttcaccgggtttagtaaagacagaatgatgcagaagcccggatccaacgcccctgttgggggaaacgtgactagcagctttagtggagacgacctggagtgtcgagaaacggcgtcgtctcctaaatcccagagagaaatcaacgcagacattaaacgaaagctagttaaggagcttcggtgcgttggacagaaatatgagaagatcttcgagatgttggaaggagtgcaagggcctactgccgtgcgcaaaagattctttgagagcatcatcaaagaggccgctcgatgtatgcggagggactttgtcaaacacctgaaaaagaaactgaaaaggatgatctag

SEQ ID NO: 216895 - DNA, 570 bp, synthetic construct
  misc_feature 1..570: note = Description of Artificial Sequence: Synthetic coding sequence
  source 1..570: mol_type = other DNA
atgactgacaaaacagaaaaagtggccgtggatccagaaacagttttcaagcggccacgggagtgcgacagccccagctaccagaagagacaacggatggctctgctggccagaaagcaaggcgcaggtgactcgttgatcgctggtagtgcaatgtcaaaagaaaagaaactgatgactggacacgctatcccccctagtcagcttgacagtcagatcgacgacttcacagggttctctaaggaccgcatgatgcagaaacctggctccaacgccccagtgggtggaaacgtcacctcatcgttcagtggagacgatctcgagtgccgtgaaacagccagctctcctaaatcacagcaggagatcaatgctgacatcaagcgcaaactggtgaaagagttgaggtgtgttggccagaagtacgaaaagatttttgagatgctggagggcgtgcaaggtcctaccgctgtgcgcaagcgttttttcgagagcatcattaaggaggcagctaggtgcatgcgacgggactttgtgaagcacctgaagaagaagctgaaacggatgatatag

SEQ ID NO: 216896 - DNA, 570 bp, synthetic construct
  misc_feature 1..570: note = Description of Artificial Sequence: Synthetic coding sequence
  source 1..570: mol_type = other DNA
atgaccgacaaaactgaaaaggtggcagtcgacccagaaacagtgtttaagaggccccgtgagtgcgatagtccatcgtaccaaaaacgtcagaggatggccctgttggcgcgaaaacagggggctggagattcgctaatcgccggatcagccatgagcaaagccaagaagctgatgaccggtcacgccatccctccgtctcagctcgactctcagatcgacgacttcaccggtttctccaaagaccgaatgatgcagaagccaggctctaacgcacccgtaggtggcaacgttactagtagtttcagtggagacgacctagagtgtcgcgaaacggcgtcatctcccaagtcccagcaggagataaatgcagatatcaagcgcaagctggtcaaggagcttagatgtgtcggacagaagtatgagaaaattttcgagatgctggagggagtgcagggacccactgctgtaagaaagcgcttctttgaaagtataattaaggaggcagcccgatgcatgaggcgggatttcgtcaaacacctaaagaaaaaactgaagcgaatgatttag

SEQ ID NO: 216897 - DNA, 570 bp, synthetic construct
  misc_feature 1..570: note = Description of Artificial Sequence: Synthetic coding sequence
  source 1..570: mol_type = other DNA
atgacagataaaacagaaaaggtggcggttgacccagagactgtcttcaagagacccagagagtgcgacagcccctcttaccagaaacggcaaaggatggccctcttagcccgtaagcagggcgctggggatagcttaatagccggatccgccatgtccaaagctaagaaactgatgacaggtcatgcaatccccccttcacagctcgatagccagatagacgactttactggattctccaaggacaggatgatgcagaagccaggcagtaacgctcctgtagggggaaacgtaacatctagcttctccggggacgacctggagtgccgtgaaaccgcctcaagcccgaagtcgcagcaggagatcaacgccgatatcaagcgcaagctcgtgaaggagctgcgatgtgttggacaaaagtatgaaaaaatctttgagatgcttgagggtgtacagggccctaccgctgtgaggaagcgtttcttcgagagcataatcaaggaagctgctcgctgcatgagacgggatttcgtgaagcatttaaagaagaagctgaaaaggatgatctag

SEQ ID NO: 216898 - DNA, 570 bp, synthetic construct
  misc_feature 1..570: note = Description of Artificial Sequence: Synthetic coding sequence
  source 1..570: mol_type = other DNA
atgacagataagaccgaaaaggtggcagtggatcccgagacagtgttcaagcggccacgcgagtgtgattctccgtcctaccaaaagaggcaaaggatggcgctgctcgcccgtaagcaaggcgctggagatagtctcattgcaggctccgcaatgtccaaagagaagaaacttatgacagggcatgctatcccaccaagtcaactcgattcccagatcgatgattttaccggattttccaaggacggaatgatgcaaaagcccggatccaatgcacctgtgggcggtaacgttacatctaacttctccggggacgatctggaatgtcgagggattgcatcctctcccaaatcacagcaagaaatcaacgctgacataaaatgtcaggtggtcaaagagattaggtgtctcggcagaaaatacgagaaaatctttgagatgctcgaaggcgtccaggggcctacagcagtcagaaagaggttctttgagtctatcattaaagaagctgcacgttgtatgcgcagggactttgtgaagcacctcaagaagaagcttaaacggatgatctag

SEQ ID NO: 216899 - DNA, 570 bp, synthetic construct
  misc_feature 1..570: note = Description of Artificial Sequence: Synthetic coding sequence
  source 1..570: mol_type = other DNA
atgacagacaagaccgaaaaggttgcagtggacccagagacagtctttaaacgacccagggagtgtgattccccgtcatatcagaagcggcagcgcatggccctattggccagaaaacagggcgctggggactccctgattgctggatcagccatgagtaaggagaaaaaacttatgactggccatgcaataccaccttcacagctcgattcccagatagacgatttcaccgggtttagtaaggatgggatgatgcagaagccaggctcgaacgccccagtaggcggaaatgttacatccaacttctccggagacgacctagagtgccggggaatcgcttcatcacccaaatctcagcaggagatcaacgctgacattaagtgtcaggtggtgaaggaaatccgatgcctaggcaggaaatatgagaagattttcgagatgctagaaggcgtgcagggccctaccgctgtaagaaaacggttcttcgagagcattattaaagaagccgcaagatgcatgagacgggattttgttaagcatttaaagaaaaagctgaagaggatgatttag

SEQ ID NO: 216900 - DNA, 570 bp, synthetic construct
  misc_feature 1..570: note = Description of Artificial Sequence: Synthetic coding sequence
  source 1..570: mol_type = other DNA
atgactgacaaaaccgagaaggttgcggtggatcctgagaccgtgtttaagcgccctcgggaatgtgactccccaagctaccagaagcgccaacgcatggctctgctcgcaaggaagcagggcgcaggggatagtctgatcgcaggatccgcgatgagcaaagcgaaaaaattaatgacgggacatgccatccctccttcccagctggactcccagattgacgatttcaccggcttttctaaggatagaatgatgcagaagcccggttcgaatgctcccgtgggaggcaatgtgaccagctcattctcaggagacgacctggagtgtcgcgaaactgcgtcctccccgaaatcacagcaagagattaatgctgatattaaacggaagctggtgaaggagttacggtgtgtcgggcagaaatacgaaaagatcttcgagatgctggagggcgtccagggccctacagcggttcggaagagattttttgagtctatcatcaaggaagctgcccgatgcatgcgcagagactttgtgaagcatttaaaaaaaaagctcaagcgaatgatctag

SEQ ID NO: 216901 - DNA, 570 bp, synthetic construct
  misc_feature 1..570: note = Description of Artificial Sequence: Synthetic coding sequence
  source 1..570: mol_type = other DNA
atgaccgataagaccgagaaagtggccgtggacccagaaactgtattcaagagacctagggaatgcgacagccccagctatcagaagaggcagcgtatggcactgctggctaggaagcagggtgccggtgattccttgatagctggctctgctatgtctaaggccaagaagctgatgacagggcacgccattcctccgagtcagctcgacagccagattgatgactttacgggattctctaaagatagaatgatgcagaaaccaggcagtaacgcccctgtcggcggaaatgttacctcctcgtttagtggtgatgacctggagtgccgtgagacagctagtagtcctaagagccagcaagaaattaatgctgatataaagagaaaacttgtgaaagaattaaggtgtgtggggcagaaatatgagaagatatttgagatgctcgagggagtgcaggggcctaccgcagtgcgcaagagattttttgaatccattatcaaagaggccgctcgatgtatgaggcgggacttcgttaagcatcttaagaaaaaattaaagcgtatgatctag

SEQ ID NO: 216902 - DNA, 867 bp, synthetic construct
  misc_feature 1..867: note = Description of Artificial Sequence: Synthetic coding sequence
  source 1..867: mol_type = other DNA
atgtcggctaccggcgatcggcatcccacccagggcgaccaggaagcgcctgtgagtcaagagggtgctcaggccgaggctgccggagcgggaaatcaggagggcggtgacagtggtccggatagcagcgatgtggtcccggctgccgaagtagtcggagtggctggtccggtggagggactgggggaggaggagggggaacaggccgctggtctggctgcggttccgcgagggggttccgccgaagaggattctgacatcggcccagccactgaagaagaggaagaggaggagggcaatgaggcggctaacttcgacttggcagttgtggccaggcggtatccagcatctggaatccacttcgtgttactggacatggtacactccctcttacatagactgagtcataacgaccacatcctgatcgagaaccgccagttatctcggctgatggtaggccctcatgcggctgcccgaaacctctggggaaacttgcccccacttttgctccctcagcgtcttggcgcaggggctgccgcacgggctggggagggcctgggcctaattcaggaagccgcaagcgtgcccgagccagctgtacctgctgacctggccgagatggctcgagagccggctgaggaggccgcagaggagaaactatctgaggaggccaccgaggaacccgacgctgaggaaccagccaccgaggaacccaccgcacaggaagctaccgcccctgaggaggtgaccaaatctcagccagaaaaatgggatgaggaggcccaggatgcagcaggggaggaggagaaggagcaggaaaaagagaaagatgcagaaaacaaggtgaaaaactccaaaggcacctag

SEQ ID NO: 216903 - DNA, 867 bp, synthetic construct
  misc_feature 1..867: note = Description of Artificial Sequence: Synthetic coding sequence
  source 1..867: mol_type = other DNA
atgtccgctactggcgaccgccaccccacccagggagaccaggaagctcccgtctcccaggaaggcgctcaggccgaagccgcaggagcaggaaaccaggagggcggtgattccggtcctgatagctccgatgtagtacccgctgctgaggtggtgggggtcgccggtcccgttgaggggctgggtgaagaggagggcgagcaggcggcaggcctggcagcggtgccacggggagggagcgctgaggaagacagcgacattggacctgcaaccgaggaagaagaggaggaggagggcaatgaagccgcaaactttgaccttgctgtggtcgctcggcgataccccgcatcaggcatccattttgtgctcctcgacatggtgcattcgctcctccacaggctgtcgcacaatgatcacatccttatagaaaaccggcagctatcaaggctgatggtgggtccacacgctgccgctcgcaatttgtggggtaatctgccacccctactgctcccacagaggcttggcgcaggtgccgcagcaagagcgggtgagggacttggactgatccaggaggccgctagcgtgccggagccggcagtgccagcagatctggctgagatggcacgcgaacccgctgaagaagcagccgaggagaagctttccgaagaagccaccgaggagcctgacgccgaagaacctgcaacggaggagcctaccgcccaggaagcaaccgcccctgaagaagtgaccaagtcacagcctgaaaaatgggatgaagaggcccaagatgcagctggcgaggaagaaaaagagcaagagaaagagaaggacgcagagaacaaggtcaaaaattcgaaggggacctag

SEQ ID NO: 216904 - DNA, 867 bp, synthetic construct
  misc_feature 1..867: note = Description of Artificial Sequence: Synthetic coding sequence
  source 1..867: mol_type = other DNA
atgtctgcgacaggtgatagacatcccacacagggagaccaggaagcgccagtgtcacaggaaggtgcccaggcagaggctgcaggggctgggaatcaggagggcggtgattctgggccagacagcagcgatgtcgtgcccgcagcagaagtggtgggagtggctggtccagtcgaaggtctaggcgaggaggagggggagcaggcagctgggctagctgcagttcctcggggaggttcagcggaggaggattcagatatcggaccggctaccgaggaggaggaggaagaggaaggtaatgaagccgcaaacttcgatctcgccgtggtagcacgcaggtatcctgctagcggtatccacttcgtgttgttggatatggtccacagcctgctgcacagactctctcataatgaccatatactgatcgagaatcgacagctatcgagactcatggtcggcccacatgcagctgcgagaaacctgtgggggaatctaccacctctgctgttgccccagcgactgggtgctggagccgcagctcgggctggcgagggcctcgggcttatacaggaggccgctagcgtgccagagcccgcagtacccgctgatctcgcagaaatggccagggagcccgcagaagaggctgcagaagaaaagcttagcgaggaagccacagaagagcctgacgctgaggagcctgccacagaagaaccaaccgctcaagaggcaacggcgccagaagaggtgaccaagagtcagcccgaaaaatgggatgaagaggcccaagatgctgctggtgaagaggagaaggagcaggaaaaagagaaagacgccgaaaataaggtcaaaaactctaagggaacatag

SEQ ID NO: 216905 - DNA, 867 bp, synthetic construct
  misc_feature 1..867: note = Description of Artificial Sequence: Synthetic coding sequence
  source 1..867: mol_type = other DNA
atgagtgccactggcgaccggcatcctacccaaggagaccaggaagcacccgtgagccaggagggggcacaagctgaagctgctggcgctggaaatcaggagggaggggacagcggccctgattcttccgatgtggtgccagcagccgaagttgtgggagtggctggcccagtggaagggttaggagaagaagagggggagcaggctgcaggactggcggctgttcccaggggcggaagcgccgaagaagatagcgacatcggtccagcaactgaggaagaagaagaggaggagggcaacgaggccgctaacttcgaccttgccgtggtggctagacggtatccagccagcggcattcactttgtgctgctagatatggtgcattcgttacttcatagactgtctcacaacgaccacattttaatcgagaacagacaactctcacggctgatggtggggccacacgcagctgctaggaatctttgggggaacctcccaccgcttttgcttccgcagcgcttaggcgcaggagccgctgctagagccggtgaggggctcgggctgattcaagaggcggcatccgtgccggagccggcagtcccagctgacctggcagagatggccagggagcctgccgaagaagctgccgaggagaaactatctgaagaagcaactgaggaaccagacgccgaggagcctgccactgaagaacccacagcacaagaagcaacagcacctgaagaggttactaagtcccagccagagaagtgggacgaggaagctcaggatgcagccggtgaggaggaaaaagagcaagagaaagagaaggacgcggaaaataaagttaagaacagtaaaggcacctag

SEQ ID NO: 216906 - DNA, 867 bp, synthetic construct
  misc_feature 1..867: note = Description of Artificial Sequence: Synthetic coding sequence
  source 1..867: mol_type = other DNA
atgtccgccacaggggatcgacatccgactcagggggaccaggaagcacccgtatcacaagagggggcacaagcggaggctgccggagctgggaatcaggaggggggagattcaggtccagactcgtcggatgtggttcctgcagctgaggtggtcggggtggccggtccagttgaggggctgggagaagaagagggagaacaggcggctggcttagctgctgtcccccgtgggggaagtgcggaggaggactccgatattggtcctgctaccgaggaggaagaggaagaagagggtaatgaagcagcaaacttcgacctggcagtcgtagccaggcgatatcctgcctccggcatccacttcgtgttgttagatatggtgcactcactcctccaccgcctcagtcacaacgatcatattctcattgagaaccgacaattgagtaggcttatggtaggacctcacgccgcagctagaaacctgtggggaaacctgcccccacttctgctgccacaaagactgggggcaggcgctgctgcaagagcaggagaaggccttggcctgattcaagaagctgccagcgtgcccgaacctgcagtgcctgcagacctcgccgaaatggcccgagagcccgcagaagaagcagcagaagagaaactaagcgaggaagccactgaggaaccagacgccgaagaaccagccactgaagaacctactgctcaggaggccaccgcacccgaggaagttaccaaaagtcaaccggaaaagtgggacgaggaagctcaggacgcagcaggtgaggaggagaaggagcaggaaaaagagaaggacgcagaaaacaaagttaaaaatagcaaggggacctag

SEQ ID NO: 216907 - DNA, 867 bp, synthetic construct
  misc_feature 1..867: note = Description of Artificial Sequence: Synthetic coding sequence
  source 1..867: mol_type = other DNA
atgtcagcaactggggatcgccacccaactcagggcgatcaggaggctcctgtgtcacaggagggtgcccaggccgaggcagcaggtgcaggcaaccaggagggcggtgactcaggccctgatagcagtgacgttgtgccagctgcggaagttgtgggtgtggctgggccagtcgagggactcggagaggaggaaggcgagcaggccgctggactcgcagcagtgccgcgaggaggctctgctgaggaggactctgacatcggacccgcaacggaagaggaggaagaggaggaagggaatgaggctgctaactttgacctggccgttgtggctcgacgctatccagcaagcggcatccacttcgttttactggatatggtgcacagcctgcttcaccgcctgtctcataatgaccatatcctgattgagaatagacagttgtccagacttatggttggtccccatgccgctgcgaggaatctgtggggcaatctgcctccacttctgctcccccagaggctgggcgctggtgccgctgctagagccggtgaaggactcggtctgatccaggaagctgcgagcgtaccggagcccgcagtgcccgctgaccttgctgagatggccagggagccagcagaggaagctgccgaggagaagctgtcagaagaagccacagaagagccggatgcagaggaacctgctacagaggagccaactgcgcaggaggcgactgctcctgaggaggtgactaagtcccagcctgaaaaatgggacgaagaggctcaggacgctgcaggggaggaagaaaaggagcaggagaaagagaaggatgctgagaacaaagttaagaatagtaagggtacctag

SEQ ID NO: 216908 - DNA, 867 bp, synthetic construct
  misc_feature 1..867: note = Description of Artificial Sequence: Synthetic coding sequence
  source 1..867: mol_type = other DNA
atgtcggctacaggtgatagacatccgacacagggggatcaagaggcccctgtctctcaggagggcgctcaggctgaagccgctggggctggcaatcaggagggaggagacagtggcccagacagctcagatgtggtaccagctgcagaagttgttggagtagccggtccagtggaggggcttggagaggaggagggagagcaggccgctggcctggccgcagtccctcggggtggctcagctgaggaagatagcgacattggcccagccacagaggaggaagaggaggaagaagggaacgaggccgctaacttcgacctggctgtggttgcacgtcgctaccccgcttccggaatccacttcgtcctgcttgacatggttcactcgttgctccaccgactttctcataatgaccacatactgatagagaaccgacagctgtctcggttgatggtgggccctcacgctgcagctcgcaacctgtggggcaaccttccccctctcttgctgcctcagaggctgggagccggagccgcagctagggctggagaggggttgggccttattcaagaggctgcctcggttcccgagccagccgtacctgctgacctagccgagatggcacgtgagccggctgaggaagcagccgaggaaaaactgtccgaagaggctactgaagaaccagatgccgaagagccagcaacagaggaacccaccgcgcaagaggctaccgccccagaggaggtgaccaagagccaacccgagaaatgggacgaagaggcccaggatgctgctggggaggaggagaaggaacaggagaaggaaaaagacgccgagaataaagtgaaaaattccaaaggcacctag

SEQ ID NO: 216909 - DNA, 867 bp, synthetic construct
  misc_feature 1..867: note = Description of Artificial Sequence: Synthetic coding sequence
  source 1..867: mol_type = other DNA
atgtccgcaacaggcgaccgtcaccccactcaaggggatcaggaggcccctgtgagccaggagggggcacaagccgaagctgctggagcaggaaaccaagaggggggagactcaggaccagactcatccgatgtcgttcccgctgcggaggtcgtgggcgtcgcgggacccgttgagggattaggcgaggaggaaggtgagcaggcagccggattagcggcagtgcccaggggaggctctgcggaagaggactctgatatcggcccagcaaccgaggaggaagaagaggaagagggaaacgaagcggctaactttgatttggcagttgtggcacgccgttatcccgcaagcgggattcatttcgtactcctggatatggttcacagccttctgcacaggctttcacacaacgatcacattctgatagagaacagacaactgtcaagactaatggtgggaccccacgccgcagctcgaaatctgtgggggaatctcccccctctgttattgcctcaaaggctaggggctggcgcagcggctagggcgggagaaggcctgggactgattcaggaggcagcttctgtgccggaacccgcagtcccagccgatttggccgaaatggctagggagccagccgaggaagcagcagaggagaaactctccgaagaagcgaccgaggagcccgatgcagaagagcccgcaacagaggaacctaccgctcaggaggctaccgcacccgaggaagtaaccaagagccagcctgaaaagtgggatgaggaggctcaagacgctgccggagaggaagagaaggagcaagagaaggagaaggacgcagaaaataaggtcaagaactcaaaaggaacttag

SEQ ID NO: 216910 - DNA, 867 bp, synthetic construct
  misc_feature 1..867: note = Description of Artificial Sequence: Synthetic coding sequence
  source 1..867: mol_type = other DNA
atgagtgccaccggggatagacacccaacccagggtgaccaggaggcccctgtgtcacaggaaggggctcaggccgaagcagctggcgctggcaatcaggagggtggagacagcggcccagattcaagcgacgtagtacctgccgcagaagtcgtcggagtggccggtcccgttgagggtttaggggaggaggagggcgagcaggcagccggactcgcagcagttccccgtggcggtagcgccgaggaagactctgacattgggcctgccaccgaggaggaggaggaggaagaggggaacgaggcggctaactttgacctagccgtagtggctcggaggtatcctgctagcggaatccacttcgtgctgctggacatggttcacagtctgcttcaccggctctctcacaacgatcacatcctgatcgaaaatagacagctttccagacttatggtcggtccccacgccgcagcacgaaacctctggggaaatctcccgccattactgctaccccagcgcctgggcgctggcgctgcagccagagccggtgagggcctcgggctgattcaggaagccgcttctgtgccggaacctgcagttcccgctgacctggctgaaatggcgagggagcctgccgaggaggcagcggaggagaaactgtccgaggaggctaccgaggagcccgacgcggaggagcctgctacagaagagccaactgctcaggaagcaacggcccctgaggaggtgacaaagagccaacctgagaagtgggatgaggaagcccaggacgccgcaggggaagaggagaaagaacaagaaaaggagaaagacgcagaaaacaaggttaagaatagtaagggcacatag

SEQ ID NO: 216911 - DNA, 867 bp, synthetic construct
  misc_feature 1..867: note = Description of Artificial Sequence: Synthetic coding sequence
  source 1..867: mol_type = other DNA
atgagtgccaccggtgataggcatcccacacagggcgaccaggaagccccagtgtcccaggagggtgcccaggctgaggctgctggcgctggaaaccaggagggcggagatagtggacccgacagttccgatgtggtgcctgcggcagaggttgtcggggtggcgggtccagtggaaggcctgggagaggaggagggcgagcaagctgccggactggcggctgtgccccgaggcggtagtgctgaagaggatagtgacattgggcctgcaactgaggaagaagaagaagaggaggggaacgaggcagcaaacttcgatttggccgtggtcgccaggaggtatcctgccagcggtattcacttcgtcctgctggatatggtacacagcctattgcacaggctctcacataatgaccatatccttatagagaataggcaactgagcaggttaatggtggggcctcacgcagccgcacgaaatctctggggtaacttgccaccattactgctgccacagcgcctgggagccggtgccgcagcacgagctggagagggcttggggctcatccaggaggcagcctcggtacccgagccagccgtgccagctgatttggccgaaatggccagagagccagccgaggaggcggcagaagaaaagctttccgaggaggcgacagaggagcctgatgccgaggaaccagcaactgaggaacctacagcccaagaggccacagctcccgaagaagtgacgaagtcccaacccgagaaatgggacgaggaagcccaagatgccgctggggaagaggagaaggagcaggaaaaagaaaaggacgcagagaataaagtgaaaaacagcaagggcacctag

SEQ ID NO: 216912 - DNA, 867 bp, synthetic construct
  misc_feature 1..867: note = Description of Artificial Sequence: Synthetic coding sequence
  source 1..867: mol_type = other DNA
atgtctgccaccggggataggcacccaacccagggcgaccaggaggctccagtttctcaggaaggagcccaggcggaggctgctggagccggaaatcaggagggtggagatagcgggcctgactcatccgatgtggtgcccgctgctgaagttgtgggggtggcagggcctgtcgaaggattgggggaagaggagggtgagcaagctgcagggctggccgctgtccctcggggtggctcagcagaggaagatagcgacatcggcccagccaccgaagaagaggaggaggaggaagggaatgaagccgcaaatttcgatctcgctgtggtggccagacgatatccagccagcggaatccacttcgtgctgctcgatatggttcactcactcttgcaccggctgtctcataatgaccatatcctcattgaaaacagacagctatcacgtttgatggtcggccctcacgccgcagctaggaatttgtggggtaacctacccccattgctgctcccacagcgactgggagccggtgccgcagccagagcaggagaaggcctcgggttgatccaggaggcagcaagcgtgcctgaaccggcagtgcctgccgacctcgccgaaatggcgagggaacccgctgaggaagccgctgaagagaagcttagtgaggaggctacagaagagccagacgctgaggagcccgcaacggaagagcctacagcacaggaggctactgcccctgaggaagtgaccaaatcccagcctgaaaagtgggatgaggaggcccaggacgcagcaggggaagaagaaaaggagcaggagaaggaaaaggacgcagaaaataaagtcaagaactccaagggtacatag

SEQ ID NO: 216913 - DNA, 867 bp, synthetic construct
  misc_feature 1..867: note = Description of Artificial Sequence: Synthetic coding sequence
  source 1..867: mol_type = other DNA
atgtctgccactggcgatcggcacccaactcagggtgatcaggaagccccagtgtcccaggagggagcacaggctgaggcggcaggggcaggcaatcaggagggtggggacagcggaccagatagcagcgacgtcgtaccagccgctgaggtcgtaggcgtcgctggccctgttgagggtctcggagaggaggagggtgagcaggccgcagggttggccgcagtgcccagggggggatccgccgaggaggattccgatatcggccctgctacggaagaagaggaggaagaagagggcaacgaggccgcaaattttgaccttgcagtggtagccagaagataccctgcatcaggaattcactttgtcttgctggacatggtccactcccttctccacagattaagtcacaacgatcacatcctcattgaaaatcggcagctgagccggttgatggtgggccctcacgccgctgcgaggaacctgtggggtaacctgccgcctctgctcctgcctcaacgcctcggtgccggtgctgccgctagggcaggcgagggcttagggttaatccaggaagctgccagtgtcccagagcccgctgtgccagcagatctggcagagatggcacgtgagccggctgaagaggccgcagaagagaagctttccgaggaggcaacggaagagcctgatgcagaagagcctgccacggaagagccgacagcgcaagaagcaaccgccccagaggaagtcactaaaagccagcccgaaaagtgggatgaagaagcccaagatgctgctggagaagaagagaaagagcaagaaaaggaaaaagacgctgaaaacaaggttaagaatagcaagggaacttag

SEQ ID NO: 216914 - DNA, 867 bp, synthetic construct
  misc_feature 1..867: note = Description of Artificial Sequence: Synthetic coding sequence
  source 1..867: mol_type = other DNA
atgtccgcgactggcgaccggcacccaacgcagggcgaccaagaggcgcctgtaagtcaggaaggcgcacaggctgaggccgcaggcgctggaaaccaagaaggcggtgactccggacccgattcatcagacgtggtgccagccgctgaggtcgtaggggtggcagggcctgtggagggcctgggtgaggaggaaggggaacaggccgcagggcttgcagctgtgcctcgcggtggcagcgcagaagaggacagtgatattggccctgccactgaagaggaagaggaggaagaaggcaatgaagcagcaaatttcgacttagccgtggttgccaggagataccccgcatcagggatccacttcgtgttgttggatatggtgcattctcttctccatagactgtctcacaatgatcatatattgatcgagaatcgacaactgtcaagattgatggtcgggccacatgcagctgccagaaacttgtggggaaatctgcccccattgttgcttccccagagactcggcgctggagctgcagcaagagccggagagggcttagggctgatccaagaggctgcttctgtccctgagcccgctgtgcccgctgatctggccgagatggcacgagaaccagctgaggaagcagctgaggaaaagctttccgaggaagcaaccgaagaaccagatgcagaggagcctgctaccgaggaaccgaccgcccaggaggccaccgctcctgaagaagtgacaaagagccagcccgagaagtgggacgaagaggcacaggacgccgctggcgaggaggagaaagagcaggaaaaagaaaaagacgctgagaacaaggtgaagaattctaagggtacgtag

SEQ ID NO: 216915 - DNA, 867 bp, synthetic construct
  misc_feature 1..867: note = Description of Artificial Sequence: Synthetic coding sequence
  source 1..867: mol_type = other DNA
atgtctgctactggggaccgacaccctactcaaggcgaccaggaggcacccgtgtctcaggagggagcacaggcagaggcagccggagccggtaaccaagaggggggtgactcggggccagactcaagcgacgtagttcccgctgctgaagtagtcggtgttgcagggccagttgaaggtctgggagaggaggagggggaacaggcagctgggctggcggcagttccacgagggggatcagccgaggaagactctgacatcgggcctgctaccgaggaagaagaagaggaagaaggaaatgaagctgccaactttgacttagccgtagtggccagaagatatccagcttcaggaattcatttcgttcttctcgacatggtgcactcgctccttcaccgcctgagtcataacgatcatattttgatagaaaatcggcagctctctaggctgatggtgggaccccatgcagctgcccgtaacctttggggcaatttgcctccactgctgctgccacagaggctcggagctggagctgcggcacgtgcgggagagggactaggccttattcaggaggcagcttccgttccagaacccgcagtccccgcagacttggccgaaatggccagggagccagccgaggaggccgcagaagaaaagttgtcggaagaggcaaccgaggagcctgacgccgaagaaccagctaccgaggagccaactgcccaggaggccactgcacccgaggaggtgaccaagtcacagccagagaagtgggacgaggaggcccaagatgcagcaggcgaggaggaaaaagagcaggaaaaagaaaaagacgctgagaacaaggtcaaaaactctaagggcacatag

SEQ ID NO: 216916 - DNA, 900 bp, synthetic construct
  misc_feature 1..900: note = Description of Artificial Sequence: Synthetic coding sequence
  source 1..900: mol_type = other DNA
atgagcgccactggcgaccgccatccaacacagggagatcaggaggcacctgtaagccaggaaggcgctcaggcggaggcagctggcgcaggaaaccaggagggaggcgattcagggcctgatagcagcgatatggtccctgccgctgaggtcgttggggttgctgggccagtagagggcctcggggaggaggagggggaacaggcggcagggctcgctgccgtgccccaggggggttctgccgaagaagactctgacatcgggccagccacggaggaagaagaggaagaggaagagggtaacgaagctgccaacttcgacctggctgtcgcaactagaaggtaccctgctgctggaatcgggtttgtattcctgtacctggtgcactcgctgctcagacggttgtaccacaacgaccatatccagatagccaataggcacctgagtcgactcatggtgggtcctcacgccgctgtaccgaacctgtgggacaatccccctcttctccttttatcccagaggctaggcgcaggcgctgctgcccctgagggcgaaggactaggtctcatccaggaagccgcttctgtgcaggaagcagcatcagtccctgagcccgctgtccccgcagatctggctgagatggccagggaaccagctgaagaggccgcagatgagaaacctccggaagaggccgctgaagagaagcttacggaggaggccacagaggaaccagccgcagaggagcccacttccgaagaggcagtggcacctgaggaggtgacaaaatcacaaccggaaaagtgggacgaggaggcccaggacgccgcaggtgaagaagaaaaagaacaagaaaaggagaaggacgtggaaaacaaggtgaaaaacagcaaggggacttag

SEQ ID NO: 216917 - DNA, 1419 bp, synthetic construct
  misc_feature 1..1419: note = Description of Artificial Sequence: Synthetic coding sequence
  source 1..1419: mol_type = other DNA
atgaagtccatcttggacggcctggcagataccaccttcaggacaattaccacagatctcctttacgtaggcagtaacgatatccagtatgaggacatcaaaggagacatggcttctaaactagggtacttcccacagaagttccctttgacttcattccggggtagtccattccaagagaaaatgactgcaggggacaatccccagctcgtacccgcagaccaagtgaatattactgagttttataataagagcctatcatcatttaaggaaaacgaggagaacatccagtgtggagagaatttcatggacatcgagtgcttcatggttctaaatccctcccaacaattggctattgctgttttatctctgacacttgggaccttcacagtcctcgagaatctgctggtgctctgtgtcatcctgcacagcaggtcactgcggtgccggccatcctaccacttcattggctccctggccgtggcggacttgcttggcagtgtgatctttgtgtactcattcatcgacttccatgtgttccaccggaaagatagcagaaatgtgttcctgtttaaacttggtggcgtcaccgcatcatttaccgcatccgttggtagcctctttcttacggctatcgacagatacatatccattcaccggcctctggcctataaacggattgtcacccgaccaaaagctgtggtggccttctgcctcatgtggacaattgctatagtgatcgccgttttacccctgttgggttggaattgcgagaaattacagtccgtgtgtagtgacatcttcccacacatagatgagacatacctaatgttttggatcggcgtgaccagtgtgctccttctgtttattgtctatgcttatatgtacatcttgtggaaagcccacagtcacgcggtaagaatgatccagagaggtacacaaaagtccataatcatccatacctcagaagacgggaaggtgcaagttacaagaccagatcaggccagaatggacatcagacttgcgaagactctcgtactgatactggttgttctcatcatttgctggggccctcttttagccatcatggtctacgatgtgttcggcaagatgaataaactgataaagaccgtgtttgctttctgttcaatgctatgtctgctgaattcaactgttaatccaatcatctatgctctgcgcagcaaggatctcaggcatgcctttcgctcgatgtttccaagctgcgagggtacagcacaacccctggataatagtatgggagatagcgactgcctgcataaacacgccaataacgccgcatctgtgcatcgggcagcagagagctgtatcaagtccacagtgaagattgcaaaggtgacaatgtctgtgagtaccgacacctctgcggaagcgttgtag

SEQ ID NO: 216918 - DNA, 1419 bp, synthetic construct
  misc_feature 1..1419: note = Description of Artificial Sequence: Synthetic coding sequence
  source 1..1419: mol_type = other DNA
atgaagtcgattctcgacggactcgcggatacaacatttcgcactattacgaccgatttgctctacgtaggttctaatgacattcagtatgaggacataaaaggcgatatggcctctaagctggggtatttccctcaaaaatttcctcttacctcatttcgagggagcccttttcaggagaaaatgaccgccggagataaccctcagctggtcccagccgatcaggtaaatatcacggagttttacaataaaagtctgagttcttttaaggagaacgaggagaacatccagtgcggagagaattttatggacatcgagtgcttcatggtattaaatccatcgcagcaattagctatcgccgtcctgtctctgacacttggaaccttcaccgtgctggagaacttgttggtactctgcgtgatcctccacagcagatcactgcgctgcaggccatcttaccacttcatcggctcacttgccgtggccgacctgctgggcagcgttatcttcgtatacagcttcatagactttcacgttttccatcggaaagacagtaggaatgtgttcttgtttaaacttggaggcgttaccgcatcatttacagcctctgttggatccctgtttctgaccgcaatcgaccgctatatctccattcaccgcccactcgcatataagaggatagtgactcgcccaaaggctgtagtggccttctgcctgatgtggaccatcgctattgtgatcgccgtacttccactgctcggatggaactgtgagaaactgcaatcagtgtgttccgacatcttcccacacattgacgagacttacctgatgttctggataggcgtgaccagcgtactcctgcttttcattgtgtatgcctatatgtatattctgtggaaggcacacagtcacgccgtgaggatgatccagaggggcacacaaaagagtatcatcattcacacatcggaggatggtaaagtccaagtcactcgtccggaccaggccaggatggacattcgccttgccaagacactagtgctgatcctagtcgtgcttatcatctgctggggaccccttctagcaatcatggtgtacgatgttttcgggaagatgaataaactcatcaagacggtttttgcgttctgttccatgttgtgtctgctgaatagtaccgttaatccaattatctacgctctgaggtctaaggatctgaggcatgcctttcgtagcatgttcccatcatgcgagggaactgctcagccactggataactccatgggggattctgattgcctgcataagcatgccaataatgccgctagtgtacaccgggctgcggaatcatgcatcaaatccaccgtgaaaattgccaaggtcacaatgtcagtgtctactgatacatccgccgaggctctctag

SEQ ID NO: 216919 - DNA, 1419 bp, synthetic construct
  misc_feature 1..1419: note = Description of Artificial Sequence: Synthetic coding sequence
  source 1..1419: mol_type = other DNA
atgaaaagtatcttagatggcctggccgacacaacatttaggactattaccaccgaccttctgtacgtgggatccaatgatatccaatacgaggacatcaagggtgacatggctagtaagctgggttattttccacagaagttccctctgacgtctttccggggttcacctttccaggagaagatgacagctggggataatccacagctggttccagcagatcaggtgaatatcactgagttctataataaaagcctcagctctttcaaagaaaacgaggaaaacatccaatgtggggagaacttcatggatatcgagtgttttatggttctgaacccctcacaacagctagcaatcgcggttctttccctgaccctcgggacctttacagtgctggaaaatctgttggtgctctgtgtgatcctccactctcggtcccttcggtgtcggccaagctaccattttatcgggtcattagccgtggctgacctgttaggatcagtcattttcgtttactctttcatagattttcatgtgttccaccggaaagactccagaaatgtatttcttttcaaactgggcggtgtgaccgcttcctttacagcctcggtcggctctctctttttaacggctattgaccggtacatctctatccatcgcccattagcctacaagcgaattgtgacacgtcctaaagcagtggttgcattttgcctgatgtggaccatcgcgattgtgatcgctgtgctccctttgcttggctggaactgcgagaagcttcagtcagtgtgttctgacatctttccacacatagacgagacctacctgatgttctggataggcgtcacaagtgtcctactgctgtttatcgtttatgcttatatgtatattctctggaaagcacactcacatgcagtgcgaatgattcagagaggaacccagaaaagcattattatacacacaagcgaggacggcaaggtccaggtcaccaggccagatcaggcgcgaatggatattagactggcaaaaaccctcgtccttattcttgttgtgttgatcatttgttggggcccactgctggctattatggtgtacgacgtgttcggcaagatgaataaattgataaaaaccgtattcgccttttgcagtatgctttgtctgctgaacagcacagtcaaccccatcatctacgcgttaagaagcaaagatttgagacacgcctttaggagtatgtttcccagttgtgagggaaccgcacaacccctcgataacagtatgggtgacagtgactgtctgcataagcacgctaacaacgccgcttcagtgcacagggctgccgagagctgcatcaaatctaccgtaaagatcgcgaaggtaactatgtcagtgtccacagatacgtcggccgaagctctctag

SEQ ID NO: 216920 - DNA, 1320 bp, synthetic construct
  misc_feature 1..1320: note = Description of Artificial Sequence: Synthetic coding sequence
  source 1..1320: mol_type = other DNA
atgaagtcaatacttgacgggctggccgacacgacctttagaacgatcacgaccgatctcctggggagtcctttccaagaaaagatgaccgccggagacaatccccagctggtcccagccgatcaggtgaatataactgaattttacaataagtcactgagttcattcaaagagaacgaggaaaatatacagtgtggcgagaacttcatggacatcgaatgttttatggttttgaacccatcccagcaattagccatcgccgtcctgtctctgaccctgggaacattcaccgtgctcgaaaacttgctggtgctgtgcgtcattctgcatagcaggtctctcagatgtcggccaagttaccatttcatcggatcactcgccgttgccgatctgctcgggagtgttatcttcgtgtatagctttatcgattttcacgtgttccacaggaaagactcaaggaacgtcttcctcttcaagttgggcggtgtaaccgcctccttcacagcgagcgtggggagtctgtttctgaccgctattgaccgatatatttccatccatcgcccactggcctataaaaggatcgtcacacgcccaaaggccgttgttgccttctgtctcatgtggactatagcaattgtgatcgctgttctgccactgcttgggtggaattgcgagaagcttcagagcgtctgcagtgatatattccctcacatcgatgagacttatctgatgttctggataggcgtcacaagcgttctgctgcttttcatcgtgtatgcgtacatgtacattctttggaaagcccacagccacgccgtccgtatgatccaacggggaacccagaagtccatcatcatccacacaagcgaagacggcaaagtccaggtcacacgaccagatcaggctcggatggacatcaggttggccaaaaccctggtgctgatccttgtggtgctcatcatatgctgggggccactgctggccatcatggtatacgacgtgtttggcaaaatgaacaaactaatcaaaaccgtatttgctttctgcagtatgctctgccttctgaacagcactgtgaatcccattatctacgctctgcgatctaaagacctgcgacacgctttcaggtctatgttcccctcatgcgaaggaaccgcacaacccttggacaacagcatgggtgatagcgactgcctgcataagcacgcaaacaacgcagctagtgtgcacagggccgctgagtcctgcatcaagagtactgtgaagattgccaaggtgacaatgagcgtaagtactgacacatccgccgaagccctttag

SEQ ID NO: 216921 - DNA, 1419 bp, synthetic construct
  misc_feature 1..1419: note = Description of Artificial Sequence: Synthetic coding sequence
  source 1..1419: mol_type = other DNA
atgaagagcattctggacggtctggctgacactaccttcagaaccatcacgaccgacctgctttacgttgggagcaacgatatacagtacgaagatattaagggagacatggcctcaaaactcggttatttcccccagaagttccccctgacctcattccgcggaagtccgttccaggaaaagatgacagccggagataacccccagcttgtccctgcggatcaggtcaatatcacggaattttataataagagtttatctagttttaaagagaacgaagagaatatccaatgcggcgagaattttatggatattgagtgcttcatggtgctgaacccgagtcaacagttggctatcgcagtgcttagcctgactctgggtactttcacggtgctggaaaacctgctagtcctgtgtgtgattctccatagcagaagtctgcggtgcaggcccagctaccattttataggaagcttggctgttgcagacctgcttggctcagtcatcttcgtatactctttcatcgacttccacgtattccatcgcaaggacagtaggaacgtgttcctgtttaagctaggcggtgtcacagcgtcattcactgcgagcgtgggttctttattccttacggctatcgaccgctatatctcaatccatcgacctttggcctacaaacgcatagtaactcggcctaaagccgtggtagccttttgtttgatgtggacaattgctatcgtgattgctgtgcttcctctcctcggatggaattgcgaaaagctgcagtccgtgtgctcagatatctttccccacatcgacgagacctacctgatgttttggatcggagttacttccgtgctgctcctgtttattgtgtacgcctacatgtacatcttatggaaagcacactcacacgcagtgcgcatgatccagcggggaacccagaaaagcataattatccacacatccgaggatggcaaggtacaggtgacccggcctgatcaggctagaatggacatcaggctggctaaaacgctcgtgctcatcctcgttgttctgattatctgttggggccctttgctcgctatcatggtgtacgacgtcttcggaaaaatgaacaagcttattaaaactgtgttcgccttttgtagtatgctgtgcttgttaaacagcacagtcaatcccataatctacgcccttagaagcaaggatctgcgccatgcctttcgtagtatgtttccaagctgcgaaggaaccgctcagcctctggataatagcatgggcgacagcgactgtcttcacaagcacgcaaataacgctgctagtgttcaccgggctgcagagtcttgcattaagtcaaccgtcaagattgcaaaggttactatgagcgtctcaacagatacctcagccgaggctctgtag

SEQ ID NO: 216922 - DNA, 1419 bp, synthetic construct
  misc_feature 1..1419: note = Description of Artificial Sequence: Synthetic coding sequence
  source 1..1419: mol_type = other DNA
atgaaatcaatcttggacggcctggccgacactactttcagaaccatcacaaccgatctcctctacgtcggctctaatgatatacagtacgaggatataaaaggagatatggcctcgaaactcggctacttcccccagaaatttccacttacaagctttcgtggtagcccatttcaggaaaaaatgaccgccggagacaacccgcagcttgtgccagcagatcaggtgaacatcacggaattctacaacaaaagcctctcttccttcaaggagaatgaggagaacatccagtgcggagagaacttcatggacattgaatgcttcatggtgctcaacccatcccaacagcttgctatcgccgtcctcagcttaacgctcggcaccttcactgtgctggaaaatctccttgtgttgtgcgtcatacttcattctaggtctctacggtgtaggcccagctaccatttcatcggctcccttgctgtggctgacttactcggctccgtcatctttgtgtacagtttcattgattttcatgttttccaccggaaggacagtagaaatgtgtttctctttaagctggggggtgtcactgccagtttcactgcaagtgtcgggtcactgttcctgactgccatagacaggtacatttctatccatcgaccattggcgtacaaacggatagtcaccaggcctaaggcggtcgttgccttttgtctgatgtggaccattgcgattgtcattgccgtgttgccactgctagggtggaattgcgaaaagctccagagtgtgtgcagtgacatattcccacacatcgatgaaacgtatttgatgttttggattggtgtaacatcagtgctcctgcttttcatcgtgtatgcttacatgtatatcttgtggaaggcccatagtcatgcggtgcgtatgatccagagagggactcaaaagtctataattatacatacaagtgaagatgggaaggtccaggtgaccagaccagaccaagctcgcatggacattaggctggctaaaactctggtcctgattctggtcgttctgattatctgctggggacccctgttggccattatggtgtacgacgtatttggaaaaatgaataaactaattaagaccgtgttcgctttctgcagtatgctttgtttgctaaattctactgttaaccctattatttacgccctgcgatccaaggacctgagacacgcctttcgatccatgtttccaagctgcgagggcacagcacagcctctagacaattccatgggtgatagtgattgtctccacaaacacgccaacaatgccgcttccgttcatcgcgctgccgagtcttgtatcaaatctactgtcaagattgccaaggtgacaatgagtgtgagcactgacacctcagctgaggcgctgtag

SEQ ID NO: 216923 - DNA, 1236 bp, synthetic construct
  misc_feature 1..1236: note = Description of Artificial Sequence: Synthetic coding sequence
  source 1..1236: mol_type = other DNA
atggcccttcagattccccctagcgcaccctcgcctctgacctcttgcacctgggctcagatgactttcagcacgaaaacttctaaagagaatgaggagaatattcagtgtggcgagaacttcatggatattgagtgttttatggtcctgaatcccagtcaacagcttgctatagccgtcttgtccctcaccctggggacattcaccgtgttggagaatctgttggtactttgtgtgattttacatagcagatcattaagatgtagaccatcctaccacttcattggatccttggcagtagctgatctgcttgggtcagtgatattcgtgtactccttcattgactttcatgtattccataggaaggactcaaggaacgtttttctcttcaagttgggcggagtcaccgcgtccttcaccgcatccgtgggaagcctgttcctgaccgctattgatagatatatttccatccatcgtcccctggcatataagcggatcgttaccagaccaaaggcggtcgtcgctttctgcctgatgtggaccatcgcgatcgtgatcgcagtgcttccattgttgggctggaattgcgagaagctccagagtgtctgttctgatatatttccacacatcgatgagacgtatctaatgttctggattggagtcacttccgtcttactgctgtttatagtttatgcctatatgtacatcctgtggaaggcccactctcatgccgttcggatgatccagcgaggcacccagaaatccattatcattcacaccagtgaagacggcaaagttcaggtgactcggcctgaccaggctaggatggatattagactggcaaagaccctcgtgcttatcctggtggtgctgatcatttgttggggcccactcttagcaataatggtgtacgacgtatttggaaaaatgaataaactcattaagaccgtgttcgctttttgctctatgctgtgtctgctgaattcaaccgtgaaccctatcatttatgcacttagaagcaaagacctgagacacgcatttaggagcatgtttccttcttgcgaaggcactgcacagcccctggataacagcatgggcgattcagactgtctgcataagcacgctaacaacgccgctagtgtgcatcgcgctgctgagagttgcattaagagtactgtgaaaatcgctaaagtcactatgtccgtctccacggacactagcgcagaggctctctag

SEQ ID NO: 216924 - DNA, 1419 bp, synthetic construct
  misc_feature 1..1419: note = Description of Artificial Sequence: Synthetic coding sequence
  source 1..1419: mol_type = other DNA
atgaagtccatcctggatggactggctgacaccacatttagaaccattaccaccgacctgctttatgttgggtcgaatgatattcagtacgaagacattaagggggacatggcttcaaagctgggttattttccccagaaattccccttaacaagctttcgcggttcacccttccaggaaaagatgactgcaggcgataacccccagctggtccctgccgaccaggtcaatatcaccgaattctacaacaagtcactcagtagcttcaaagaaaacgaagagaatatccagtgcggggagaatttcatggacatcgaatgcttcatggtgctcaacccttcgcagcaactggcaattgcggtgttatcactgacccttgggacctttacggtgctagaaaatttgctcgtgttgtgcgtgatcctgcatagtcggtccttgcgttgcaggccaagttatcacttcattggatcgctcgccgttgcagatctcctgggctctgtcatattcgtgtacagcttcattgacttccacgtatttcatcggaaggactcgcgcaacgtgttcctgttcaagctaggcggtgttaccgcatctttcacggcctccgtggggtccctctttctgaccgccattgatcgttacatctcaatccacaggcctctcgcatacaaacgcattgtgaccagaccgaaggccgtcgttgctttttgtctaatgtggaccatcgccattgttatcgctgttttgcctttactgggctggaattgcgaaaaactgcagtctgtgtgttcagatatctttcctcatattgacgaaacctatctcatgttttggatcggcgtaacaagtgttttactcttattcatcgtgtatgcctacatgtatatcttgtggaaagcgcactcacatgctgtcagaatgatccagcggggtacacagaaatccatcatcatccatacctctgaagatggtaaggtgcaagtgacacggcctgaccaagcgaggatggatattcgattggcgaagaccctggttctgatcttggtggtgctgatcatctgttggggcccactgctagccataatggtgtacgatgtgtttggaaaaatgaataagctaattaaaacagtgtttgcattttgtagcatgctgtgtctgttaaacagtacggtaaaccccataatatacgcattaaggagcaaagatctgaggcacgcttttaggtccatgtttccttcctgtgaagggacagctcagccactcgacaacagcatgggagactccgattgcctccacaagcacgcgaacaatgctgcctccgtgcatagagccgctgagtcctgcatcaagagcactgtcaagatcgctaaggtgacaatgtccgtgagtactgacactagtgcggaagccctgtag

SEQ ID NO: 216925 - DNA, 237 bp, synthetic construct
  misc_feature 1..237: note = Description of Artificial Sequence: Synthetic coding sequence
  source 1..237: mol_type = other DNA
atgaagagtatactggatgggctagccgacaccacattccggacgatcacaaccgatttattatacgttggaagcaatgacatccagtacgaggacatcaagggtgatatggcttccaaattaggctactttcctcaaaagttccccctaacttcttttagaggaagtccttttcaggaaaaaatgaccgctggggataacccccagctcgtgcctgcagaccaggttaatatctag

SEQ ID NO: 216926 - DNA, 1083 bp, synthetic construct
  misc_feature 1..1083: note = Description of Artificial Sequence: Synthetic coding sequence
  source 1..1083: mol_type = other DNA
atggaagagtgttgggtgacagagatagccaatggatctaaagatggacttgacagcaatcctatgaaagattacatgatccttagtggtcctcagaaaacagccgtggctgtgctctgtaccttactgggactgctttcggccctggaaaatgtggcagtattataccttatcctgagcagccatcagctgaggcggaaaccatcctacctcttcatcggcagcttagccggagccgactttctggcttctgtggtatttgcttgctccttcgtgaatttccacgtttttcatggagtagatagtaaagctgtgtttctgctgaaaattgggagcgttaccatgacattcaccgcatccgtggggtcgttactcctgaccgctatcgatcggtatttgtgtctccggtatccaccaagctataaagctctcctcacaagggggagagccctagtgacgctgggcatcatgtgggtgctgtctgccttagtgtcatatctccccctcatgggatggacttgttgcccacgcccatgttctgaattattccctttgatccccaacgactatctcctctcctggttgctgttcatagccttcctgttcagcggaataatctacacctacggacacgtgctgtggaaggctcaccagcacgttgcaagtctgtcaggacatcaagatcgccaagtgccaggcatggctcggatgagacttgatgtgcggctcgctaaaacgcttgggctggtgctggcagttctcctcatttgttggtttccagtactggctctgatggcccatagcctcgcaactacactatctgaccaggtgaagaaagctttcgctttctgttccatgctgtgcctgatcaattccatggtgaatcccgtgatctatgctttacgtagtggggaaatacggtcatcagctcaccactgcctggcccactggaaaaaatgtgtccgtggtttaggctccgaggcaaaggaggaagctcccagatcttctgtgacagagaccgaggccgatggcaagataacaccttggccggactcccgcgatctggatctaagtgactgttag

SEQ ID NO: 216927 - DNA, 1083 bp, synthetic construct
  misc_feature 1..1083: note = Description of Artificial Sequence: Synthetic coding sequence
  source 1..1083: mol_type = other DNA
atggaggagtgttgggtgacggagatcgcaaacggaagcaaagacggcctggactctaatccaatgaaggattatatgatattgagtgggcctcaaaaaacagctgtcgctgtcctgtgtacactattaggacttctgtccgcactggagaatgtggctgtgctgtacctcatattgagctctcaccagctgcggagaaaacctagttatctgttcatcgggtccttggcgggagcagacttcctcgccagtgtggtctttgcatgttctttcgtgaattttcacgtgttccacggcgttgattctaaggcagtattcttactgaagatcgggagtgtgacaatgacattcactgccagcgtaggaagccttctcttaaccgcaatcgatcggtacctgtgcctgcgttacccacctagctacaaagctttactgacccgcggtagggcactcgtgacactcggcatcatgtgggttctttctgctctggtctcctacttgcccctcatggggtggacatgctgccctaggccatgttcagagctatttcccctcatacccaatgactatctgctgtcttggctcctgttcatcgcctttcttttttccggcataatatacacctatgggcacgtgctttggaaggcccatcagcatgttgcgtcactgagcggccaccaggatcgacaggtgcctggaatggcacgcatgcggctggatgtgcgcctcgcgaagaccctgggccttgtactcgccgtcctccttatttgttggtttccggtcctggctctgatggcccacagtctcgcgacaaccctgtcagaccaagtgaagaaggcattcgctttctgctccatgctctgcctgatcaattctatggtgaaccccgtgatctacgctctgcggagtggagagatcagaagcagtgcacaccactgcctcgcccactggaaaaagtgtgtcagaggcttggggtcagaggctaaagaggaggcacccaggagttcggtaaccgaaaccgaagcagacggaaaaatcactccctggcctgacagcagagatctggacctgtctgattgctag

SEQ ID NO: 216928 - DNA, 837 bp, synthetic construct
  misc_feature 1..837: note = Description of Artificial Sequence: Synthetic coding sequence
  source 1..837: mol_type = other DNA
atggacagtatgcccgaacccgctagtcggtgcctgcttctgctgccgcttctgctgctgctccttttgctactgcccgcaccagaactcggcccatcccaggccggagccgaagaaaatgattgggttcgcctccccagtaaatgcgaagtatgcaaatacgttgccgttgagctgaagtcggctttcgaggaaaccggaaaaactaaggaggtcatcggtactgggtatggcatcctggaccagaaagcatctggagtcaagtacacaaaatctgacctcaggcttatagaagtgactgagactatttgcaaaaggctcctcgattactcgctgcacaaggaacgcactggttccaaccgctttgctaaaggcatgtcagagacctttgagaccttgcataatctggttcacaagggggtcaaggtggtgatggacatcccctatgagctctggaatgagacctcggcagaggtggccgatctgaaaaagcaatgtgatgttcttgtggaggagttcgaagaggtcattgaagactggtaccgcaaccatcaagaagaggaccttactgagttcctctgtgcgaatcacgtgctcaagggtaaggatacctcatgcctggctgaacagtggagcggcaagaaaggagacaccgccgctctggggggtaaaaagtctaagaaaaagtccagcagagcaaaggcagctggaggtaggagctcctcttcaaagcagcgtaaagagttgggtggcttagaaggagaccccagccctgaggaagatgaagggatccagaaagctagtccactaacacacagtccaccagatgaactttag

SEQ ID NO: 216929 - DNA, 165 bp, synthetic construct
  misc_feature 1..165: note = Description of Artificial Sequence: Synthetic coding sequence
  source 1..165: mol_type = other DNA
atggacagcatgcctgagcccgcaagcaggtgcctgctcctgctcccactgctcttgttgctcctcctcctcctgcccgctccggagctagggccatcccaagccggagccgaggaaaacgattgggtgcgcctcccttccaagtgcgagggaacttgcgggtag

SEQ ID NO: 216930 - DNA, 747 bp, synthetic construct
  misc_feature 1..747: note = Description of Artificial Sequence: Synthetic coding sequence
  source 1..747: mol_type = other DNA
atgggccctgttagactcggcatccttttgtttctgtttctcgcagtgcacgaagcttgggcaggaatgcttaaggaagaggatgacgacactgagaggcttcccagcaagtgcgaggtgtgtaaattgctcagcactgagttgcaggccgaactgtctcggaccggccgttctagagaggtgctggaactgggccaggtcctcgatacaggcaagaggaagcggcatgtgccttattctgtgtcagaaactaggctggaggaagccttagagaatttgtgtgaaagaatccttgactattccgtccatgccgaacgaaaagggtcgctcagatatgccaagggtcagagtcagactatggctacactgaagggcttggttcagaagggggtgaaagttgatctgggtatccctctggaattgtgggacgaaccctctgtggaggttacatatctgaagaaacagtgtgaaaccatgctggaggagttcgaggatattgtgggcgactggtactttcaccaccaggaacagccgctgcagaatttcctatgcgagggtcatgtattgccggcagctgaaacagcatgcctgcaggagacctggactggcaaagaaattacagatggggaggagaagacagaaggcgaagaagagcaggaagaagaagaagaagaggaggaagaagaaggcggtgataaaatgacgaagaccggttcacaccccaaactggacagggaggatctgtag

SEQ ID NO: 216931 - DNA, 798 bp, synthetic construct
  misc_feature 1..798: note = Description of Artificial Sequence: Synthetic coding sequence
  source 1..798: mol_type = other DNA
atgcgcgaagaaatgtccctgggctgccaggaggcttttgagatctttaagcgggatcatgcagactccgttaccatcgatgacaacaaacagatcctgaaacagaggttcagcgaagcaaaggcacttggagagtctataaacgaggctcgcagcaaaataggacacctcaaggaggagattacccagcgtcatatccaacaggtagcactcggcatttctgaaaacatggcagttccactcatgcctgaccagcaagaggagaaactgcgaagtcaactggaagaagaaaaacgtaggtacaagacaatgttcacacggctcaaagccctgaaggttgagatagaacaccttcagctcctcatggataaggccaaagtcaaattgcagaaagaattcgaggtctggtgggccgaggaggcaacgaatctgcaggtgaatagtccggctgtaaactccctggaccacaccaagccctttctgcagacaagtgactctcagcatgagtggtctcagctgctgagtaacaagtcttctggtgggtgggaggttcaggatcagggcacaggcaggttcgacgtatgtgacgtgaatgcgagaaagatcttgccaagtccctgcccttccccgcatagccaaaagcagtccagtacctccacgccattagaggatagtattcccaagcggcctgtgtctagcattccactaactggagattcacagaccgactctgatattatagcgtttattaaagccagacagtcgatccttcagaagcaatgcctggggtcgaactag

SEQ ID NO: 216932 - DNA, 1185 bp, synthetic construct
  misc_feature 1..1185: note = Description of Artificial Sequence: Synthetic coding sequence
  source 1..1185: mol_type = other DNA
atggctaacatgcaaggacttgttgaacgactcgagcgggcagttagcagactggaatctctgtctgctgaaagtcatcgtcctcctggcaattgcggcgaggtgaacggcgttatcgctggcgtggccccatcggtggaagcattcgacaaattgatggactcaatggtggccgagttcctgaagaacagtcgaatccttgcaggtgacgtggaaactcacgccgagatggtgcacagcgcctttcaggcacagagggccttcctcctgatggcttcacagtaccagcagccccacgagaatgatgtggccgctcttcttaagcctatttcagagaagatccaggaaatacagacctttcgggagagaaatcggggaagcaacatgtttaatcacctctcggctgtgagcgagagcatccctgctctcggttggattgccgtcagccctaaaccgcctcctctcccgccacctggacctccccctttattcgagaatgaaggaaaaaaagaggagtcgtccccctctagaagcgctctgtttgcccagctgaaccagggcgaagcaattacgaagggcctaagacacgtcacggatgaccagaagacctacaagaatcctagtttgcgcgctcagggagggcaaacacagagcccaaccaagtcgcacacaccctcacccacaagtccaaaaagctatccatcacagaagcacgcacctgtcttagagctcgagggcaagaagtggagagtcgagtatcaagaggatcgcaatgatctggtcatctctgaaacagagctgaaacaggtcgcttatatcttcaaatgcgagaaatctacaattcaaatcaaaggcaaagtgaattccattatcattgacaactgcaaaaaactgggactggtattcgacaatgtcgtgggaatcgtggaagtgataaacagccaggatattcagatacaggttatgggacgggtccctacaattagtattaacaagactgagggctgccacatatacttgtccgaagatgctctggattgcgaaatagtgtcagccaaatcatctgagatgaacattcttataccgcaggacggcgactatagggagtttcccatcccagagcaattcaagacagcctgggatggttcaaaactcatcaccgaaccagccgagatcatggcgtag

SEQ ID NO: 216933 - DNA, 597 bp, synthetic construct
  misc_feature 1..597: note = Description of Artificial Sequence: Synthetic coding sequence
  source 1..597: mol_type = other DNA
atgaaactgtattccctgtcagttctttataaaggcgaggctaaagttgtccttctgaaggcagcatacgatgttagtagtttctcctttttccagcgctcaagcgttcaggagttcatgacctttacctcacagttaatcgttgaacgttcctcgaaggggactcgcgcatcggtgaaggagcaggattacctatgtcatgtgtacgtccgcaacgattccctggctggcgttgtgatcgctgacaatgagtacccatcgagggtcgcgttcacacttctggagaaagtgctggatgagttcagtaaacaggtggaccggatagattggccggtcgggtctcctgctacaatccattacccagctctggatgggcatctgagccggtaccagaacccaagagaggccgaccctatgaccaaagtgcaagccgagcttgacgagactaagattatactccacaataccatggagtcactgctggaacgtggcgaaaaactggatgacttggtctccaaatctgaggtgctcggtacacagtcgaaagctttctataaaaccgcgagaaagcaaaattcatgttgcgcgatcatgtag

SEQ ID NO: 216934 - DNA, 3036 bp, synthetic construct
  misc_feature 1..3036: note = Description of Artificial Sequence: Synthetic coding sequence
  source 1..3036: mol_type = other DNA
atgcagaagccctctggacttaagcccccaggccgtgggggtaaacactcatctcccatgggacgcacatccaccggtagcgctagctcttcagcagccgtggcggcatcatctaaagaagggagcccactgcacaaacagagtagcgggccaagtagcagcccagcagctgccgcagcccctgagaaacctgggccaaaggcagccgaggtcggcgatgacttcctgggggatttcgtggtaggtgagagagtgtgggtgaatggggttaagccaggtgtggtccagtatctaggagaaacacagttcgccccaggccagtgggccggagttgttctggatgaccctgtgggcaagaacgatggcgcagtggggggagttagatacttcgaatgccccgcactgcaggggattttcacgcggccatctaaacttacacgtcagcccacagccgaaggatccggatctgacgcacattccgttgaatcgctgactgcccagaacctgtcactgcactctggcactgccacaccccctctgacgagccgagtcattccacttagggagagtgtcctgaactcatccgttaagacaggcaatgagtccgggagcaacctgtccgacagtggatccgtgaagaggggcgagaaggatctcaggctgggggatagagtcttagtcgggggaaccaaaaccggagtggtcaggtatgtcggtgaaacagacttcgccaagggggagtggtgtggcgttgagctcgatgagcccctgggtaaaaatgatggagccgttgctggtacccgctactttcagtgcccccctaagttcgggttattcgcccctattcacaaggtaatcagaatcggctttccttctaccagtcccgcaaaagccaagaaaactaagcgtatggccatgggggtgtccgctctgacccatagccctagctcctcttcaattagtagtgtgtcttcggtggcatcaagcgttggcggtcgtccatctaggtccgggttgctgacagagactagctctcggtatgcccgaaagattagtggcacaaccgctctgcaggaagcactgaaagaaaagcagcaacacatcgaacagttactcgccgaacgggatctggaaagggccgaagttgctaaggcaacttcccatatctgcgaagtggagaaagaaatcgccctactgaaggctcagcacgagcagtacgttgcagaggccgaagagaaacttcagcgagccagattactcgttgaatccgtgaggaaggaaaaagtggacctctcgaatcaacttgaagaggagcgcagaaaggtggaagatttacaatttcgggtggaagaggaatctataaccaaaggcgatctcgagcttactaccgtcgcagagaaaagcagggtgctccaattggaggaagagctcactttgagacggggagagatagaagaactgcagcagtgtcttttgcactctggccctccccctcctgaccacccagatgctgccgaaatactaaggctacgcgagagattgctgtctgcatctaaggaacatcagcgcgagagcggagtgctcagggacaagtatgaaaaggccctgaaggcataccaggcagaggtagataagctgagggccgctaatgaaaagtatgctcaggaggtggccggacttaaggacaaagtgcagcaggctacctctgaaaatatgggactcatggataactggaagagtaaactggacagcttggcaagcgaccatcagaagagcctggaagacctgaaggctaccctgaacagtggtcccggtgctcagcaaaaggaaattggtgagctgaaagccgtgatggagggaattaagatggaacatcaactcgagctgggcaatctgcaggctaagcacgatttggaaactgcaatgcatgttaaagagaaggaggcccttcgcgaaaaactacaggaggcgcaggaggagctggcaggactccagcgtcactggagagcacaactggaagtccaggcctcacaacaccggctagagctccaggaggcccaagaccagaggcgcgacgctgaactaagggtgcacgaactcgagaaactggacgtcgaataccgtggtcaggctcaagcaatagaattcctaaaagagcaaatttctttggccgagaaaaagatgctcgactatgagaggctgcagagggcagaggcccaggggaagcaggaggtggaatccctaagagagaagctcttggtagcagagaaccggctgcaggctgtcgaggcactgtgtagcagccagcatacccacatgatagagagtaacgatatatcagaagagacaattaggacaaaggagaccgtggaaggcctgcaagataagctgaacaagagggacaaagaggttaccgcacttacatcacagaccgaaatgcttcgagcacaggtgtctgcgcttgaatcaaaatgtaaaagtggagagaagaaggttgatgctttgcttaaagagaaaaggcgccttgaggctgagctggaaactgtgtcccgtaagactcatgatgccagtggccagctggtgcttatcagtcaggagctcttacgaaaggaacggtctttgaacgaactgagagtcctgcttctggaagccaatcgccacagccccggacccgagcgagacttgtctcgcgaggtgcataaggctgagtggaggataaaagaacaaaagctaaaagacgatattcgcggactgcgagaaaaactcacgggcctggataaggaaaaaagtctctcggaccagagaagatactctcttatagaccgttcgtcagccccagaattgctccggttacagcaccagcttatgagtacagaggacgcgctccgtgatgcactcgatcaggctcagcaggtcgagaagctgatggaagctatgagatcttgtccggataaggctcagacgattggcaattcagggagtgccaacggaatccatcagcaggataaggcacaaaagcaagaagacaaacactag

SEQ ID NO: 216935 - DNA, 3141 bp, synthetic construct
  misc_feature 1..3141: note = Description of Artificial Sequence: Synthetic coding sequence
  source 1..3141: mol_type = other DNA
atgcagaagccttccggcctgaagccccctggtcggggtgggaagcacagcagccctatgggtagaacctccacaggctctgcctcgagctcggccgctgtggctgcatccagtaaagaaggatcaccactgcacaaacagagcagcgggcctagcagtagcccagctgctgccgcagcaccagagaagccaggccctaaagcagccgaggtgggcgacgatttcctgggagacttcgtggtgggggaaagggtctgggtcaatggagttaaaccaggggtggtccagtacctcggggaaactcagtttgccccaggtcagtgggccggagtggtgctcgacgatcccgtcgggaagaacgacggtgctgtggggggagtccgctatttcgagtgccctgccctccagggcatcttcacccgcccatcaaaactgactagacaaccaactgccgaaggtagcggttcagatgcccacagcgtagaaagtctcacggctcagaacttgtccctacacagcggaactgctacgccacccttgacctctagagtgattccccttagagagtctgtgttgaattcaagtgtgaaaacgggcaacgagtccgggagcaacctgtctgactcaggatcagttaaacgcggtgagaaagatctccggctcggagacagagtgctggtcggtggtactaagaccggggtcgtcagatacgtgggcgaaactgattttgccaagggggagtggtgcggcgtagagttagacgagcccctgggaaagaacgatggggctgtcgccggaaccagatactttcagtgcccccctaaattcggcctctttgccccaattcacaaagttatccggatcggcttcccttcgacgtctccagccaaggctaagaaaacaaaaaggatggcgatgggagtatctgctttaacgcactccccctcttcctcgagcatcagcagcgtgagcagtgtggcttcctcagttgggggaaggccttcccgctcaggactgctgactgagacatccagcaggtacgctagaaagatctccggcaccactgcacttcaggaggccctgaaagaaaagcagcagcacatcgaacagctgcttgcggaaagagacctcgaaagggcggaagtggcaaaggcaacctcacatatctgcgaggtggaaaaagagatagcccttcttaaggcccaacacgagcaatacgtcgcggaggccgaagaaaagctgcagcgtgctcggcttctagtcgaaagcgtacggaaggagaaagtcgacctgtcgaatcagctggaggaggagcgacgcaaagtggaggatttgcaattccgcgtggaggaggagtcaataaccaaaggggatctggagactcagacccagctggaacatgcaagaatcggcgaactggaacagagtttgctactggaaaaggcacaagctgaacggttactccgagaattagctgataatagactgacaaccgtggctgagaagagcagagttctgcaattggaggaagagctaacccttagaaggggtgaaatcgaagagctacagcaatgccttctgcattccggtccacccccacccgaccacccagatgcagcagagattctacggctcagggagaggctgctctcagcctccaaggagcaccaaagagaatcaggcgtgttacgagacaagtatgaaaaagcactaaaagcttaccaggctgaggtggataaactccgagccgcaaacgaaaagtatgcacaggaggtcgcgggtttgaaagacaaagtccagcaggccacctccgagaatatgggcctaatggataattggaagtccaagctggattcattagcatccgatcaccaaaagtcattggaagatctcaaagccactcttaactcaggtccaggagcacagcagaaagagattggcgagctgaaggccgttatggaaggaatcaagatggagcaccagctcgagcttgggaacttgcaggccaaacatgacttagagacagcaatgcacgtcaaagaaaaggaagccctacgggagaagctgcaggaagcgcaggaagagctcgctggtttgcagcggcattggcgggcacaactcgaggtgcaggcttcccagcatcgattagaactgcaggaagcacaggaccaacggagggacgccgagttacgcgttcatgaactggagaaactcgatgtcgagtaccggggacaggctcaggctatcgagtttctgaaggaacagatctcccttgcagagaagaagatgctggattatgagcgattacagagggcagaggcgcaggggaagcaggaggtggagtcactgagagagaaactgttggtggcagagaatcgccttcaggctgttgaggcgctctgttcatcccagcacacccatatgatcgagagcaatgacatctccgaggagactattagaaccaaagaaacagttgagggcctgcaagacaagctgaacaaaagggacaaagaggttacagcactgacgtctcagaccgagatgttgcgggcacaagtgagcgcgttggagtcaaagtgcaagagtggtgaaaaaaaagtggacgctctcctgaaggagaaacgcaggttggaagctgagcttgagacagtttcaagaaaaactcatgatgcgtctggccaacttgtactcatctcccaggagttgcttcgaaaagaaaggagccttaatgagttgcgagtactactactagaggctaaccggcactctcctggaccggaacgcgacctctctagggaggtgcacaaggcggaatggaggatcaaggaacaaaaattgaaggacgacattcgagggttgcgggaaaagttgactggactggacaaggagaaaagtctgtccgaccaaagaagatattcactcatcgacaggtccagcgctcccgagctgctccgcctacagcatcagttgatgagtaccgaggacgcactgcgcgatgcattggaccaagcccaacaagttgagaagctgatggaagccatgcgctcttgccctgataaagctcagactataggaaacagtggctcagccaacggaattcatcagcaggataaagctcagaaacaggaagataagcattag

SEQ ID NO: 216936 - DNA, 153 bp, synthetic construct
  misc_feature 1..153: note = Description of Artificial Sequence: Synthetic coding sequence
  source 1..153: mol_type = other DNA
ttagaagaagaaagaagaaaggtggaagatcttcagttccgcgtagaggaggaatcgatcactaagggagatttggaggccgaggatcatctgagtccagagccctccatgctcactaccgtggctgagaagtcccgcgttctccagctgtag

SEQ ID NO: 216937 - DNA, 3141 bp, synthetic construct
  misc_feature 1..3141: note = Description of Artificial Sequence: Synthetic coding sequence
  source 1..3141: mol_type = other DNA
atgcagaagcccagtgggctaaaacctcctggcagagggggtaaacacagttctccaatgggccgtacatcaacaggcagtgctagtagctcggccgctgtcgcagcctccagcaaggagggctccccactgcataagcagtctagtggaccttcaagttcccccgctgcggcagctgcccctgagaaaccaggccctaaagctgcagaagtgggggatgacttcctaggcgacttcgtggtcggagagagggtttgggtcaatggcgtcaagcctggcgttgtccaatacttgggggagacacagtttgccccaggccaatgggccggtgtggtcctcgacgatcccgtgggtaaaaatgatggggctgtggggggtgtgcgctactttgaatgtcccgctttgcaaggaatttttacccggccaagtaagcttacacggcaacccacagctgagggcagtggaagcgacgctcattcagtcgagtcactgactgcccagaatctgagtctccactcaggaacagcaacccctcccctgaccagccgcgtgatccctctgcgcgagtccgtgctgaactctagtgtcaagacaggtaatgagagcgggagcaacctgtccgattctggttccgtcaaacgcggtgagaaggacctgcgacttggagatcgggtcctcgtgggcggaactaagacaggagtcgtgcggtacgtcggcgagactgacttcgcaaaaggcgagtggtgcggggtggagcttgatgagccactggggaagaacgatggcgcagtagccggaacacgatattttcaatgtccacccaagtttggcttatttgccccaatccacaaggtgatacgcatcggattccccagcacaagtccagcaaaggccaaaaaaaccaaaagaatggccatgggcgtgtccgctttaactcacagtccatcaagtagcagcataagctctgtgagcagcgtggcctccagtgtggggggacgaccctcacggagcgggctacttaccgaaacttcctcccgctacgcacgcaaaatctcagggaccactgcactgcaggaagcactgaaggagaagcagcagcatatcgagcagctgctcgccgagagggacctagagcgagctgaggtagcgaaagccaccagtcatatttgtgaagtggaaaaagagatcgcactgctaaaggcacagcatgagcaatacgtggctgaagccgaagagaaattgcagcgggcacgtctactggttgaatctgtgagaaaggagaaagtcgatttgagcaatcagttggaagaagaaagacgtaaagttgaagatctgcagtttcgcgtcgaagaggagagtattacaaagggcgatttagagacacagactcagctggaacacgcaagaattggtgaattagaacagtctctgctgttggagaaggctcaggctgagcgactgctccgggagttggctgataaccggctgacgacagtggccgagaaatccagggttcttcagctggaggaggaactgacgctgcgacggggtgagattgaggagctgcaacagtgcctacttcactcaggacctcctcccccagatcacccagacgccgcagagatcttacgccttagggaaagacttctgtctgcctctaaagagcatcagcgggagagcggggtactcagggataaatatgagaaggcactcaaggcataccaggccgaggttgacaagctccgggcagcaaatgagaagtacgcgcaagaggtagcagggctgaaagacaaagttcagcaggcgacgtctgaaaatatggggttaatggataattggaaaagcaagttagactcactggcctctgaccatcagaagtctttggaggatctgaaggccaccttgaattccgggcctggggctcagcaaaaggaaattggcgaactcaaggccgtgatggaaggcatcaagatggagcatcagctcgaattgggcaatctgcaggccaagcacgaccttgaaacagctatgcatgtaaaggaaaaggaagctctccgtgaaaagcttcaggaggcccaggaggagctagcgggacttcaaaggcattggagggcccaactagaggtccaggcctcccagcataggttagaactgcaggaggctcaggaccagagaagggatgccgagctgcgcgtgcatgagctcgaaaagttggatgtggagtaccggggtcaagctcaggccatcgagtttctgaaagagcagatttcccttgccgagaaaaaaatgctcgattacgaacgccttcagagggcggaagcccaaggcaagcaggaggtggaatccctgagggagaagctccttgtggcggaaaacaggctgcaggccgttgaggccctctgctcatcccagcacacccacatgatagagtctaatgacatctccgaagagaccattagaacaaaagagaccgttgaaggccttcaggataagttgaacaaacgcgacaaagaggttactgctctgacaagccagaccgagatgctccgggcacaggtgtctgccctcgagtctaagtgcaagagcggcgagaagaaagtggacgcgctcctgaaggaaaagaggcggttggaagccgaactggaaacggtgtccagaaaaacacatgacgctagcgggcagctcgtgctgatatctcaggagctgctacgcaaagaacggtcactgaacgagttaagggtgctgctcctggaggccaataggcacagtccgggacctgaacgggacctgagccgtgaggtgcataaggccgaatggcggattaaagagcagaagctgaaagatgatatcaggggcttacgggagaagttgaccggcctcgataaagagaagagtctcagcgatcagcgcaggtatagcctcattgaccgaagtagcgcccctgagctgctgcggctccagcaccagttgatgagcaccgaagatgccctccgtgatgccctggatcaggcacagcaggttgaaaagttgatggaggctatgaggtcctgcccagataaagctcagactattgggaactcgggctccgctaatggcattcaccagcaagataaagctcagaaacaggagaacactcattag

SEQ ID NO: 216938 - DNA, 4827 bp, synthetic construct
  misc_feature 1..4827: note = Description of Artificial Sequence: Synthetic coding sequence
  source 1..4827: mol_type = other DNA
atgtacagcgcacacaggccactgatgcctgcctccagcgctgccagtcgcggacttggaatgtttgtgtggaccaacgtcgagccgaggagcgtggccgtcttcccatggcacagcctggtgccctttctagccccttctcagcccgacccatcagttcagccctccgaggcacagcagcctgccagccaccccgtggcaagcaaccagtccaaggaacctgcagagtccgccgctgtcgcacacgaacgccctccgggtggcacgggcagcgctgaccccgagcgcccaccaggggctacctgtcctgagtccccaggtccaggccctccgcaccctcttggtgtcgtcgagagtggaaagggaccccctcccacaaccgaggaagaggcctccggccctcccggagaacccagacttgacagtgagaccgagagcgaccatgacgacgctttcttatcaatcatgagccctgaaatccaactaccgctgcctccgggaaaaagaaggacccagtccctctccgctctccccaaggagcgtgatagttcttcggagaaggatggacgcagccctaataaaagggaaaaagatcatattaggagaccgatgaatgcgttcatgatttttagcaaacgacaccgggctctggtccatcagcgccacccaaatcaggataataggaccgtgtcaaagatcctcggcgagtggtggtatgcactaggccctaaggagaagcagaaatatcatgatcttgctttccaagtgaaagaggcgcattttaaagcccacccagactggaagtggtgtaacaaagatagaaagaagtcatcatctgaagccaagccgacaagcttggggcttgcaggaggccataaggagacacgcgaaaggtcgatgtccgagaccggcacggctgcggctcctggagtgagcagcgagcttttgtcagttgccgctcaaacattactttcttccgacacaaaagcaccaggatcaagctcatgcggggctgagcggctgcacactgtgggcggacccggatccgcacgcccaagagccttctcccactccggggtacactccttggatggcggagaggttgacagccaagccctgcaggagctaacacaaatggtaagtgggccagctagctattcaggcccaaagccctccactcaatacggagcacctgggccatttgccgctcccggagaaggcggagctctcgccgctacgggcagaccacccctgctccctaccagagcttcccgatcccagagagctgcgagtgaggacatgacatcagatgaggagcgaatggtcatatgcgaggaggaaggagatgacgatgtgatagccgacgacgggtttggcacaactgacattgatttgaagtgcaaagagagagtgaccgattccgagagtggtgatagctcaggcgaagatcccgagggcaacaagggtttcggaagaaaggttttcagcccagtgattcgcagttcatttactcattgtagacccccactcgatcctgaaccccctggcccaccggaccccccagtcgccttcggaaaaggttatggctcagctccctcctcatctgcaagtagcccggcaagcagcagcgcgtcggctgccacaagcttctctctggggtctggtaccttcaaagcgcaggagtccggtcaaggaagcactgctggtcccctcagacctcctccccctggtgcgggtggcccagccaccccatccaaggctacgaggttcctccctatggatcccgctaccttccggcgaaaaaggccggaatccgtgggaggactggagcccccaggcccttccgtgatcgctgcccctccgtccggcggtggaaatatcctgcagacactggtgctccctcctaacaaagaagagcaggaaggaggcggtgcccgtgtcccatcagctcccgcaccaagtctggcgtacggcgctcccgctgcgcctctgtcccgcccagcagccacaatggtgaccaacgttgtcagacccgtgagttccacaccggtccctatcgcctctaaacctttcccgacaagtggccgtgcggaggcttctccaaatgacaccgccggagccagaaccgaaatgggcaccggttccagagttcccggaggaagtccattgggtgtgtccttggtttattcagataagaagtctgcagctgcaactagccctgcccctcacttagtggctggccctctgctgggtacagtgggcaaagcgcctgccacagtcactaacttgctcgttggtaccccaggatacggcgcaccagctcctccagcagtgcagtttattgcacagggcgctcctggaggtgggacaactgcaggaagcggagcaggggcaggcagtggacccaatggtccagtgccactgggcattctgcaaccgggtgcattgggcaaggccggaggcataactcaagtccagtacattctgcctaccttgccccaacagctacaggtggccccagccccagcacctgcaccgggtaccaaggccgctgcaccttcagggccagcacctactacgtcaatccgtttcacgcttcctccagggacctctacaaatggcaaggtcctcgctgccaccgccccaacaccaggcattcccattttgcagagcgtgccaagcgcccctccaccaaaggcacagtcggtgagtccagtccaagcccctcctcctggcggtagcgcccagctgcttccagggaaagtgttagtgcctctcgcggctccaagcatgtcagttcgcggagggggtgcgggtcagccgctccctttggttagccccccattctcagtgccggttcaaaacggtgctcagccaccatccaagatcattcaattgacaccagtgcctgtgagcactccatctggtttggtcccacctctgagccctgccacattgccgggacctaccagtcaacctcagaaagtgttgctgccttcttcaactcgaattacctacgtgcagtccgccggagggcacgctctgccacttgggacaagtcctgccagctcccaggccggaaccgtcaccagttacgggccaacaagctctgtggctcttggcttcacctccttgggacccagcggcccagccttcgtgcaaccacttctgagcgccggacaggcccctctcctggctcccggacaagttggagtcagccctgtgccatccccacaattgccacccgcttgtgcagctcccggtggacccgtgataactgccttctacagcgggagcccggcacctaccagctccgccccactggctcagcccagtcaagcaccaccctccctggtgtacacggtggcaaccagcactaccccccctgccgctaccattttgccaaagggaccgcctgctcctgcaactgccaccccagctccgaccagcccatttcctagcgccactgcagggtccatgacatacagtctagtcgcccctaaagcacaacgcccaagccctaaggcaccccagaaggtgaaagctgccatagcctctatcccagtgggttcctttgaagccggagccagcgggagaccaggcccagcccctagacaaccacttgagcctgggcctgtgagggaacctaccgctcccgaatctgaactggaaggccagccaacccctccagctccaccaccattgcctgagacgtggactccaaccgcacggtcgtcccctcccctgccccctccagcggaagagagaacgtcagcgaagggtccggagaccatggccagcaagttccccagcagctccagcgattggcgcgtccctggtcagggccttgagaatagaggagaacctccaacacccccttccccggcaccagctccagcagttgcccctgggggatcaagcgagtcaagttctggacgtgccgctggggacacaccagaaaggaaggaagccgcaggtacgggcaagaaagtgaaagtacgcccacccccactgaagaaaacatttgattccgtggacaaccgcgtgctgagtgaggtggacttcgaagagcgctttgcagagctccccgaatttagacccgaagaggtcctgccctcacccaccctgcagagtctagccactagccctagagcaatccttggtagctaccgaaagaagcgtaagaattccaccgacctggatagcgccccagaagacccaaccagtccaaaacgtaagatgcggagaaggtccagctgtagtagtgagccgaacacccctaaaagcgccaagtgcgaaggtgatatatttaccttcgatagaacaggaacggaggccgaagacgtgctgggggagttggaatacgataaagtgccctacagttccctgcgtagaactttagatcagcggagagctctcgtgatgcagctgtttcaggatcacggattctttccctccgctcaagcgacagctgcctttcaagctcgttatgccgacattttcccttccaaggtgtgccttcagctgaagataagagaagtgaggcagaagatcatgcaagccgcaacaccaaccgagcagcccccaggtgcggaggctccacttcctgtgcccccacctactggcacggcagccgcaccagccccaacgcctagcccagcagggggtcctgacccaacctccccatcaagtgatagtggcaccgctcaggccgcacctccgttgccccctcctcccgagagcggaccaggccagccgggatgggagggagctccccagcccagccccccacccccagggccaagcactgccgctacaggtcgctag

SEQ ID NO: 216939 - DNA, 1002 bp, synthetic construct
  misc_feature 1..1002: note = Description of Artificial Sequence: Synthetic coding sequence
  source 1..1002: mol_type = other DNA
atgtacacagctattccgcagtcgggctctcccttccccggatccgtacaggaccctgggctgcacgtctggcgggtggaaaagctgaaaccagtgcccgtggctcaagaaaaccaaggggtcttcttttctggcgacagttatctcgtgttacataatggtcccgaggaagtatcccatctgcatctgtggatcggacagcagagcagccgggatgaacaaggtgcatgtgcagttctggcggtacatttgaacaccctcctaggcgaacgccctgtgcagcatcgggaggtgcaaggcaatgagtcagatctcttcatgagctattttccgaggggtctcaaatatcaggaaggtggtgtcgagtcagcgttccataagacatccacaggtgcacccgcagctattaagaaactgtatcaggtgaagggcaagaaaaacatccgagccactgagcgggctctgaattgggacagcttcaacacgggggattgcttcatactcgatcttgggcagaacattttcgcttggtgtggaggcaagagtaacatactggagcggaacaaggcacgcgatctggccctagcaatcagggacagtgagagacagggcaaggctcaagttctcggtcctaagccagcacttaaggaaggcaatcccgaagaggatctcactgctgataaagccaatgcccaggccgcagccctctacaaagtgagtgacgcaactggacagatgaatcttactaaggttgcagactcctcaccctttgccctggaactgttgattagcgatgactgtttcgtactggacaacgggttgtgtggaaaaatatacatatggaaagggaggaaagccaacgagaaagagcgacaggccgcacttcaagtggcagagggcttcatctctcgaatgcaatacgcgcctaatacacaggttgaaatactaccccaggggcacgagtcaccgattttcaaacagttttttaaggattggaaatag

SEQ ID NO: 216940 - DNA, 861 bp, synthetic construct
  misc_feature 1..861: note = Description of Artificial Sequence: Synthetic coding sequence
  source 1..861: mol_type = other DNA
atggcagacttcgatgaccgggtctcggatgaggagaaagtgcggatcgctgccaaatttatcacacacgcaccgcctggggaattcaatgaagtgtttaacgatgtgcgcctgttgctgaacaacgacaaccttctgagggagggcgcagcccatgccttcgcacaatataacatggatcaatttacgcccgttaagattgagggatatgaggatcaagtcctcatcacggagcacggcgacttagggaacagcagatttctggatccaaggaataagatttcctttaagtttgatcatttgaggaaagaagctagcgatccgcagcctgaggaagctgacggcggacttaagtcctggcgcgaatcatgtgatagtgctctgagggcttacgtcaaggatcattactcgaatggtttctgcactgtgtatgctaagactatcgacgggcagcaaaccatcatagcctgcattgagagccaccagttccaaccaaaaaatttctggaatggtcggtggagatcagaatggaagtttacgataaccccacccacagctcaggtggtgggtgtcctgaaaatacaggtgcattactacgaagatgggaatgtgcagctcgtctcgcataaggatgtacaggattcactgaccgtatctaatgaagcacagactgccaaggagttcattaaaataatagagaacgccgagaatgaatatcaaactgcaattagcgaaaactaccaaaccatgagcgataccacgtttaaggccctcaggcggcagctaccagttacccggactaagatcgattggaacaagatcctgtcctataaaattggcaaggagatgcagaacgcatag

SEQ ID NO: 216941 - DNA, 861 bp, synthetic construct
  misc_feature 1..861: note = Description of Artificial Sequence: Synthetic coding sequence
  source 1..861: mol_type = other DNA
atggctgatctggaggaacagctcagcgatgaagagaaagtgcgtattgcggcaaaatttattattcatgcacctcctggagagttcaacgaagtgtttaacgacgttcggttactgctcaataatgataatctgctgagagaaggtgccgcacatgcctttgcccaatataacctggatcagtttacgccagtgaagatcgagggatatgaggaccaggtcttaataacagagcacggagatctgggaaacggcaagtttctcgaccctaaaaatcgtatctgcttcaaatttgaccacctgagaaaagaggccactgaccctagaccgtgcgaggttgagaatgctgttgaaagctggaggacatctgtggagactgccctaagagcctatgtcaaggagcactatccgaacggggtttgtaccgtatacggcaaaaagattgacggacagcagaccattatcgcttgtattgaatcacaccaattccaggccaagaatttttggaacgggagatggcgcagcgagtggaagttcacaatcaccccgtccacgacgcaagtggtgggtatcctgaaaattcaggtgcactactatgaggatgggaacgtgcagctggtgtcgcataaggacattcaggacagcctcaccgtctccaacgaagtgcagaccgccaaagaattcattaaaattgtggaagccgcagagaatgaatatcaaaccgccattagcgagaactatcagacaatgtcagataccacctttaaggccctccgcaggcagctgcctgtgacaagaacaaaaatcgactggaataagattctgagctacaaaatcgggaaagaaatgcagaatgcctag

SEQ ID NO: 216942 - DNA, 519 bp, synthetic construct
  misc_feature 1..519: note = Description of Artificial Sequence: Synthetic coding sequence
  source 1..519: mol_type = other DNA
atggccgacctggaggagcagctgtcggatgaagaaaaggtgaggattgccgctaagtttataatacatgcccctcccggtgagttcaacgaggttttcaacgatgtgagattgctgctcaacaatgacaacctgctgagggagggagctgcacacgcctttgctcagtacaacctggaccagttcactccagtcaaaatcgaggggtatgaggatcaggtcctaattaccgaacacggtgacttgggaaatggtaagtttttggatccaaagaatcggatatgtttcaaattcgaccatctgcgaaaggaagctactgaccccagaccctgcgaagtcgagaatgccgttgaatcttggcggaccagtgtggagactgccctgcgggcttacgtcaaagaacactatcctaacggagtgtgtaccgagtggagtctcgaggtgcgcatggaagtttacaaccactcttttaaccattcatcagggtggcacctcgagaatagcggcagcctcttgtag

SEQ ID NO: 216943 - DNA, 900 bp, synthetic construct
  misc_feature 1..900: note = Description of Artificial Sequence: Synthetic coding sequence
  source 1..900: mol_type = other DNA
atgacgctgagtgtcctgagcaggaaagataaggagcgggtgataagaagattgctgctccaggcacctccaggagaattcgtgaacgcattcgacgacctgtgtctgctcatccgggatgaaaagttgatgcaccaccagggagagtgcgccggacaccagcactgtcagaaatattctgtgcctctgtgtatcgatgggaatcctgttcttctgagtcatcataatgtgatgggggattaccgattttttgaccatcagagcaagctttcttttaagtacgatttactccagaatcagttgaaagatatacagtcacacggcatcattcaaaacgaagcagaatatttgcgtgtggtcctcctttgtgccttgaaactgtatgtcaacgaccattaccccaagggaaactgcaacatgttaaggaagacggtgaaatccaaagagtacctgatcgcctgcatcgaggaccataattatgagaccggcgaatgttggaatgggctgtggaagtcgaagtggatttttcaggttaatccattcctgacgcaggttacaggacgaatattcgttcaggcacattttttcagatgcgtgaatctacacatcgagatcagtaaggatctgaaggaatccctagaaatcgtcaaccaggctcagctcgcattgtctttcgcccgattagtggaagagcaggagaacaaattccaggcggcagttctcgaggagctccaagagttaagcaacgaggctctccgaaaaattctgagacgggatttgcctgtgacccggaccctgatcgactggcacagaatccttagcgatctgaatctggtcatgtaccccaaactcggctatgtaatctattccaggagcgttctgtgcaactggattatttag

SEQ ID NO: 216944 - DNA, 834 bp, synthetic construct
  misc_feature 1..834: note = Description of Artificial Sequence: Synthetic coding sequence
  source 1..834: mol_type = other DNA
atgtcagatcagcagctggattgcgccctggacctgatgcggcgtctgcccccacagcagatcgagaagaatctgtctgatcttattgacctagtcccctcactttgcgaagacctgttgtcctctgttgaccagccactgaaaatagctagagacaaggtggtgggaaaagattatcttctgtgtgattataacagggatggggactcctacagatcaccatggtccaacaaatatgatccaccgctcgaggacggcgcaatgccaagcgctaggctgaggaaactggaggtggaggccaataacgcctttgaccagtacagggacctgtactttgaagggggagtgagttccgtgtatttgtgggatctagaccacggtttcgccggagttatactgatcaaaaaggcaggcgatggtagcaaaaaaattaaggggtgttgggacagcatccacgtggtcgaggttcaggaaaaaagcagtggcagaaccgctcactacaaactgacttccaccgtgatgctctggctgcagacaaataagagtggcagtgggacaatgaatcttggaggctccctgactaggcagatggagaaagatgagaccgtaagtgactgctcacctcatattgccaacatcggcagattggtggaggacatggaaaacaagatccgcagcactttgaacgagatctatttcggaaagacaaaagatatagtgaatgggttgcggtccatagatgcgattcccgataatcagaaatttaaacagctgcagagagaactgagtcaggttctgacacagaggcaaatttatatccaaccagataactag

SEQ ID NO: 216945 - DNA, 783 bp, synthetic construct
  misc_feature 1..783: note = Description of Artificial Sequence: Synthetic coding sequence
  source 1..783: mol_type = other DNA
atgccacgccagttccaggacaccggcttttctcgacccggattgggtcaaccgagacgctgcgaccctgagcctcggaagtcagatcagcaactcgattgtgccctggatctgatgcgacggctgccacctcagcaaattgaaaaaaatctatctgacctcatcgatttggttccctctctttgtgaggatcttcttagttccgtggaccagcctttgaagatcgcaagggacaaggtagtcgggaaggactaccttctttgtgattataatagagacggagatagttaccggagcccctggagcaacaaatacgaccccccattggaggacggagcaatgccttctgccagactgcggaagctggaagtggaagcgaacaacgcttttgatcagtatagagacctctacttcgaagggggagtaagctctgtttacctttgggatctcgaccacggcttcgctggcgtgatactcatcaaaaaggcaggcgacggctccaagaagatcaaaggatgctgggactctatccacgtggtggaagtacaggagaagagctctggtcgcaccgcgcactataaattgacatccaccgtgatgctgtggttgcagaccaataagtcggggagcggaacaatgaacctcggcggatcactgaccaggcaaatggagaaggatgagacagtgtctgactgtagcccccacatcgccaacattggccgtttggtggaggtgtgtgccgatttctgtaggcaaattaagacgaggtcctccgaggagtag

SEQ ID NO: 216946 - DNA, 834 bp, synthetic construct
  misc_feature 1..834: note = Description of Artificial Sequence: Synthetic coding sequence
  source 1..834: mol_type = other DNA
atgtcagaccagcagctagactgtgctctggacctgatgcgacggctgccgcctcagcagatcgaaaagaatctgagcgacctgatagatctggtgccttccctctgcgaagatctgctgtcttcagtggaccagccactcaagatcgcccgagataaggtcgttggtaaggactacctcctttgcgactacaatcgagacggcgattcctatcgttccccttggtccaacaagtatgatcccccattagaagatggagctatgccatctgcccgactgcgcaagctagaagtagaagcgaataatgcatttgatcagtaccgtgacctgtacttcgagggaggcgtgagtagcgtgtacttgtgggacctggatcatggcttcgctggcgtcattctgattaaaaaagccggagatggatccaagaagattaagggctgttgggacagcattcatgtggtggaagtccaagaaaagtcaagcgggaggacggctcactacaaattgacctccactgttatgctgtggctgcagacaaataaaagcggctccggcaccatgaaccttggtggttccctcacccgacagatggaaaaggatgagactgtctcagattgcagtccccatattgctaacatcggcaggctggttgaggacatggagaacaaaatccgttctacccttaatgagatatatttcggcaagaccaaagacatcgtgaacggcctacgatctatcgatgctatcccagacaaccagaagttcaagcagctccagagagagctgagccaagtgctgacgcagcggcagatttacatccaacctgacaactag

SEQ ID NO: 216947 - DNA, 783 bp, synthetic construct
  misc_feature 1..783: note = Description of Artificial Sequence: Synthetic coding sequence
  source 1..783: mol_type = other DNA
atgcggagactgccccctcaacagatcgagaaaaatctgagcgacctaattgatctggtgccctcactctgcgaggatttactgtcctctgtggatcagccactaaagatcgctagagataaggtggtgggaaaagactatttgctttgtgactataaccgagatggggactcttacagaagtccctggtccaacaaatatgatcccccacttgaggatggcgcaatgccttctgccaggctgagaaaattggaagtcgaagcgaacaacgccttcgaccagtacagggatctttatttcgaggggggagtttcatctgtgtacctgtgggacctcgatcacggttttgcaggagtcattctgatcaaaaaggctggtgacgggtccaaaaagattaagggctgttgggatagtattcatgttgtggaagtgcaggagaaatccagtggtaggaccgcacattataaactgaccagcaccgtgatgctgtggctgcagactaacaagtccgggagcggaaccatgaaccttggtggttcccttactcggcaaatggaaaaggatgagaccgtctcagactgttccccgcatattgctaatatagggcgactggtggaagatatggagaataaaattagaagcactctgaatgagatatattttggcaaaaccaaggatattgtgaatggtcttagatcggttcagacatttgccgataaatcgaaacaggaggctttgaagaatgacttggtagaagccctcaagcgcaagcagcagtgctag

SEQ ID NO: 216948 - DNA, 1005 bp, synthetic construct
  misc_feature 1..1005: note = Description of Artificial Sequence: Synthetic coding sequence
  source 1..1005: mol_type = other DNA
atgggagggcctcaggataaagatgagaggaccatcgctctggtgcggccttggccttggggacatcaggccctggatcccgcatacggtttagataccatgcatccttcccgcagatcattacccttcccactaaactgccagctggcacgtgtcggcacagcagattacggctcccccagcgatcagtccgatcagcaactcgactgcgccctggaccttatgcgccgtttgccccctcaacagatcgagaaaaacttgtcagatctgattgacctggtgccctctctgtgtgaagacctcttaagttctgtggatcagcccctgaagattgctcgcgacaaggtggtaggcaaagattatctgctgtgtgattataatcgtgacggcgactcctaccgcagtccttggtctaataagtacgacccacccctcgaggacggcgctatgccctccgcccgactgcggaaattggaagtggaggccaacaatgcttttgatcaataccgcgatctttacttcgagggaggtgtcagcagtgtctacctgtgggatctcgaccatggtttcgcaggcgtcatcttgattaagaaggcgggagacggctccaaaaaaattaagggctgctgggacagtatccatgtggtggaagttcaggagaagagttccggacgcacagcccactacaagctaacttccaccgtcatgctctggcttcagactaataaatcaggtagcggtacaatgaatctgggaggatctctcacgcggcagatggagaaggacgagaccgtgtcggactgttctccacacatagctaatatagggagactcgtggaggatatggaaaataagattcggagcaccctgaacgagatttactttggtaagacaaaagacatcgtaaacggtctgagatctgtacagacctttgcagacaagtccaagcaggaagcattaaagaatgacctcgtggaggccctcaaaagaaagcaacagtgttag

SEQ ID NO: 216949 - DNA, 819 bp, synthetic construct
  misc_feature 1..819: note = Description of Artificial Sequence: Synthetic coding sequence
  source 1..819: mol_type = other DNA
atgtccgaccagcaactcgattgcgcactcgatctgatgagacgactgccgcctcagcagatagagaagaatctgagtgacctgatcgatcttgtgccaagcttgtgcgaggacctgttgtcatccgtcgaccagccactaaagattgccagagataaggtggtgggcaaagactacctactatgtgattacaatcgggacggcgactcatatcggtcaccctggagcaataagtacgatccccctttggaggacggggctatgccctcagctcggctgcgcaagcttgaggtggaggccaacaacgcctttgaccaataccgagatctgtactttgaagggggtgtatcaagtgtttatctgtgggatctcgaccacggtttcgccggagtcatcctcatcaaaaaggctggggacggcagtaagaaaattaaaggttgctgggacagcatacacgtcgtggaagtgcaggaaaagtcatcgggtcgcaccgcccactacaagctaacttccacagtgatgttatggctccaaactaacaagtcaggtagcggtactatgaacctgggtggttcactgacccgccagatggagaaggatgaaaccgtgtccgattgcagtccccacatcgctaacatcgggcgactggtggaagacatggaaaacaagatccggtcaacgctgaacgagatttattttggtaaaactaaagacatcgtgaatgggttacggtctgtccaaaccttcgccgacaagtccaagcaggaagccctgaagaacgacctggtggaagccctgaaaagaaagcagcaatgttag

SEQ ID NO: 216950 - DNA, 621 bp, synthetic construct
  misc_feature 1..621: note = Description of Artificial Sequence: Synthetic coding sequence
  source 1..621: mol_type = other DNA
atgcgaagactgccccctcagcagattgaaaagaacctatctgatctcatcgatctggtgcccagcctgtgcgaggatctgctatcatctgtggaccaacccttaaaaattgcaagggacaaggtagttgggaaggattacctgctgtgcgattataatcgcgacggagattcctacagatcaccatggtccaataaatatgacccccctctggaagacggtgcaatgcctagtgctaggctcaggaagctcgaggtcgaggccaacaacgctttcgaccaatacagggacctgtattttgaaggaggggtctcatcagtttatctctgggatctcgatcatggattcgccggagtgatcctgattaagaaagcgggagatgggagcaaaaaaatcaagggatgctgggactccatacatgtggtggaagtacaggagaaaagctcggggcgtacagctcactacaagctgacctccacggtaatgctatggctgcagaccaacaagtccggcagcgggactatgaatctgggcggaagtctcacaaggcagatggagaaggacgagaccgtaagcgactgttctccccatatcgctaacatcggacggctggtggaatag

SEQ ID NO: 216951 - DNA, 906 bp, synthetic construct
  misc_feature 1..906: note = Description of Artificial Sequence: Synthetic coding sequence
  source 1..906: mol_type = other DNA
atgcatcccagtcggagatccctgccttttccccttaactgccagctggcaagggtcggtaccgctgactacgggtcaccaagtgatcagtctgatcagcaactggactgcgctctcgatctgatgcgaagactcccccctcagcagatcgaaaaaaatcttagcgatctgattgacctggtgccttcattgtgcgaggaccttctcagtagcgtggatcaacctctgaaaattgccagggataaagtcgtgggcaaggattatcttttgtgtgattataatagggatggggactcttacaggagtccttggtctaataagtatgaccctcctttggaagacggggcaatgccctccgcccgtttaaggaagctcgaagtggaggcaaacaatgcttttgatcagtatagagatctttacttcgaaggcggagtgtctagcgtgtatctttgggacctcgatcatgggttcgccggagtgattctcatcaaaaaagcgggtgacggctcaaagaagattaagggctgctgggactccattcacgtcgtggaggtgcaggaaaagtcttctggtaggactgcacattacaagttgacttcgacggtcatgctgtggctgcagaccaacaaatcaggtagcggtactatgaacttgggtggcagtttgacaagacagatggagaaagacgagacagtgtcggattgtagtccgcatatcgctaacatcggccgactggtggaagatatggaaaataaaatcaggagtacactcaacgagatctactttggaaagactaaggacatagttaacgggttaagatctgtgcagacattcgccgataagtccaagcaagaagctctcaagaacgatcttgtagaagccctgaagcgaaagcagcagtgctag

SEQ ID NO: 216952 - DNA, 366 bp, synthetic construct
  misc_feature 1..366: note = Description of Artificial Sequence: Synthetic coding sequence
  source 1..366: mol_type = other DNA
atgctaaaggtgccatccctgtgtgaggacctgctgagcagcgtggaccagccacttaagattgctagggacaaggtggtcggcaaagattacttattgtgcgattacaatagagacggtgactcttaccgcagcccctggtccaacaagtacgaccctccattagaggacggggcaatgccctctgcacggctcaggaagttagaggtcgaagcgaacaatgcgtttgatcagtaccgagatctctactttgagggtggcgtgtcgagcgtgtacttgtgggatcttgaccatggtttcgcaggagtcattctgattaaaaaggctggcgacggcagtaaaaaaatcaaggggtgctgggactag

SEQ ID NO: 216953 - DNA, 1047 bp, synthetic construct
  misc_feature 1..1047: note = Description of Artificial Sequence: Synthetic coding sequence
  source 1..1047: mol_type = other DNA
atgtacactgccatcccacagagtggttcacccttccctgggagcgtgcaggacccaggcctgcacgtatggcgcgtggaaaaactgaaacccgttcctgtggcgcaggaaaaccaaggagtgtttttctcgggagatagctatctggtgttgcataacggacccgaagaggtctcgcacctacacctgtggatcgggcagcagtcaagcagagatgagcagggcgcttgcgctgttctggccgttcacctgaatacattgcttggggaaagaccagtgcagcaccgcgaagtacaagggaacgagtcggacctgttcatgtcatactttcctcgaggcctgaagtatcaagaagggggagttgagagcgcctttcacaagacctcgacaggagcacctgccgcaatcaagaaactataccaggtgaaaggcaagaaaaatatacgggcaacagaacgggcactgaattgggactctttcaacacaggagactgtttcatattagatcttggccaaaatatcttcgcatggtgcgggggtaaatcaaacatcttggagcggaataaagcccgagatctcgctttggctatccgtgatagcgagagacaggggaaggctcaggttgaaattgtgacagatggggaagaacctgctgaaatgatccaggtcctgggccctaaaccggcattgaaggaagggaatcctgaagaggacctgacggctgataaagcgaatgcccaggcagccgctttgtacaaggtttccgacgcgacaggccaaatgaatctgacaaaggtggcagattcctcaccattcgctttggagctcctcatctcagatgattgtttcgtcttggataacggtttgtgtggcaaaatctacatctggaagggccgtaaggcaaacgagaaggagcggcaggccgctctccaagttgccgagggctttatctctcgaatgcaatacgctcccaacacccaggtggaaatcctaccccaggggcatgaaagccccatcttcaaacagttcttcaaggactggaagtag

SEQ ID NO: 216954 - DNA, 657 bp, synthetic construct
  misc_feature 1..657: note = Description of Artificial Sequence: Synthetic coding sequence
  source 1..657: mol_type = other DNA
atgtatacagccataccacagagcggctcccctttcccgggatcggtgcaggaccctggcctccatgtatggcgggtggaaaagctgaagcccgtgcccgtggcccaagaaaaccaaggtgtgttcttttctggtgatagttatctggtgttgcataacggcccagaagaggtttcccacctccacctctggataggacagcagagtagccgtgacgagcagggcgcatgtgcagtgctggcagtccacctgaacaccctgctgggagagcggccagtgcaacacagagaagtgcagggcaacgaatcagacctgttcatgtcttatttcccaaggggactgaagtaccaagagggcggtgtggagagtgcctttcataagacgtccacgggagctccagcggcaataaaaaaactgtaccaagtcaaggggaagaagaatattagagccacagaacgtgccctgaattgggattccttcaataccggggattgtttcattttagatctcggtcagaacatcttcgcttggtgtggaggaaaatcaaatattctcgagcggaacaaagcaagagatctcgccctggccatcagagatagcgaacgacagggcaaggcccaggtcgaaatcgttacagacggcgaagagccagcttag

SEQ ID NO: 216955 - DNA, 1047 bp, synthetic construct
  misc_feature 1..1047: note = Description of Artificial Sequence: Synthetic coding sequence
  source 1..1047: mol_type = other DNA
atgtatacggccatcccccaatcaggaagcccattccctggttctgtgcaggatcccggacttcacgtctggcgggtggagaaactgaaacccgtgcctgtggcacaggagaaccaaggtgtgttttttagtggtgacagttaccttgtgctgcataatggacctgaggaggtgtctcatctacacttatggattggccagcagtcatcgcgggacgagcaaggggcatgcgctgtcttagcagtccatctcaataccctgctgggcgagagaccagtccagcacagggaagtgcagggtaacgaatctgatctatttatgtcttatttcccaagaggtcttaagtaccaagaagggggtgtcgaatctgcattccataagactagtacaggcgcacccgcagccatcaaaaaattgtaccaggtgaaaggaaagaagaatatccgcgcaaccgagcgtgcattgaattgggattcattcaatacaggggattgtttcattctggacctcggacagaacatttttgcttggtgcgggggaaagagcaacatcctcgaaaggaacaaagccagggacttggccctcgctatccgcgattccgagaggcagggcaaagcccaggtcgaaatcgtgactgatggagaggagccggctgagatgattcaagtcctggggcctaagcctgctctgaaagaggggaatccagaggaggatctgacagctgacaaggcaaatgctcaggcagcagccctgtacaaggtgtctgatgcaaccgggcagatgaacttgacaaaggtggccgactcatcaccattcgccctagagctgctaatctctgatgactgttttgtgctggataatggtctgtgcggcaagatctacatatggaagggtagaaaggccaacgagaaagagcgtcaggccgcactgcaggtcgctgaggggttcatcagtaggatgcagtacgcgcctaacacccaggtcgaaattttacctcagggccatgagagtccgatattcaaacagttttttaaagactggaaatag

SEQ ID NO: 216956 - DNA, 1047 bp, synthetic construct
  misc_feature 1..1047: note = Description of Artificial Sequence: Synthetic coding sequence
  source 1..1047: mol_type = other DNA
atgtacaccgcgatcccacagtctggatcgccgttcccaggttccgtacaggatcccggactccacgtgtggagagtggagaaactgaagcctgtgccagttgcgcaggaaaatcagggcgtgttcttttctggtgattcttacctggtgctgcataatgggccagaggaggtttcccacctacacttgtggattggtcagcaaagttctagagacgagcagggagcttgtgctgtgctggccgtccacctgaacaccctgctcggcgagagacctgttcagcaccgtgaagtgcaaggcaatgagtccgatctgttcatgtcatacttccctcgtggtctgaaatatcaggaagggggtgtcgagtccgccttccacaagaccagcaccggcgctcccgcagcaatcaagaaactgtaccaagttaagggaaagaaaaacattcgagctaccgaacgtgcattaaattgggactctttcaatacaggagactgctttatcctggacctgggacagaatatattcgcgtggtgcggcggaaagtccaacattctggagcggaataaagcgagagaccttgctttagctatacgggacagcgaacgtcaaggcaaagcgcaggtcgagatcgttaccgacggggaagaaccggcagaaatgattcaagtcctgggacctaaacctgcgctgaaagagggaaaccccgaggaggacctgactgcagacaaggccaacgcccaagcggcagcactgtataaggtgagcgacgctacgggacagatgaatctcacaaaagtggccgactccagccctttcgctcttgaactattgatatcagacgactgtttcgtcctggataatgggctatgtgggaagatctatatatggaaagggagaaaggctaacgagaaagagcggcaggccgcactccaagtggcggaggggttcatttcgaggatgcagtacgcacctaacacacaggtggaaatactgccgcaggggcatgaatcccccattttcaaacagtttttcaaggactggaagtag

SEQ ID NO: 216957 - DNA, 762 bp, synthetic construct
  misc_feature 1..762: note = Description of Artificial Sequence: Synthetic coding sequence
  source 1..762: mol_type = other DNA
atgtatacggcaatcccccaatccggaagcccattccccggtagcgttcaggatcctggcctgcatgtgtggagagttgagaagctgaagccagtgcctgtcgcgcaagagaatcagggtgtgttttttagcggggacagctacctggttctgcataatggtcccgaggaggtctcccacctgcacttatggattgggcagcagagtagccgtgacgagcaaggcgcttgtgcggtcctggcggtccatctgaacacgttgctgggagagagaccagttcagcaccgggaagttcaaggtaatgaatccgacctgttcatgtcctacttcccacgcggactcaaataccaggagggtggcgtggaatcggcttttcataagacctctacaggtgcgccagcagcgatcaagaaactctaccaggtgaaaggaaaaaagaatatacgcgctactgagcgcgctcttaattgggactcctttaataccggtgattgctttattctggacctgggccaaaacatatttgcctggtgcgggggaaagagtaatatcctcgaacgaaataaggctagggatctcgctctggctattagggactccgaaagacaggggaaggcccaagtggaaattgtgacagacggggaagagccagccgagatgatccaggtgctgggtcccaaacctgcattgaaagaggggaacccagaggaggacctcactgctgataaggccaatgcgcaggcggcagcgctgtataaatag

SEQ ID NO: 216958 - DNA, 762 bp, synthetic construct
  misc_feature 1..762: note = Description of Artificial Sequence: Synthetic coding sequence
  source 1..762: mol_type = other DNA
atgtataccgcaatcccgcagagcgggagcccctttccgggttcagtgcaagaccctgggcttcatgtttggcgcgtcgaaaaactcaagcctgtgcctgtagctcaggagaaccagggcgtgttctttagtggtgattcttatctggtgctgcacaatgggcctgaagaggtctctcatctgcacctctggattggccagcagagttctcgggacgagcagggcgcttgcgctgttctcgcagttcatttgaatacgctcctcggcgaaaggccagtccaacatcgcgaagttcagggcaacgagtccgacctgttcatgagttactttcctcggggtctcaagtatcaggagggcggagtggaaagtgcctttcacaagacctccactggcgctccagccgctatcaagaagctgtatcaggtaaagggcaagaaaaacattagggctaccgaacgtgccctcaattgggattcgttcaacaccggcgactgctttattctggacctaggtcaaaatatctttgcgtggtgtggaggaaagtcgaacattctggaaaggaacaaggccagggacctggcccttgctatccgagacagcgagcgccagggcaaggcccaggtggagattgttaccgatggagaggagcctgccgagatgatccaggtcctcggacctaagccggcattgaaagagggcaaccctgaggaagatttgaccgccgacaaggccaatgcacaagccgctgccctgtataagtag

SEQ ID NO: 216959 - DNA, 762 bp, synthetic construct
  misc_feature 1..762: note = Description of Artificial Sequence: Synthetic coding sequence
  source 1..762: mol_type = other DNA
atgtacacggccatcccacaaagcggttcccccttccccggttcagtgcaggacccaggcctgcatgtttggcgcgtagagaagctgaaaccagtcccagtggctcaggaaaatcagggcgtgtttttttctggagactcgtatctggtgctgcacaatgggcctgaagaagtcagccacctgcacctgtggatcggccagcagagttcaagagacgaacaaggcgcttgcgctgttctggccgtgcatcttaacaccttgctgggggagcggccagttcaacatcgggaagtgcaggggaacgaaagcgatctcttcatgtcctattttcccaggggcctcaaataccaggagggtggggtagaatccgctttccacaaaacgagcactggagcgccagccgcaatcaaaaagttgtaccaggtcaaaggtaaaaagaatatacgcgctaccgagcgggcactgaactgggatagttttaatactggggactgttttatacttgatttagggcagaatatatttgcatggtgtgggggtaagtctaacattctcgagcggaataaagcacgagacctcgcactggctatcagggactcggagcgccagggcaaggcgcaggtcgaaatcgtgaccgacggagaggaacccgctgaaatgatccaggtcctgggccctaagccggctctgaaagaggggaatcccgaggaggaccttaccgcagacaaagcaaatgcccaggctgccgcactgtacaaatag

SEQ ID NO: 216960 - DNA, 984 bp, synthetic construct
  misc_feature 1..984: note = Description of Artificial Sequence: Synthetic coding sequence
  source 1..984: mol_type = other DNA
atgtatacagcaatcccccagtcagggtctccttttccaggctccgtgcaggaccctgggctccatgtgtggagagtggaaaagctcaagcccgttcccgttgcccaggaaaaccagggggtgtttttctctggagactcttatctggtgttgcataatggccctgaggaagtcagccacttacatcttaatacactcctcggagagagaccagtgcagcacagagaggtccaaggaaacgagtcagatctgtttatgagttattttcctcggggtctcaagtaccaagagggaggtgtggaatctgccttccataagacctccactggcgctcctgctgcaattaagaagttgtaccaagtaaagggcaagaagaacatcagagcgactgagagggctcttaattgggactcttttaatactggcgattgtttcattttagatttaggccagaacatctttgcctggtgcggaggcaagagtaatatattagagagaaataaagcacgcgaccttgccctcgcaatcagagattccgagagacagggcaaagcccaggtagaaatcgtgactgacggtgaggagccagctgagatgatccaggttctgggtccaaagccggcattaaaggaaggcaatccggaggaagatctgactgcagataaagccaacgcacaggccgcagccctatataaggtttccgacgcaacaggccaaatgaacctgacgaaggtggcggactcctccccattcgctctggaacttttgatctctgacgattgttttgtgttagataacggactttgcgggaagatctatatatggaaaggcagaaaggcgaacgagaaggagcgtcaggccgctttgcaggttgctgagggcttcatttctcgaatgcagtatgcgccaaatacacaggtggagatcctgccgcaggggcatgaaagccccattttcaaacagttttttaaagactggaagtag

SEQ ID NO: 216961 - DNA, 654 bp, synthetic construct
  misc_feature 1..654: note = Description of Artificial Sequence: Synthetic coding sequence
  source 1..654: mol_type = other DNA
atggaaggcagtttctccgatggtggtgcacttccggagggactggccgaggaagctgagccacaaggggcagcctggtcaggtgactcagggacagtttcccagagtcactcctcggcctctggcccatgggaagatgaaggagccgaggacggcgctcccggtcgcgacctcccgttattaaggagagctgccgctggctacgctgcctgtttgctccctggcgctggagcacgcccagaagtagaggcgcttgatgcttctttggaagacctgcttaccagagttgatgagttcgtgggaatgttggatatgttaaggggcgactctagccatgtcgtgtccgaaggggtgccaagaatccacgccaaagcagctgagatgcgaagaatttattcaaggatcgaccggctggaggcatttgtcaggatggttggtggtcgtgtcgctagaatggaggaacaggtgactaaggctgaggctgagctgggaacttttcctcgtgcattcaagaagttgctccacaccatgaatgttccatctctgttcagcaagagcgccccatctcgaccccagcaagccggatacgaagctccggtactgtttaggacggaggactatttcccatgctgttctgagagaccacagctatag

SEQ ID NO: 216962 - DNA, 6678 bp, synthetic construct
  misc_feature 1..6678: note = Description of Artificial Sequence: Synthetic coding sequence
  source 1..6678: mol_type = other DNA
atggccgctctggtcttggaggacggctctgtccttcgtggccaaccattcggagccgctgtctccaccgccggtgaagtggtcttccagacggggatggtgggctatccagaagccctcaccgacccgtcctataaggcgcagatcctggtgctaacataccccttaataggcaattatggaatacctccagatgagatggatgaattcgggctgtgcaagtggtttgagtcctccggcattcatgtcgcagccctagtcgtaggggaatgctgtccaaccccttcgcactggagcgcaacacgcacactgcacgagtggctccagcagcacggaatcccaggtttgcaaggagtagatacaagagaattaactaaaaagctgcgtgaacaaggatcattgctcggtaaactagtgcagaacgggactgaaccatcctcactccccttccttgatcccaacgctcgccctctcgtaccagaagtgagcattaagacaccacgggtgttcaataccggcggtgcacctagaatcctcgccttggattgtggactaaagtacaaccagatccgctgtctgtgtcagcgtggtgccgaggtgactgtggtcccctgggaccacgctctggatagtcaggagtacgaagggctgtttctgagcaacgggccaggagatcctgcatcctaccccagcgtggtttcaacgttgtctcgagtgctgagcgaaccgaaccctaggcccgtgttcggcatatgtttgggccaccagctacttgctttggccattggggcaaaaacctacaagatgcgttatggaaatagaggtcacaaccaaccctgtttgctcgtagggagcggtcgctgcttcttgacttcacagaatcacggctttgctgtggaaaccgacagcctgccggcagactgggctcctttgtttaccaatgcaaatgacggatcgaatgagggcattgtgcataattccctgcctttcttttcagtccagttccacccagagcaccaggcgggaccatcagacatggagctcctctttgatatctttcttgaaactgtgaaagaagcgacggccggaaacccagggggtcagactgtgcgggagaggttgacggaaagactctgtccacctggaattcctacccctggctctggacttccaccacccaggaaggtgctgattcttggtagcggcggactctctattggacaagcgggtgaattcgattactccggctctcaggctattaaagcattaaaggaagagaacattcagactctgctcatcaatccaaacatcgcaacggtccagaccagccagggactggccgataaggtgtatttcctgcctatcacacctcattatgtaacccaggtgataagaaatgaacgccctgatggcgttttactgacattcggtgggcagaccgcactgaattgtggtgtcgagctgaccaaggcaggcgtgttagccaggtacggcgtgcgggtcctgggcacccctgtggaaaccatagaattaacagaagaccggcgagcctttgcagcgagaatggctgagatcggagagcacgttgctccaagcgaagccgcaaacagcctcgaacaggcgcaggctgctgccgagcgcctagggtaccctgtccttgtacgagcggcatttgccctgggaggactgggcagtggattcgcttcaaacagagaggagctaagcgccctcgtggcccctgcctttgcgcacacgtcacaggtcttggtcgacaaaagtcttaaaggctggaaggagatagaatacgaagtggtcagggatgcttatggcaactgtgtgactgtctgcaacatggagaatctggacccactaggcatccataccggcgagtccatagtggtagctccctcccagactttgaacgaccgcgagtaccagcttctaagacaaaccgctatcaaggtaactcaacacttgggcatcgtaggagaatgcaacgttcaatatgccctgaaccctgaaagcgagcagtactacatcatcgaggtcaacgccagactgtcgcgatcatcagccctcgctagcaaggccaccggatatccactcgcctatgtggccgcaaagctcgcgctggggatccctttacccgaattgaggaacagcgtcactggaggcacagccgcattcgaacccagtgtcgactactgtgtagtgaagattcctagatgggatctaagcaagtttcttcgtgtttccaccaaaataggctcctgcatgaagtctgtcggtgaggttatgggtatcggccgaagtttcgaggaggcgttccagaaggcccttcggatggttgacgagaactgcgtgggctttgatcacacggttaagcccgttagcgacatggaactggaaacccctaccgataagcggatttttgtggtcgccgcagccctttgggctgggtattcggtcgacagactttacgaactcaccagaatagacagatggttcctccaccgtatgaaaaggatcattgcccacgcacagttgctggaacagcacaggggccagcctctccctcctgatcttctgcagcaggccaaatgtcttgggttctccgacaagcagattgctctcgcggtgctcagcacagaactggcagtgagaaagctgaggcaggagctgggtatctgtcccgctgttaagcaaatagatactgttgcagcagagtggccagcacagactaactacctctatctgacttactggggcacaacacatgatctgacgttccggacccctcacgtcctcgtgttaggaagtggagtgtacaggatcgggtctagcgtcgagtttgactggtgtgccgtggggtgtattcaacagctaagaaaaatgggttataagacgattatggttaattataatcccgaaaccgtgagcacagactatgatatgtgcgatcgactttactttgacgagatttccttcgaagtcgttatggacatttatgaactcgaaaatcctgagggcgtcatcctttcgatgggtggccagctgccgaacaacatggccatggccctccatagacagcagtgtagagtactcggcacgtctcctgaggccatcgattccgccgagaacaggtttaagttttcccgactcttggataccatcggtataagccagccccagtggagagagctatctgatttggaatcggcacgtcagttctgccagacagtcggatatccttgtgtggtgcgcccaagttacgttttgagtggtgcagcaatgaatgtcgcttacaccgatggagatctagaacggtttctgtcttccgcagctgctgtgtctaaggagcatcccgtcgtaataagtaagtttatccaggaagctaaggagattgatgtggatgccgttgcttctgacggcgtcgttgcggcaatagctatatctgagcatgtggagaacgccggagtacattctggcgacgctacgctggtcacccccccacaagacatcaccgccaagacactcgagagaattaaggcaatcgttcacgcagttggacaggagctccaagtcactggacctttcaatctgcaactcattgccaaagatgaccaactgaaggtgatcgagtgtaacgtcagagttagtcgttctttcccattcgtgagtaagaccctgggtgtcgacttggtggccctggctacccgggtcatcatgggagaggaggttgaacctgtcggtctgatgactggatctggtgttgtgggtgtcaaggtgccgcagttttcattctctcgccttgccggtgccgacgtggttttgggggtggaaatgacctccaccggagaggtcgccggattcggcgagagtaggtgcgaagcgtatctgaaagctatgctgtctaccggttttaagattccaaaaaaaaacatcttactgactattgggagctacaaaaacaagtcagagcttctgcctacggttcgcctgctcgaatctctcggatattctctgtatgccagtctcggcacagccgatttctacactgagcacggcgtcaaagtgaccgctgtcgactggcatttcgaagaggccgtcgacggggaatgtcctccccagcggagcatactggagcagttggccgaaaagaacttcgagctggtcataaacctctctatgaggggagccggaggtaggcgcctatcttcctttgtcacaaaagggtacaggaccaggcgactggccgcagacttcagcgttcctttgataattgatatcaagtgcactaaactgttcgtggaggctctcgggcaaatcggcccagcaccacctcttaaagttcacgtcgactgtatgacctcacaaaaacttgtgagattgccaggccttattgacgttcatgtgcacctgcgcgagccaggaggtacacacaaagaagacttcgcttctggcacagccgctgctcttgcaggcggtatcacaatggtgtgcgcgatgcctaacactcgccctcccataatagatgcccctgcactggcacttgctcagaagctggctgaagctggtgcacgctgcgactttgccttattcctcggtgcctcaagcgagaacgccggaacactaggcacggtcgcaggttctgccgcagggttgaagctgtacctcaacgaaacgtttagtgagctgcgtcttgactccgtggtgcagtggatggagcatttcgagacatggccaagccacctccctatagtcgcacacgctgaacaacagacagtagcagccgtgttgatggtcgcgcaactgactcaacggagcgttcacatctgccacgtggccaggaaagaggagattctattgataaaggctgccaaagcgcgagggctgcccgttacctgcgaggtggctccccaccacctgttcctcagccatgacgaccttgagcggctcggacctgggaaaggagaagtgaggcccgagttagggagtagacaagatgtggaggccctgtgggaaaacatggccgtcattgactgttttgcttctgaccacgcgcctcataccttagaggagaaatgtggatcaagaccacccccagggtttccaggcttagagactatgctgcctctactgctgacagctgtctctgaaggacgattaagcctcgatgacctgctgcaaaggctgcaccacaaccccagaaggatttttcatctgcctccccaggaggacacttacgttgaggtggacttggaacacgagtggaccattccgagccatatgccattctcaaaggcccactggacccccttcgaggggcaaaaggtgaagggcaccgtgcgtagggtggtgcttagaggagaagtggcttacatcgatggccaggttttagtgccgcctggatatggccaggacgtgagaaaatggccacaaggagcagtccctcaactgccaccatccgccccagcaacctccgagatgactactactcccgaacgtccaaggcgcggtatcccaggccttcctgacggaagatttcacctgccacccagaatccaccgggctagtgacccgggtctccccgctgaggaaccaaaggagaaatctagtcggaaggttgctgagcctgaactcatgggcacaccagatgggacgtgttaccctccgccaccagtgcctagacaggcatctccccagaatcttggtacaccgggtctgctgcacccacagaccagcccccttctgcattccctcgtgggtcagcacatcctcagcgtgcaacagttcacaaaggatcagatgtcgcatttgtttaatgtcgcccacacattgcggatgatggtgcagaaggagcgcagtctagatatcctcaaagggaaggtgatggcctcaatgttctacgaggtgtcaactcggacatcctcatctttcgctgctgcaatggcccgactgggcggtgccgtgttatctttcagcgaagcgacctcatctgtgcagaaaggagaatccctagctgacagcgtgcagacaatgagctgttatgccgacgtagtagttttgcgtcatcctcagcccggagctgttgaacttgcagcgaaacactgtcgaaggcccgtgatcaatgcaggagacggggtcggggaacaccctacccaagctctgcttgacatattcactatccgcgaagaattgggcactgtcaacggaatgaccattaccatggttggcgacctgaaacatgggcgaactgtgcattctttggcctgtcttctcacacagtatagggtctctctgcggtacgtggctccaccctctctccgcatgccgcctacggtgcgtgccttcgtggccagtaggggcacaaagcaggaagaattcgagtccattgaggaagccctaccagacaccgatgtgctatatatgaccaggattcagaaggaacgatttggaagcactcaggaatacgaggcctgttttggtcagttcatcttaactccccatatcatgaccagagctaaaaaaaaaatggttgtaatgcaccctatgcccagagtgaacgagatctctgtcgaggtggacagcgatccaagggccgcatactttcggcaggccgaaaacggcatgtatattagaatggccctgctcgctacggtgttggggagattttac

SEQ ID NO: 216963 - DNA, 1440 bp, synthetic construct
  misc_feature 1..1440: note = Description of Artificial Sequence: Synthetic coding sequence
  source 1..1440: mol_type = other DNA
atggaaaagggcctaacactcccccaagactgccgagacttcgttcattctctgaagatgcgatccaaatatgccttattcctggtcttcgttgttatagtgtttgttttcatcgagaaggagaataagattatatccagggtcagcgataaactcaaacagatacctcaggcactggccgacgctaattccaccgaccctgccctcatcctcgccgagaatgccagtttgctatccctttctgagctcgactcggcgttttcgcaactgcagagtcgactcagaaacctgtccctgcagctcggtgtcgagccggcaatggaggctgctggtgaggaagaagaggaacagagaaaagaggaggagcccccacggccagcggtggctggtcctagaaggcacgttcttctgatggctactactcggacaggttcttccttcgtgggtgagtttttcaaccagcaaggtaatattttctatttgttcgaacccctgtggcacattgaaagaacagtgagctttgaaccaggtggagctaacgctgctggatctgcccttgtatacagagacgtgctgaaacagctttttctgtgtgatttgtatgttctggagcacttcatcactcctctgccagaagatcacctgactcaatttatgttccgccgtggctcctcaaggtccctgtgtgaggaccctgtttgtacccccttcgtgaaaaaggttttcgaaaagtaccactgcaaaaaccggaggtgcgggcctttaaacgtgacgcttgcagctgaggcctgcaggaggaaggagcatatggctttgaaggcagtaaggattcgccaactggagtttctgcagcccttggcagaagatccccgtctggatctccgcgtcatccagctcgtgagggatcccagagccgtgttagcttctcggatggtggccttcgcgggtaaatacaaaacatggaaaaagtggctggacgacgaggggcaagacggacttcgagaagaggaggtacagcggcttaggggaaactgcgaatccatccgactgagcgcagaattgggcctccgacaacctgcatggctccggggacggtacatgctggtgagatatgaggacgtggccaggggacctctgcagaaagccagggaaatgtatagatttgcaggcattcccctaaccccacaggtagaggactggattcaaaagaacacgcaggcggctcatgacggatccggaatatactctacccagaagaattctagcgaacagtttgagaagtggcgattttctatgccattcaagctcgcacaggtggtgcaagcagcctgcgggccagccatgagactctttgggtacaaactcgcccgtgacgcggctgcactgactaaccggtcagtaagcctccttgaggagcgaggcacattttgggtcacatag

SEQ ID NO: 216964 - DNA, 1236 bp, synthetic construct
  misc_feature 1..1236: note = Description of Artificial Sequence: Synthetic coding sequence
  source 1..1236: mol_type = other DNA
atgcaatgttcttggaaggccgttttacttctggctcttgctagcattgcaattcagtacaccgcgatcagaacatttaccgccaagtctttccacacctgcccaggcttggctgaggctggcttggccgaaagactgtgtgaggaaagccctacttttgcctacaatctgtccaggaagactcacattctcattctggccaccacccgtagcggttcctccttcgtggggcagctttttaaccagcacctagacgtgttctatttgttcgagcctctctatcatgtccagaacacacttattccacggtttacccaaggtaagtcccctgccgacaggcgtgtgatgctgggggctagccgcgacctcctccgctccctctacgactgcgacctttatttcctggagaattacataaagcctccaccggttaatcataccaccgaccgaattttcagacgtggcgctagccgggtgctttgttccaggcccgtttgcgatccaccgggtccagctgatctggtcctggaagagggcgattgcgtccggaagtgtggcttactcaacttgacagtggctgccgaggcatgcagggaacgttcacacgtagccattaagacagtgagagtgcctgaagtgaatgacctgcgagctctcgttgaagacccccgtctcaacttgaaggttatacagctggtccgggaccccagaggaattctcgcaagtaggagcgagacattcagagacacgtatagattgtggcggttgtggtacggtacaggcagaaaaccctataatctagacgtgacccagctcacaactgtgtgcgaagacttctccaacagcgtctccaccggccttatgcgtccaccctggttgaagggtaaatatatgctcgttcgctacgaagatctcgcacggaaccccatgaagaagacagaggaaatatacggattcttggggataccactggattctcacgtggctcgctggatccagaataacacccgcggtgaccccaccctcggcaaacataaatacgggaccgtgcgaaactccgcggcaacagctgagaagtggcggttcagactgtcctatgatatcgttgcctttgcccagaacgcctgtcaacaagtgctcgcccaattaggctacaagatcgccgcaagtgaggaagaactgaagaatccctctgtgtccctcgtcgaggaaagagattttaggcctttctcatag

SEQ ID NO: 216965 - DNA, 1131 bp, synthetic construct
  misc_feature 1..1131: note = Description of Artificial Sequence: Synthetic coding sequence
  source 1..1131: mol_type = other DNA
atgttccctcggcctttgactccgctggctgcccctaatggggcagagcccctggggagggccttaaggagagcccctctcgggcgagccagggctggcctcggaggccctccactcttgctcccttcaatgttgatgtttgctgtgatcgtcgcctcttcaggcctcttattaatgatcgaacggggaatcttggctgagatgaagcctctgccccttcacccacctggtcgtgagggcacggcgtggcgcggaaaggccccaaagcctggagggttgtccctgagggcaggcgacgctgaccttcaggttcgtcaggatgtacggaatcgaacgctccgagcagtctgcggccagcccggtatgcctagagatccttgggacctgcccgtaggccaacggagaaccctgcttcgccatattcttgtgtccgacagatataggttcttgtactgttatgtgcccaaggttgcttgctctaattggaaacgggtcatgaaggtgttagcaggcgttttggactctgtggacgtgcgcctcaagatggatcataggtcagatctggtttttctcgctgacctgcgtccagaagagatacggtataggctgcaacattattttaagttcttgttcgtgagggaaccgctagagcgtttactctccgcatacagaaataagtttggggagatacgagagtatcagcagcgttacggggctgagatcgtgaggaggtaccgcgctggagccggtccctcacctgccggagatgacgtgacctttcccgaattccttagatacctcgtggacgaggatccagagcgaatgaacgagcattggatgccagtctatcacctctgccagccttgtgccgtgcattatgactttgtcggctcatacgaaaggctggaagccgacgctaatcaagtgctagaatgggtgagggcaccgcctcacgttcgcttcccagccaggcaggcctggtacagaccggcttccccagagtctctgcattatcacctttgtagtgcccctcgcgctctactgcaggatgtcctgccaaagtatatcttggacttcagcttgttcgcgtacccccttcccaatgtcactaaggaggcgtgtcagcaatag

SEQ ID NO: 216966 - DNA, 1275 bp, synthetic construct
  misc_feature 1..1275: note = Description of Artificial Sequence: Synthetic coding sequence
  source 1..1275: mol_type = other DNA
atgacgctacgtcctggaaccatgcggttggcctgtatgtttagctccatattgctcttcggggctgctggcctactcttgttcattagtctacaggacccgacagaactagcgcctcaacaagtccctgggatcaaattcaacattcggcctaggcaaccacaccacgatcttccgcctggcggatcacaggatggagacctgaaggaacccactgaacgcgtaactagggacctctcaagcggggctccaagggggaggaatcttccagctcctgaccagcctcaaccccctcttcagaggggcactaggctgaggctgcgacagcggcgacgtcgtctcctaattaagaagatgcccgctgcagctaccattccagctaactcctccgacgcacccttcattaggccgggacctgggacacttgatggaaggtgggtgagcctgcaccgcagtcaacaagagagaaaaagagtgatgcaggaggcgtgcgccaaatatcgggcttccagtagtcgccgagcagtgaccccgcgtcatgtgagccgaattttcgtcgaggacagacatcgggtcttatattgcgaggtgccaaaagcaggttgcagcaattggaagagagtcctcatggttcttgcaggactggccagtagcacagccgatattcagcacaacacggtacattacgggtccgccctcaagaggctggacacctttgataggcagggtattttacatcgtttgagtacgtacacgaagatgctctttgtccgagaacctttcgaacggttggtgagtgcgtttcgagacaagttcgaacacccgaacagctactaccatcccgttttcggaaaggctattctggccagatatagagccaacgccagcagggaagctctgcgcaccggcagtggagtgcgtttcccagagttcgtgcagtatcttctggacgttcacaggcccgtcggcatggacattcactgggatcatgtcagtagattgtgtagtccgtgtttgattgactatgactttgtagggaagtttgagagtatggaagatgatgctaacttttttctctcactgattcgcgcacccagaaacctcacattccctaggtttaaggataggcattcacaggaagcgagaaccacagctaggattgcgcaccagtattttgctcagctgtctgctctgcagcgtcagcggacgtatgatttctattacatggactacctcatgttcaactactctaagccctttgcagatctgtactag

SEQ ID NO: 216967 - DNA, 1275 bp, synthetic construct
  misc_feature 1..1275: note = Description of Artificial Sequence: Synthetic coding sequence
  source 1..1275: mol_type = other DNA
atgacactgcgtcccggaacaatgaggctggcttgcatgttcagcagtatcttgctgttcggggcagctgggctactgctgttcatctcgctgcaagatcctactgaactggccccacaacaagtgccagggattaaatttaatattagaccgagacagccccaccatgatctgccgccaggtggatctcaggacggagacctgaaggagcctaccgagagggtgacacgggaccttagtagcggcgctcccaggggacgaaatctccccgctcccgaccagccacaacctcccttacagcgcggtactcgactcagattgcgccagcgccgacggaggctgcttatcaaaaagatgcccgctgccgctactataccggcaaactcatctgatgccccttttattaggcccggtcccggaacactggacggtcgatgggtgtccctccaccggagccaacaagaacggaagcgcgtgatgcaggaagcctgcgcaaagtatagagcctcatcatcacgccgtgccgttaccccaagacatgtctcacgtatttttgtggaggatcgccatcgggtcctttattgcgaggtacctaaggctggttgttccaattggaagcgcgtcctaatggtccttgccggtctcgcatcaagcactgccgacattcaacacaacaccgtgcattatgggagtgcccttaaacgtctcgacaccttcgataggcagggcatccttcatagactttccacttatacaaaaatgctgttcgtgcgagagccttttgaacgattggtgagtgcttttcgggataaattcgagcatcccaacagttactaccatcccgtgttcggcaaagccatcttggccaggtatcgcgcaaatgcctcgagggaggccttacgaaccgggtccggcgtgcggttcccagagtttgtgcagtatctgttggatgtccataggccagtaggaatggacatacactgggatcacgtttctcgcctgtgctctccctgcctcatcgactacgactttgtgggaaaattcgagagcatggaagatgatgctaacttctttctctctctgattagagcgcctagaaatctcacttttcctcggtttaaggaccggcactctcaggaggccagaaccaccgctcggatcgcccaccagtactttgcccagctttccgcactgcaacggcagcgtacctatgatttctattatatggactacttgatgttcaattattctaaaccttttgccgatttatattag

SEQ ID NO: 216968 - DNA, 1275 bp, synthetic construct
  misc_feature 1..1275: note = Description of Artificial Sequence: Synthetic coding sequence
  source 1..1275: mol_type = other DNA
atgacactcagacctggaacaatgcgtctggcttgtatgttcagtagtatcttactgtttggtgccgcaggcctccttctgtttatttctctccaggaccccaccgagctggcaccccagcaggtccccggaatcaaattcaacatccggccacgacaaccgcaccacgatctaccgccagggggtagtcaggatggggacctcaaggaacctactgagcgagtcactcgtgacctgtcctcgggagccccaagaggacggaatctgccagctcctgatcagccacaaccgcctctgcagcgtggtacacgactcaggctcagacaacgacgcaggcgtctcctgatcaagaaaatgcctgccgctgccacgatccctgctaactcctcagatgccccattcatacgccctggcccaggcacactggatgggagatgggtctcactccacaggtctcagcaggagcgcaaacgcgttatgcaagaggcctgtgcgaagtaccgcgcatctagcagtaggcgggctgtgaccccaaggcacgtcagcaggatctttgtggaggaccgacaccgggttctatattgcgaggtcccaaaggccggatgctctaattggaagagagtgctgatggtcctcgccggtttagcatcttcaaccgcagatattcagcacaacacagttcattacgggtcggccctcaaaagactggacaccttcgatcgccaaggcattctccacagactgagcacatataccaaaatgctctttgtcagggagccctttgagaggctggtcagtgccttccgtgacaagtttgagcaccccaacagttactatcacccagtctttggtaaagccattctggcgaggtacagggccaacgccagtagggaggcccttcgcacaggctctggggtccggttcccagaattcgtccagtacttactcgatgtgcatagacccgttggcatggacatacactgggatcatgtctcgcggttgtgttccccgtgtcttatcgactacgacttcgttggaaagttcgagtcaatggaagacgacgcaaactttttcctatcattaatcagagctccacggaacttgacttttccaaggttcaaagaccggcactctcaggaagcacggacgaccgcaaggatcgcccaccagtacttcgctcagttatccgccctgcagaggcagcgcacctatgacttttactatatggattacctgatgtttaattactccaaaccatttgccgacctgtattag

SEQ ID NO: 216969 - DNA, 1686 bp, synthetic construct
  misc_feature 1..1686: note = Description of Artificial Sequence: Synthetic coding sequence
  source 1..1686: mol_type = other DNA
atgcgacactgtatcaattgttgtatacagctactaccggacggggctcacaaacagcaggtgaactgccagggcggtcctcaccatggtcatcaggcatgccctacctgcaaaggggaaaataagattctcttccgggtcgatagcaagcaaatgaacctcctggctgtacttgaggtgcgcacagaagggaacgagaactggggcggtttcctacgtttcaagaaaggtaagagatgttctctggtgttcggactcatcatcatgaccctggtgatggcctcctacatcttgtccggcgcacaccaggagctgctgatcagtagcccttttcattatggcggatttcccagcaatcctagtctaatggactctgaaaatcccagtgacacaaaagagcatcaccaccagtcatcagttaacaatataagctacatgaaggactacccatcaatcaagcttattatcaactccattaccaccagaattgaatttaccaccaggcagctgcccgatcttgaagaccttaagaaacaggagcttcatatgttctctgttattcctaataagttcctcccaaattctaaaagcccatgttggtacgaagagttttccggccagaacacaaccgacccttacttaactaattcttacgtgctttatagcaagcggttccgtagtaccttcgatgcgctgagaaaggccttctggggtcacctagcgcacgcacatggtaaacacttccggctgagatgtctaccccacttctatatcataggccagcctaagtgcggcactactgatctgtacgaccgcctgagattgcatcccgaggttaagttttcagccattaaggaaccgcactggtggacgcgaaagcggttcgggatcgtgagactacgcgacggcctgagagaccgttatccagtcgaagattacctcgatctcttcgacctcgcggcacaccagatccaccaaggtctgcaggcctccagcgctaaggaacagtcaaagatgaacaccataatcattggcgaggcgtccgcttccacaatgtgggataacaatgcctggacattcttttatgacaactctaccgacggcgagcctccctttctcacacaggatttcatccatgcttttcaacccaacgctcggctcattgttatgctgcgagatccagtcgaaagactgtattctgattatctgtactttgcttcgtccaataaatcggctgacgatttccatgaaaaagtaactgaagctttacagctgtttgaaaattgtatgctggattactctttgcgtgcctgtgtgtataacaacaccctgaacaacgcaatgcctgtgagacttcaggtggggctgtacgccgtttaccttctggactggctgagcgtgttcgataagcaacaattcctgatcttacggctcgaggatcatgcctcaaatgtcaaatatacaatgcataaggtttttcaattcctgaacctggggcctttatcagaaaaacaggaggctcttatgactaaatctcccgctagtaacgctagaaggccggaggatcggaatttgggcccaatgtggccgatcactcagaagatactcagagatttttaccgcccttttaacgctaggctggcccaggtgctcgctgacgaagccttcgcctggaagaccacttag

SEQ ID NO: 216970 - DNA, 1521 bp, synthetic construct
  misc_feature 1..1521: note = Description of Artificial Sequence: Synthetic coding sequence
  source 1..1521: mol_type = other DNA
atgaggcactgcattaactgctgtattcagctgttaccagacggcgcacacaagcaacaggtgaattgtcagggagggccacatcacggccaccaggcctgccccacctgtaaaggtgagaacaaaatattatttagagtggatagtaagcaaatgaacctccttgccgtcctcgaagtgcgtactgagggcaacgagaattgggggggtttcttgcgcttcaagaagggcaaaaggtgtagcctggtgtttgggcttatcatcatgaccctggtgatggccagttacatcctatcaggcgcacaccaggaactgctcataagctcacccttccactacgggggattcccttctaacccatctctcatggactcggagaacccatcagataccaaagaacaccaccatcaatcatctgtgaacaatatctcttatatgaaggattacccttctattaagctgataattaattcaatcacaactcgaatagagttcaccacgagacagctgccagatctagaagacctcaagaagcaggagttgcacatgttctcagtgattcctaataaattcttaccaaactcgaagagcccctgctggtatgaagagttcagcggccaaaatacaaccgacccttatctgactaatagttatgttctttactcaaaacgcttccgatctacctttgatgcgttgagaaaggctttctggggtcacttggcccacgctcacgggaagcactttcgactgaggtgcctgccacacttttacataatcgggcagcccaagtgtggaaccaccgatctgtacgacagactgcgtctccacccagaagtgaaattcagcgcgattaaggagccccactggtggacaaggaagcggtttgggattgtcagactgcgcgacggcttgagggaccgctatcccgttgaggattatttggacctttttgatctggcagcacatcaaattcatcagggcctccaggcctcaagcgccaaagagcagagtaagatgaacacaatcattatcggggaagcttctgcgtctacgatgtgggacaacaatgcttggaccttcttttatgataattctacagatggggaaccccctttcctcacacaggacttcattcacgcctttcagccaaatgcccgtctgatcgtcatgctccgggatcccgttgaaagactctacagtgactacctctatttcgcatccagcaataagtctgccgacgattttcacgaaaaggtgaccgaggctctccagttgtttgagaactgtatgcttgattatagcctccgagcctgcgtgtataacaatacgttgaacaatgctatgccggtatgcacccctcccccaagaacacctcgagctggtccttggcaaaaggaattggtttgctgctattatgcaagcgggatagtcggattacgtttctccatcggtacggagcggtctgtgctcatgtgtaaatgttgctctccactgttcatggatgtgaaagctgaaaattag

SEQ ID NO: 216971 - DNA, 624 bp, synthetic construct
  misc_feature 1..624: note = Description of Artificial Sequence: Synthetic coding sequence
  source 1..624: mol_type = other DNA
atgcgccactgcatcaactgctgcattcaattgctccccgatggagctcacaaacaacaagtaaattgtcaggggggacctcaccacgggcaccaggcatgccctacctgtaaaggggagaacaagatcctgttcagggtggattcaaagcaaatgaacctgcttgccgtcctggaggtgaggacagaagggaatgaaaactggggagggtttcttaggttcaaaaaagggaagcgctgctccctcgtgttcggcctcattataatgacacttgtaatggcatcctacatcctctctggggctcaccaggagctgctaattagctctccattccattatggcggtttcccatctaacccatccctgatggattccgaaaacccatctgatacgaaggaacatcaccatcagtcgtccgtgaacaacattagctatatgaaggattacccgtctatcaagctgattattaactccattaccacacgcattgagtttacgacccgccaactcccagatttagaggatctgaagaaacaagagttacatatgttctcagttatacccaacaaattcctgcccaagcacaatgcgcaggcagaactgggcctaaatgtggcctgttag

SEQ ID NO: 216972 - DNA, 1686 bp, synthetic construct
  misc_feature 1..1686: note = Description of Artificial Sequence: Synthetic coding sequence
  source 1..1686: mol_type = other DNA
atgaggcactgtatcaattgctgcatacagttgcttccagatggcgctcacaagcagcaagttaattgtcagggcggtccgcatcacggacaccaagcttgtcccacgtgcaaaggcgagaataagatcctgtttcgggtcgacagcaaacagatgaacctgcttgctgtcttagaggtcaggactgaggggaatgaaaattggggcggattccttcggttcaagaagggcaagcgctgcagcctggtgtttgggctgatcattatgactctggtgatggcatcctatatcctctccggggctcatcaggagcttctcattagctctccattccactacgggggatttccttcaaatccaagtctgatggacagcgagaacccctctgatacaaaagaacaccaccatcagtcctctgtgaacaatatcagttatatgaaggattaccccagcataaagttaattatcaacagcatcacgactaggattgaattcaccactaggcagctgccagaccttgaggatttgaagaagcaagagttgcacatgtttagtgtgattcctaacaagtttcttcctaactcaaagtccccctgttggtacgaggagtttagtggccagaatactactgatccgtatctaacaaacagctacgttctgtatagtaaaagatttaggtcaaccttcgacgcactcaggaaggcgttttgggggcacctcgcccacgcacacggaaagcactttaggctgcggtgtctgccccacttttacatcattggccaacccaaatgtgggacgaccgacctttatgataggctaaggctgcatcctgaagtgaaattttctgccatcaaagaaccacactggtggacccgcaaacgtttcggaatcgtgagactgagagatggtctgcgggacagataccctgtcgaagactatcttgatctgtttgacctcgcagctcaccaaatacatcagggacttcaagcatcttccgccaaggaacagagtaagatgaataccattataatcggcgaggcatctgcaagcactatgtgggacaacaacgcatggaccttcttctacgacaattctaccgacggggaacctccttttctaactcaagactttatccacgcatttcagccaaatgctcggctaatcgttatgttgcgggaccccgttgagcgcttgtattctgactatctctacttcgccagttctaacaagagtgcagatgatttccatgaaaaagttacggaagctcttcagttgtttgagaattgtatgctggattatagcctccgcgcttgcgtttataacaatacccttaataacgccatgccggtccgactgcaggtcggcctgtatgccgtttatctgctagattggctgtcagtctttgacaaacagcagttcttgatccttagactggaagaccatgcgtctaacgtaaagtataccatgcacaaggtgttccagttcctaaatctaggtcctcttagcgagaagcaggaagcgctgatgacaaagagtcctgcgtctaacgcccgtcgccctgaggatcgcaatttgggaccaatgtggcctattacacagaagatcttgagggatttttacaggccctttaatgccagactcgctcaggtgctggctgatgaagcgttcgcttggaagacaacctag

SEQ ID NO: 216973 - DNA, 1449 bp, synthetic construct
  misc_feature 1..1449: note = Description of Artificial Sequence: Synthetic coding sequence
  source 1..1449: mol_type = other DNA
atgcgacactgcatcaactgttgcatccagcttttgcccgatggcgcacataaacagcaggtgaactgccaagggggtccacatcacggccaccaggcgtgtcctacttgtaagggcgagaataagatcctattcagggtggactccaagcaaatgaatctgctcgcagtgctggaggtgaggactgaaggcaacgagaattggggcggtttccttaggtttaagaagggtaagagatgctcacttgtgtttggtctgataattatgaccctggtcatggcctcctatatcctttctggggcacatcaggagctgttgatttcttcaccattccactatgggggtttcccatccaatccaagcctcatggattccgaaaatccttctgacacaaaagagcatcaccatcagagctccgtgaacaatatctcgtacatgaaagattatccaagcatcaagttaattattaattcgattacgacgcggatagagttcaccaccagacagctccccgatttagaggacttgaagaaacaggagcttcacatgtttagcgtcattcccaacaaattcctcccaaattctaaatccccctgttggtacgaggagttctcgggccagaacaccactgacccttatctcacaaacagctacgttctatactccaagagatttcggagcacttttgatgcccttcgcaaggcattctggggacacctggcacacgcccatggaaagcacttcagactgcgttgtctaccacacttttacattattgggcagcccaaatgtggcacaacagacctgtacgataggctaagacttcatcccgaagtaaagttttcagccattaaagaaccccactggtggaccaggaaaaggttcggcattgtgagattaagggacgggcttcgagaccggtaccccgttgaggattatctcgacttatttgacctggcagctcaccaaatccaccagggattacaggcatcttccgcaaaagaacagagtaaaatgaataccataatcatcggggaggcctccgcctcgaccatgtgggacaacaacgcctggaccttcttctacgataactccactgacggagagcctccgttcctcacacaggacttcatacatgcctttcagccgaatgcacgcttgatcgtgatgctgagagatccagttgagcgcttatatagtgactacctatactttgcttcttctaataagtccgccgacgattttcatgagaaggtcactgaggccctccagctgttcgagaattgcatgctggactacagccttcgagcctgcgtctataacaatacattgaacaacgccatgcccgtttgcacgcctcctccggtgccccctgagctggctcccggacgacgtagctggttcgtggtgatcatgcaggccgctctgtgggtgtgtgtgagcgcatag

SEQ ID NO: 216974 - DNA, 1236 bp, synthetic construct
  misc_feature 1..1236: note = Description of Artificial Sequence: Synthetic coding sequence
  source 1..1236: mol_type = other DNA
atgggtatgcgggcaagggtgcctaaagtcgcccactcaactaggcggcctcccgcagcacgtatgtggttaccacggttcagttcgaagaccgtgactgtgttgcttctggcccagactacatgcttgctgctgttcattatctccaggccaggaccttccagcccagccggtggagaggaccgagtccatgtattagttctgtctagctggcgcagcgggtcatcctttctcggacagctgttcagccaacaccctgacgtgttttacctcatggagcctgcttggcacgtctggacgaccctgtctcaaggatcggctgccaccctgcatatggccgttcgggacttaatgagatctatctttctctgcgacatggatgtgttcgacgcgtacatgcctcagtctcgcaacctgagcgccttttttaattgggcaacaagcagggcattgtgttctccacctgcatgttccgcctttccaaggggcaccattagcaaacaggatgtgtgcaaaaccttatgtactcgccagccattctcacttgctcgcgaagcgtgcagatcttatagccacgtggtcctcaaagaggtacggttcttcaatctacaagtgctgtatcctttgctctccgatccagctcttaatttacgcattgtgcatctggtgcgtgatcccagagctgtcctgcggtcacgggaggccgcaggacccatattggcccgagataatggcatcgttctgggcaccaatggcaaatgggtcgaggccgacccccatctccgcctgataagagaggtttgcaggtctcatgtgcgcattgcagaggccgctacgttgaagcctccccctttccttaggggaaggtatcggctggtgagatttgaggatctcgccagggagcccctggcagagatccgagccctctacgcttttaccggcctaacactgacaccccagctggaggcatggatacacaacataacgcacggttccggtatcgggaaaccaatagaagcctttcataccagtagtagaaacgcccgaaacgtgagccaggcttggaggcacgctttgccctttaccaaaatcctaagagtccaggaagtgtgtgctggcgctctgcagctgcttgggtatcgcccagtgtactcagccgaccaacagcgagacctgactctcgatctcgtgctgcctcgagggcctgaccacttctcatgggcaagcccagactag

SEQ ID NO: 216975 - DNA, 1254 bp, synthetic construct
  misc_feature 1..1254: note = Description of Artificial Sequence: Synthetic coding sequence
  source 1..1254: mol_type = other DNA
atgagcaggcacttaccctggatctgtgaccagcggtgctcatctccttcatccccaggcagatggcctcctgccgctagaatgtggcttcccaggttctctagtaaaactgtgaccgtcctgctgctcgcccagaccacatgtcttctgcttttcataatctctcggcctggtcccagtagtccagccggaggtgaagacagggtccacgtccttgtgctgtcttcctggcgctctggttcttcctttctggggcagctgttttcgcagcatcctgatgttttttacttgatggagccagcttggcatgtgtggaccaccttgtctcagggcagcgctgccaccttgcatatggctgtgagagacttaatgaggagtatctttctctgcgatatggacgtcttcgacgcctatatgccccagagccgtaatttatccgccttttttaattgggctacctcaagggcactgtgtagccccccagcctgcagcgccttccctagaggcacgattagcaaacaagacgtctgcaagacgctttgcactcgtcagccttttagcttagctagggaagcgtgtaggtcgtacagccacgttgtccttaaggaggtgcggttttttaatctccaggtactgtatcccctgctatccgaccccgctctaaacctgaggattgttcacctggtccgcgatccccgagccgttctacgttcgcgagaggctgctggacccatactcgcccgtgacaatggtatcgtgctgggcactaacgggaaatgggtcgaggcggacccccaccttcggctcattcgtgaagtgtgccggtctcacgtgcgcattgcggaggccgcaacactgaaaccccctccttttcttcggggtagatataggctcgtccggttcgaagacctggcaagagaaccactggcggagatcagagctctctacgcctttaccggactcaccctcactcctcagcttgaagcctggatccataatataacccacgggagtggaatcgggaaacccatcgaagccttccacacaagctcccgtaatgctcggaatgtgagccaggcctggcggcatgccttacctttcactaagatccttcgggtccaagaggtttgtgccggtgccctgcaacttctagggtacaggccagtgtactcagccgaccagcagcgtgatctcactcttgacctggtgcttcctagaggcccagaccacttcagttgggcctctcccgattag

SEQ ID NO: 216976 - DNA, 1188 bp, synthetic construct
  misc_feature 1..1188: note = Description of Artificial Sequence: Synthetic coding sequence
  source 1..1188: mol_type = other DNA
atgtggttaccaagggtcagtagcaccgccgtcaccgctctgttactcgcccagacattcttattacttttcctcgtctcccgccctggtccctcaagccctgctggcggtgaggctagggtgcatgtactggtgctcagtagctggagaagcggctcaagcttcgttggccagttgtttaaccagcacccagatgtattctatttgatggagccggcttggcacgtgtggacgaccctcagtcagggcagcgccgcaaccctgcacatggccgtgcgggacctggttaggagcgtgtttctctgcgacatggacgtgtttgatgcgtacttgccatggaggaggaatctatctgatctattccagtgggcggtgagtcgcgctctttgttccccccctgcatgctccgctttcccccgtggtgccatctccagcgaggctgtttgcaagccactctgtgctagacagtctttcacattggcacgcgaggcgtgtcggtcatatagtcatgtcgtcctaaaggaggttcgattttttaacctccaagtgctgtacccactgctttctgatccggctctaaatctgaggatagttcacctagtaagggatccccgtgccgtgctgaggtcccgagaacaaaccgccaaggcacttgccagagacaacggtattgttctgggcaccaacggaacatgggtcgaagctgatcctggactccgcgtcgtgagggaggtgtgccgttcccatgtgcgtatagcagaggccgcaacactcaagccacccccattcctgcgaggacgctaccggcttgtgcggtttgaggaccttgctcgggaacctctcgcggagatcagggctctctatgctttcacaggcctatctctgacgccacaactggaagcctggattcataacataacccatggaagcggtcctggggctcgcagggaagcattcaagacaagcagccgtaacgccctaaacgtgtcccaggcctggcgccacgcactcccctttgcaaagattagaagggtacaagaactatgcgcaggagcactccagctgcttggctaccgtccggtgtattctgaagatgaacagaggaaccttgcgttagatctagtcctgccacggggtctgaatggatttacctgggcatcatccacagccagccacccgagaaactag

SEQ ID NO: 216977 - DNA, 1188 bp, synthetic construct
  misc_feature 1..1188: note = Description of Artificial Sequence: Synthetic coding sequence
  source 1..1188: mol_type = other DNA
atgtggctgccgcgagtctcctccaccgcagtcaccgcattgctccttgctcaaacctttctgctgctgttcctagtgagccgcccaggaccttccagccccgcaggtggagaagcccgtgttcacgtgctggttttgtcctcctggcgctcgggctcatcttttgtcggtcagctttttaaccagcatcccgacgtcttctatcttatggaaccggcatggcacgtctggacaaccctgtcacaggggagcgccgctaccctccatatggcagttagagatctggttagaagcgttttcctgtgcgatatggacgtctttgacgcttacttgccgtggaggcggaatctgtctgatctatttcagtgggcagtttcacgggctctgtgttcacctccggcttgctccgcctttcctagaggggctatttcctccgaggctgtctgcaagcctctctgtgcaagacaaagctttactctggcacgggaggcctgtcgcagttacagtcacgtcgtgctgaaagaagtccggttctttaatttgcaggtactgtatcctctgctgtccgacccagccttgaacctgaggatcgttcacctggtgagggacccgagggctgtgctcaggtctcgggagcaaaccgccaaagcactggcccgagataatggaatcgttcttggtactaatggcacctgggtagaagcagatccaggcctgcgcgtggtgcgagaagtgtgccgtagccacgtccgcatcgctgaggccgctaccctcaagcctcctccctttctgcggggtcgctataggctggtccggttcgaggatctggcgagggaaccgctagcagagattagagccctctatgctttcacaggtttgagtcttaccccccagctcgaagcatggatacataacattactcacggcagcggtcccggtgccagaagggaggccttcaaaacctcatctagaaacgctctgaacgtgtctcaggcctggcgccacgctctgcctttcgccaagattcggagggtgcaagagctttgcgccggtgctctacagctgctggggtacaggcctgtctatagcgaggacgaacagcgaaacctggccctggatctcgtgttgcccaggggcctgaacggattcacctgggcctcgagcaccgcctcccacccccgaaactag

SEQ ID NO: 216978 - DNA, 1461 bp, synthetic construct
  misc_feature 1..1461: note = Description of Artificial Sequence: Synthetic coding sequence
  source 1..1461: mol_type = other DNA
atgaagggacgcaggcggaggcgcagagagtattgcaagtttgctttacttctggtcctttacaccctggttttgctcctcgtgccctccgtgctggacggcggtagggacggggacaaaggggctgagcactgccccggtctccagcggagcctaggtgtatggagtctggaggcagctgctgctggagaaagagagcagggcgctgaagcacgtgccgcagaagagggtggcgctaaccaatcacctcgtttcccttccaacttatctggggctgtgggcgaagcagtgtcacgggaaaagcagcacatttatgtgcacgccacttggagaactggaagttccttccttggcgagctgttcaaccagcaccccgatgtattttatctctacgagcccatgtggcatctgtggcaggcgctgtatccgggtgatgcggagtctctccaaggcgctctacgtgacatgttgaggagtttgttcaggtgcgactttagcgtgttacgactttatgcccctcctggcgaccctgctgcaagagcacccgacaccgctaatctaaccaccgccgcactattccgctggaggacaaataaggtcatttgtagtccccctctgtgccccggagccccacgtgctcgagccgaagtgggcttggtggaggataccgcctgcgagaggtcatgcccacccgtggcaattcgcgcactcgaggctgaatgccgcaagtacccagtcgtggttatcaaggacgttagactgctcgacctcggggtgctcgtgcccttactgcgcgatccaggacttaatctaaaagtagtgcagctctttcgcgaccctagagcggtgcacaatagtcggctgaaaagccggcaagggctactccgtgaatcaatccaggtcttgaggactcgccagagaggagacagatttcaccgcgtgctcctggcccacggcgtcggggctaggccaggtggtcagtcccgcgcactgcctgctgcaccgagagctgacttttttctcacaggtgcattggaggtaatctgcgaagcatggcttcgcgacttactctttgccagaggagctccggcttggctgcgaaggcgatatttgagacttcggtatgaagatctcgtaagacagcccagagcacagcttcgcaggctactgagattttctggactaagagccctcgcagctctggacgccttcgccttaaacatgacacggggtgcagcttatggcgctgaccgtccctttcacctgtctgctagagatgctagagaggcagtccacgcctggcgtgagcgactttcccgagaacaagttcgtcaggtggaggctgcctgcgcaccagccatgaggcttctggcctatccaagatctggggaagagggtgatgccgagcagcctagagagggggagacgcctctcgagatggacgctgacggcgctacttag

SEQ ID NO: 216979 - DNA, 1593 bp, synthetic construct
  misc_feature 1..1593: note = Description of Artificial Sequence: Synthetic coding sequence
  source 1..1593: mol_type = other DNA
atgtctcgctctccccaaagagctttgccaccaggtgcactccctcggctgctgcaggccgctcctgccgcagccccaagggcgctccttcctcagtggccccgacgtccaggcaggcggtggcctgctagccccttggggatgaaagtgttccgtcggaaagctttggtgttatgcgccggatatgctttactgctcgtactaaccatgctcaacctgctggactacaaatggcacaaagaaccgctacagcagtgcaatccggacgggccactcggagcagcagccggagcagctggtggaagctgggggaggccaggtcctccccctgcgggaccacccagagcccacgcaagactcgatctccgcacaccgtatagacccccagctgctgcagtgggtgctgcccctgcagctgccgcagggatggcaggcgtggcagctcccccaggcaacggaacacgaggaaccggaggagtgggcgacaagcgccagctcgtgtatgtgttcacaacctggaggtctggttcaagctttttcggagagctgtttaatcaaaatcccgaggtgttcttcttatatgaaccggtgtggcacgtgtggcagaaactttatcccggtgacgctgtgtcccttcagggggctgccagagacatgttgagcgccctgtatcggtgcgaccttagcgtgttccagctgtattcgcccgctggatcggggggtaggaacttgactacactgggtatcttcggcgcagccacaaacaaagtggtctgttcctcccctctttgtcccgcataccgaaaggaagtcgtcggcttagtcgatgaccgtgtgtgcaaaaagtgtccaccccagagacttgctagatttgaggaagaatgtcgtaagtacaggaccctggtcatcaagggtgtgagagtcttcgatgtggcggtcctggcacccctcttgcgggatcctgccttggatttgaaggtaatccatctcgtgcgagacccacgggcagtggcctcctccagaatacgttctcgccacggacttataagagagtctctgcaggttgtgagatctagagaccccagggcccatcgtatgccttttctcgaagctgctgggcacaaactcggagctaaaaaagaaggggtcggcggaccggctgattaccacgccctgggggcaatggaagtcatttgcaactccatggcaaagactcttcagactgctctccagccccctgactggcttcaggggcactaccttgtggtccgctatgaagaccttgtgggagatcccgtgaagacattacgcagagtttacgacttcgtgggactcctagtcagtccagagatggaacaattcgcccttaatatgacatcaggatcgggatcgtccagcaagcctttcgttgtgtccgcacgaaacgctacccaagcagccaacgcgtggcggaccgcgctcactttccaacagattaaacaggtggaagaattttgctatcagccaatggcggtccttggatacgagagagtaaactcacctgaggaggtcaaagatttgagcaaaacattgctccgcaagcctcgcctctag

SEQ ID NO: 216980 - DNA, 1071 bp, synthetic construct
  misc_feature 1..1071: note = Description of Artificial Sequence: Synthetic coding sequence
  source 1..1071: mol_type = other DNA
atgcaccatcagtggctgctgctggccgcatgtttctgggtgatattcatgttcatggtggcctctaaattcattaccctgacgtttaaagatcctgatgtttactctgccaagcaggaatttttgtttctgactaccatgcccgaggtcagaaaattgccagaagaaaaacacatacctgaagagctgaaaccaacaggaaaggagctcccagactctcagttggttcagcccctggtctacatggagcgcctggagttgattcgaaatgtatgtcgcgatgacgcgttgaagaatttatctcacacccctgtctctaaattcgtcctcgatcggatctttgtatgtgacaagcataagatacttttttgtcagacacccaaagttggtaacacacaatggaagaaagttctgatcgttcttaacggggctttttctagcattgaggagatccctgagaatgtggttcatgaccatgagaagaatggactccccaggctcagctctttttctgatgcagagatccagaagcgcttgaaaacctactttaaattttttattgtccgagatccattcgaacgattaattagcgcctttaaggacaagttcgtgcacaaccccagatttgagccctggtatcgccatgagatcgcgccaggtatcatcaggaaatatagacgcaacagaaccgagacccgcggaattcagtttgaagacttcgttaggtacctgggagaccccaatcatcggtggctggatctgcagtttggtgatcatataattcattgggtgacttatgtggagctgtgcgctccctgtgagataatgtacagcgtgattggacatcacgaaaccctggaggatgacgctccttacatcttgaaagaagctggcatcgatcacctcgtttcataccccacaatacccccaggaatcacagtctacaaccgcacaaaagtggagcattactttctgggcatttctaagagagacatccgccgactgtacgcacgcttcgaaggcgatttcaaactgtttggctatcagaaaccagactttttgctgaactag

SEQ ID NO: 216981 - DNA, 426 bp, synthetic construct
  misc_feature 1..426: note = Description of Artificial Sequence: Synthetic coding sequence
  source 1..426: mol_type = other DNA
atgcatcatcagtggctcctgttagccgcttgcttctgggttatattcatgtttatggtggcaagcaagttcataacgctaacttttaaggatccagacgtttacagtgcaaaacaggagttccttttcctcacaaccatgccggaggtccggaaattacccgaggagaaacatatccccgaagagttaaagccaacgggtaaagaacttcctgacagtcagcttgtacaacctctcgtgtacatggagcgcctggaactgataaggaatgtatgccgcgatgacgccttgaagaacctcagccacaccccagtctcaaaatttgtgctagaccggatcttcgtatgtgataaacataagatcctgttttgtcagacgcctaaagtgggcaacactcagtggaagaaggtactgatagtcctgtag

SEQ ID NO: 216982 - DNA, 1071 bp, synthetic construct
  misc_feature 1..1071: note = Description of Artificial Sequence: Synthetic coding sequence
  source 1..1071: mol_type = other DNA
atgcatcaccagtggctgcttttggcagcatgcttttgggtgatttttatgtttatggttgcctccaaattcattactttaacgttcaaggatccagatgtctactccgccaaacaggagttcctctttctcacgactatgcctgaggttcggaagctcccagaagagaagcacataccagaagaactgaagcctacaggcaaggaattacccgatagtcagctggtgcagcctcttgtgtacatggaacggctggaactgattaggaacgtgtgtcgtgatgatgcactgaaaaatctgtcacataccccggtgtcaaaatttgtcttggataggattttcgtctgcgacaagcacaagatcctgttctgccagacccccaaggttggcaatactcagtggaaaaaagttctgatagtgctgaacggggctttctcctccattgaagaaataccggaaaatgtggtgcacgaccatgagaaaaatggcctaccacgcttaagcagtttcagtgacgcagaaatccagaaaaggctgaagacatattttaagttcttcatcgtgagagacccatttgagcgccttatctccgcctttaaggataagttcgtgcataatccacgttttgagccatggtaccggcatgagatcgcgccaggcatcatacgaaaataccggcgtaaccgaaccgagactaggggaatccaattcgaagacttcgtgcgttacctgggtgatcctaaccatcggtggctggacttacagttcggtgaccacataatacactgggtcacctacgtggagttgtgtgcaccctgcgagattatgtattcagttattggccaccatgagacattggaggatgatgccccttatattctcaaagaggctggcatcgatcatctcgtatcatatcccacgatcccccctgggatcacagtgtacaataggaccaaggttgagcactactttctgggcatatctaagcgcgatatccgcagactttacgcacgatttgagggggatttcaagctttttggttaccagaagcccgatttcctgttaaactag

SEQ ID NO: 216983 - DNA, 195 bp, synthetic construct
  misc_feature 1..195: note = Description of Artificial Sequence: Synthetic coding sequence
  source 1..195: mol_type = other DNA
atgcatcaccagtggttgcttttggccgcttgcttttgggtgatttttatgttcatggttgcaagcaaatttatcacccttacatttaaagaccccgatgtctactcggcgaagcaggagttcttattcctgacaacaatgcctgaagtgagaaagcttccggaggagaagcacatcccggaagagctcaagtag

SEQ ID NO: 216984 - DNA, 402 bp, synthetic construct
  misc_feature 1..402: note = Description of Artificial Sequence: Synthetic coding sequence
  source 1..402: mol_type = other DNA
atgcatcaccaatggttgttgttggccgcatgtttttgggtgatcttcatgttcatggtggcctccaagtttattacactgaccttcaaagaccctgatgtgtattcggccaaacaggaatttctcttcctcactaccatgccagaagttcggaagctccccgaggagaagcacattcctgaggagttaaagccgaccgggaaggagttgcctgattctcagctggtccaaccgctggtgtatatggaacggttggaactcataagaaacgtatgccgcgacgacgctcttaaaaaccttagccacactccagtgtccaagtttgtgcttgacaggatcttcgtctgcgataagcacaagatcctgttttgtcagacaccaaaagtgggcaatacccaatag

SEQ ID NO: 216985 - DNA, 258 bp, synthetic construct
  misc_feature 1..258: note = Description of Artificial Sequence: Synthetic coding sequence
  source 1..258: mol_type = other DNA
atgcaccaccagtggctgctgttggccgcatgtttttgggtgatatttatgtttatggtagcttctaagttcattacacttacttttaaggaccctgacgtgtatagcgcgaaacaggaattcctcttcttgaccaccatgcccgaggtgcggaaactgccggaagagaagcacatccctgaggaactgaagccgacagggaaggagcttcctgactcacaactggtgcagcccttggtatacatggagcgcttatag

SEQ ID NO: 216986 - DNA, 102 bp, synthetic construct
  misc_feature 1..102: note = Description of Artificial Sequence: Synthetic coding sequence
  source 1..102: mol_type = other DNA
atgcaccaccaatggcttttgttagcagcttgtttttgggtcattttcatgtttatggtggcctccaaattcattaccctgacttttaaggatcctgattag

SEQ ID NO: 216987 - DNA, 1215 bp, synthetic construct
  misc_feature 1..1215: note = Description of Artificial Sequence: Synthetic coding sequence
  source 1..1215: mol_type = other DNA
atgcagagaaaagccggaaagaaggagcacgtacagctccgcgataagaggaaccaggagccacagtttaggggcaacaccgccagaaagtgtgagcctcaggcggcagaaggaagagtcagtgagtggctgcggtgcgacaacatgcaccaccagtggcttttgctggcagcttgtttttgggtcatctttatgttcatggtcgccagcaaatttataacgctgaccttcaaggaccccgatgtttactccgcaaaacaggagttcctgttcttaactaccatgcccgaggtgcgaaaactgccagaagaaaaacacatcccagaagaattaaaaccgactggaaaagagctgcctgacagccagctggtacagccccttgtgtacatggagaggctggagctcatccgcaacgtttgcagagacgacgcattgaagaatctgtcccacacgccagtgagcaagtttgtgctggaccggattttcgtatgcgacaaacacaaaatcctcttctgccagacccccaaggttggcaacacccagtggaaaaaggtactcatcgtgctcaatggtgctttctctagcatagaagagatccctgaaaacgtggtgcatgaccatgagaaaaatggcctcccacgcttatcctccttcagcgatgctgaaatccagaagcgcttgaagacatacttcaaattcttcatcgttcgcgatccctttgagcgcttgatctcggcttttaaagacaaatttgttcacaacccccgatttgaaccatggtaccggcacgagatagcccctgggattattcgcaagtatcggcgtaatcgcaccgagacacgtgggatacaatttgaggatttcgtccgctacctcggcgaccccaatcatcgatggctcgatctgcagttcggagaccacataattcattgggttacctatgtggaactttgtgcaccctgtgagatcatgtacagtgttattggccaccacgagaccttggaagatgatgcaccctatatattaaaagaggcgggtatcgatcatctcgttagctaccccaccatccctccgggtattacagtgtataatagaaccaaagttgagcattactttcttggcatatcgaagagggacattcggagactctacgcccgttttgagggggacttcaagttgtttggctaccagaagccagattttctcttaaattag

SEQ ID NO: 216988 - DNA, 786 bp, synthetic construct
  misc_feature 1..786: note = Description of Artificial Sequence: Synthetic coding sequence
  source 1..786: mol_type = other DNA
atggcttcaccagactgggggtacgacgacaagaatgggccagaacaatggtcaaaattataccccatagcaaacggcaataaccagagccctgtggacatcaaaacctctgaaaccaaacacgacactagcttaaaaccgatttcggtctcatacaaccctgcaactgccaaggagatcattaacgtggggcatagcttccacgtgaattttgaggacaatgacaaccgaagcgtattaaagggtggacccttctctgattcttatcggctctttcagttccactttcattgggggagcaccaatgagcacgggtctgaacatactgtggatggagttaaatattccgcggagctgcacgtggcccattggaattctgcaaagtatagctccttagcagaagcagcttctaaggcagacggattggccgtcataggagtcctcatgaaggtgggggaggccaatccgaaacttcagaaagttctggatgccctgcaggccattaagacaaagggtaaaagagcccctttcactaattttgatccctccactcttctgccctcaagcctcgacttttggacatacccgggatctcttactcatccacccttgtatgaatctgtcacatggatcatttgcaaagagtctatttcagtcagttctgaacagctggcacagtttagatcactgctgagtaacgttgaaggtgataatgccgtcccaatgcagcacaataaccggccaacccaacctctcaagggcagaaccgtgcgggcatcattctag

SEQ ID NO: 216989 - DNA, 786 bp, synthetic construct
  misc_feature 1..786: note = Description of Artificial Sequence: Synthetic coding sequence
  source 1..786: mol_type = other DNA
atggcgtcgccagattgggggtacgacgacaagaacggacctgagcaatggagcaagttgtatccaatcgctaacggaaataatcagagccctgtggatattaaaacctcagaaaccaagcacgatacaagccttaagcccattagtgtaagttataaccctgccaccgcgaaagagatcattaacgtaggtcatagcttccacgtgaactttgaggacaacgacaaccgctcggtcctaaagggtgggcctttctccgattcttataggctgttccagttccatttccattggggatccaccaatgagcatggatccgaacacaccgtagacggagtgaagtatagcgctgaacttcatgtcgcacactggaattctgcgaagtatagctccctggccgaggccgcatcgaaggccgatggattagcagtgattggggtactgatgaaggtgggcgaggccaatcccaagctgcagaaggtccttgatgcgctgcaagccattaagactaaggggaaacgggctcccttcactaatttcgatcccagcacccttctgccctcgtcactggacttctggacctaccccggttctctgacccacccccctttgtatgaaagcgtgacctggataatatgcaaagaaagcatttctgtgtcctccgagcagttagcgcagtttagatctttgctgagcaatgtggagggtgacaacgctgtgcccatgcagcacaataataggccaactcagcctctaaaggggcgaactgtcagagcttctttttag

SEQ ID NO: 216990 - DNA, 786 bp, synthetic construct
  misc_feature 1..786: note = Description of Artificial Sequence: Synthetic coding sequence
  source 1..786: mol_type = other DNA
atggcttctcccgactggggttacgacgataagaatggaccagaacagtggtccaagctttaccccatcgcgaatggcaacaaccagagtcctgttgacattaagacttccgaaaccaagcatgacacatcgctgaagccaatctcagtttcttacaatccagcaacagctaaagagataattaatgtaggccactcctttcatgtgaactttgaagataacgataaccgctcagtgctcaaggggggacccttcagtgattcctatagactatttcagtttcacttccactggggaagcaccaatgaacatgggtctgagcatactgttgatggcgttaaatactctgccgaacttcacgtagcccactggaatagcgcaaaatattccagccttgccgaagctgctagcaaagcggatggcttagccgtgatcggcgttctgatgaaggtcggagaggcgaaccctaagttacagaaggtgctggacgccctgcaagctataaagaccaagggcaagcgggcaccatttaccaatttcgatccctccacgctgctgccatcctccctcgacttttggacgtaccctgggtccctgacccacccccctctgtacgagagcgtgacgtggatcatatgcaaggaatccatatccgtctcttcagaacagcttgcacagttccggtcactattatctaatgtggaaggggacaatgctgttccgatgcagcataacaatcggccaacacagccgctgaaaggacgtacggttcgggcaagcttctag

SEQ ID NO: 216991 - DNA, 531 bp, synthetic construct
  misc_feature 1..531: note = Description of Artificial Sequence: Synthetic coding sequence
  source 1..531: mol_type = other DNA
atggcttcccccgattggggctatgatgacaaaaatggacccgagcagtggtccaagctttaccccatcgctaacggaaacaaccagtcacccgtggacattaaaacctctgaaacaaaacatgacaccagtttaaagccaattagcgtgagttataaccccgctactgccaaggaaattattaacgtaggacacagctttcatgtgaacttcgaagacaatgataacagaagcgtgctcaagggcggaccattttccgatagctatcggctgtttcagttccacttccattggggcagcacaaatgaacacggcagtgagcacactgtggacggggttaagtattcagccgaacttcacgtggctcactggaatagcgcgaaatattcatcattggcggaagccgcatctaaggctgacggactagcagtgattggagtgttaatgaaggtcggcgaggcaaacccgaagctccagaaagtactagacgctttgcaggccattaagaccaagggaaaacgcgctccttag

SEQ ID NO: 216992 - DNA, 756 bp, synthetic construct
  misc_feature 1..756: note = Description of Artificial Sequence: Synthetic coding sequence
  source 1..756: mol_type = other DNA
atggcttcccctgactggggctatgatgataaaaacggacctgagcaatggtctaaactataccccatcgccaatggcaataaccagtcaccggtcgatatcaaaacaagcgagaccaagcacgatacatctcttaagccaatcagcgttagctataaccctgccactgcgaaggagatcattaacgtcgggcactcctttcacgtgaatttcgaggataatgacaacaggtccgtgttgaagggcggtccattctcagactcatatcgtctgtttcaattccacttccactggggaagcactaatgagcatggctctgagcacaccgtcgatggagtaaaatatagtgcagagcttcacgtggctcattggaactccgcaaagtactcatctctggccgaggcggcatccaaggctgatggactggctgtcatcggcgtactgatgaaggtcggcgaggcgaacccaaaacttcagaaggtgttggacgctttgcaggcaataaaaacgaaaggcaagcgcgcaccattcaccaatttcgatccctcaaccctgttgccttctagtctcgatttttggacgtatcctggatccttgactcaccctcccctgtacgaaagcgttacatggatcatttgtaaggagagcattagtgtctcctctgagcaactggcccagttccgctcactcctcagcaacgtggaaggagacaatgcagtgcccatgcagcataacaaccgcccaacacagccatag

SEQ ID NO: 216993 - DNA, 69 bp, synthetic construct
  misc_feature 1..69: note = Description of Artificial Sequence: Synthetic coding sequence
  source 1..69: mol_type = other DNA
atggccagcccggattggggctacgacgataaaaacgggcctgagcagtggagcaagctatacccttag

SEQ ID NO: 216994 - DNA, 450 bp, synthetic construct
  misc_feature 1..450: note = Description of Artificial Sequence: Synthetic coding sequence
  source 1..450: mol_type = other DNA
atggcctcccctgactggggctatgacgacaaaaatggtcccgaacagtggtcgaagctatatccaatcgcgaatggcaacaatcagagcccagtggatatcaagacaagcgaaacaaaacacgacacttccttaaagccgatatctgtgtcgtataatcccgctaccgctaaagaaatcatcaacgtgggccattcattccacgtcaacttcgaggacaacgacaatagatccgttctaaaggggggtcctttctcagattcatatcgactgtttcaattccactttcactgggggagcaccaatgaacatggctctgaacacactgtggatggagttaaatactcagcagagctgcacgtggcccattggaacagcgccaagtacagtagtctcgcagaagcagcaagcaaagccgacgggctggcagtcatcggggtgctgatgtag

SEQ ID NO: 216995 - DNA, 450 bp, synthetic construct
  misc_feature 1..450: note = Description of Artificial Sequence: Synthetic coding sequence
  source 1..450: mol_type = other DNA
atggccagtcccgactgggggtatgatgataaaaacggtcctgagcagtggtctaagctgtatcctattgccaatggaaataaccagtctccagtggatatcaagaccagcgaaacaaaacacgataccagcctgaagccaatctccgtgagctacaaccccgctacggcgaaggaaattattaacgttggtcactcctttcacgtcaatttcgaagataacgacaatagatccgtgttgaaaggcggtcctttctctgatagctaccgcctgttccagtttcactttcattggggctctaccaatgagcatggttcggagcatacagtagacggagtcaaatacagtgctgagttgcacgtggcccattggaattctgccaaatactccagcctggcagaggcagcgtcaaaagcagacggcctggcagtgattggagtcctgatgtag

SEQ ID NO: 216996 - DNA, 357 bp, synthetic construct
  misc_feature 1..357: note = Description of Artificial Sequence: Synthetic coding sequence
  source 1..357: mol_type = other DNA
atggcctcacctgattggggatatgatgataaaaatggccctgagcagtggtcaaagctataccctatcgccaacggcaataatcagtctccagtcgacattaaaaccagcgagaccaagcacgacacctcactaaaacccatcagcgtgtcatacaatccagctacagccaaggagattattaatgtggggcatagcttccacgtgaatttcgaagataatgataaccggtcagtcctgaaggggggaccattctcagatagctacagactcttccagtttcatttccattggggatctaccaatgagcacggctctgagcacaccgtggatggagtcaagtattccgcagagtag

SEQ ID NO: 216997 - DNA, 447 bp, synthetic construct
  misc_feature 1..447: note = Description of Artificial Sequence: Synthetic coding sequence
  source 1..447: mol_type = other DNA
atggcatcccccgattggggatacgacgataagaacggaccggagcagtggtccaagctatacccaattgctaacggaaataaccagagtccagtggatatcaagacatccgagaccaaacacgataccagtctaaaaccaatctctgtgagttataatcccgctactgctaaagagatcattaatgtgggccatagtttccatgtaaactttgaggacaatgataacaggtctgtgttgaaaggcggaccattcagtgatagctatcggctgttccagtttcactttcactggggatctactaacgagcatggaagtgagcacactgtcgatggggtcaagtatagcgccgaactgcacgtggctcattggaactcagctaaatacagttcactggcagaagcagcctctaaggctgacgggctagcggtcatcggcgtgctatag

SEQ ID NO: 216998 - DNA, 786 bp, synthetic construct
  misc_feature 1..786: note = Description of Artificial Sequence: Synthetic coding sequence
  source 1..786: mol_type = other DNA
atggcatcccctgactggggttacgacgacaaaaatggcccagagcagtggtccaagctgtacccaattgccaacggaaacaaccaatcccctgtggacataaaaacatctgaaacaaagcatgatactagccttaagccgatctccgtgtcctataaccctgcaacagccaaagaaatcatcaatgtgggacacagctttcacgttaactttgaggataacgacaaccgatccgttctgaagggaggcccattcagtgacagttaccgactgttccagtttcatttccactgggggtccacgaacgaacacggctctgaacacacagtggacggggttaagtacagcgcggagttgcacgtcgctcactggaatagcgccaaatactcctccttggctgaggccgcttcaaaggcagatggtcttgccgtaataggcgtcttgatgaaggtcggagaggccaatcctaagctgcagaaggtgttggatgccctacaggcgatcaaaaccaagggcaaacgcgcaccatttacaaatttcgaccccagtactcttctgccaagctcgttagatttctggacctaccctggatcgctgactcaccccccactttacgaatccgtcacctggatcatctgcaaggaaagcattagtgtctccagcgagcagctagcccagttccgttccctgctgagcaacgtagaaggagataacgccgtccctatgcagcataataaccggcctactcagcccctgaaaggaaggacagttcgtgccagcttctag

SEQ ID NO: 216999 - DNA, 300 bp, synthetic construct
  misc_feature 1..300: note = Description of Artificial Sequence: Synthetic coding sequence
  source 1..300: mol_type = other DNA
atggcatcccctgactggggctatgatgacaaaaatggccctgagcagtggagtaaattatacccaatagccaacggaaacaaccaaagccccgtggacattaaaacctccgagacaaaacatgacacttcacttaagcccatttcagtgagctataatcccgcaactgccaaggagattatcaacgtggggcactcctttcatgttaatttcgaagataatgacaaccgctcagtgcttaaaggcggacccttttcagatagctacaggctctttcaatttcatttccattggggctag

SEQ ID NO: 217000 - DNA, 786 bp, synthetic construct
  misc_feature 1..786: note = Description of Artificial Sequence: Synthetic coding sequence
  source 1..786: mol_type = other DNA
atggcctcacctgattgggggtacgacgacaaaaacggcccagagcagtggagtaaactctatccgattgcaaacgggaacaaccagtccccggtggatattaagacctctgagaccaagcacgatacttcactcaagcccatatcagtgtcttataaccctgccactgccaaggagattattaacgtcggtcactccttccacgtgaatttcgaagataatgataatcgctccgtgttgaaagggggtcctttctccgattcctatcgacttttccaattccatttccattggggctcaaccaatgagcacggttccgagcacacggttgacggcgtcaaatattccgcggagctacatgtcgcgcactggaatagcgccaaatattctagtttggccgaagcagcatctaaggcagatggattggcggtcattggggtcctcatgaaagtcggagaagctaatcccaagctgcagaaggtgcttgacgctttacaggccatcaaaaccaaaggtaagagggcgccatttacaaactttgacccctctactctgctgccatcaagtctggatttttggacttaccccggatccctcacccatccacctctgtacgagagtgtaacgtggatcatatgcaaggagtctatttccgtcagctcagaacaacttgcgcaattcagaagtttactttcaaacgttgaaggggataatgctgtacctatgcagcacaacaacaggcccacccagccgttgaaaggacggactgtcagagcttctttttag

SEQ ID NO: 217001 - DNA, 786 bp, synthetic construct
  misc_feature 1..786: note = Description of Artificial Sequence: Synthetic coding sequence
  source 1..786: mol_type = other DNA
atggctagtcctgattgggggtacgacgacaagaatggccctgagcagtggtctaaattatacccaattgctaacggcaacaatcagagccccgtggacattaagacctcagagactaaacacgacactagccttaagccaatttcagtgtcatacaatcctgcaacggccaaagaaatcataaatgtgggacattctttccacgtgaacttcgaggacaacgacaacagatccgttcttaaaggtggacccttttctgattcctatcggctattccagtttcacttccactgggggagcacaaacgagcacggctctgagcatactgtggacggcgttaaatactcagcagaactgcacgtagcccattggaactcagccaagtacagcagtctggcggaggctgcgtccaaggccgacggcctggctgttatcggcgtacttatgaaagttggcgaggctaatcctaagctccagaaagtgttggatgcattgcaagccattaagactaaggggaaaagagccccttttaccaactttgatccctctacactcctccctagtagcctggatttttggacataccctgggtccctgacacatccccctctctatgagtcggtgacttggatcatctgtaaggagagtatatcagtctcgtctgagcagctggcccagttcagatccctgctctccaatgtcgagggtgacaacgccgttccgatgcagcacaataataggcctacacagccgctgaagggtagaaccgtcagggcctccttttag

SEQ ID NO: 217002 - DNA, 783 bp, synthetic construct
  misc_feature 1..783: note = Description of Artificial Sequence: Synthetic coding sequence
  source 1..783: mol_type = other DNA
atgagccaccactggggctatggcaaacacaatggcccagagcactggcataaagacttccctatagcaaaaggagaacggcagagcccagtggatatcgacacgcacaccgccaaatacgatccttctctgaagcccctgagcgttagttacgatcaggctacttccctccgtattttaaacaatgggcacgcttttaacgtggaattcgacgacagtcaggacaaggccgtgcttaagggcggaccactggatggcacttatcgcttgatacagttccactttcactggggaagcctggatggccagggttctgagcataccgtcgacaagaagaaatatgccgcagagctccacttggtacattggaacacaaagtacggtgacttcggtaaagccgtccaacaacccgacggtcttgccgtactgggaattttcctgaaagtgggaagtgcaaaacccggactgcagaaggtggttgatgtgttagattcgatcaaaaccaagggcaaaagcgcggacttcactaacttcgatcccagaggactgttgcccgagtcactggattattggacctaccctgggagccttacaacccctcctttgcttgagtgtgtaacctggattgtgctgaaagaacctattagcgtttcttccgaacaagttcttaaattccgtaaactgaactttaacggggagggcgagccggaggaactaatggtagataattggcggcctgcacagccgcttaagaaccgccagatcaaagcaagttttaaatag

SEQ ID NO: 217003 - DNA, 783 bp, synthetic construct
  misc_feature 1..783: note = Description of Artificial Sequence: Synthetic coding sequence
  source 1..783: mol_type = other DNA
atggccaaagagtgggggtatgccagccataatgggccagaccattggcatgagctgtttcccaatgctaagggagaaaatcaaagccctgtggaattgcataccaaggatattcgacatgatccttctctgcagccctggagtgtttcatatgatggcggatccgccaagactatcttgaataacggtaaaacatgccgcgtggtgttcgatgatacttacgatagatcgatgctcaggggaggtccactacccggaccatacagactcagacagtttcaccttcactggggttcctctgatgaccatggcagcgagcacaccgtggatggcgtaaagtatgctgctgaactccatcttgtacactggaacccaaaatataacacctttaaagaagcccttaagcagagagacggcatcgcagttattggaatcttccttaaaatcgggcacgaaaacggggagtttcagatctttttggacgctctcgacaaaatcaaaacgaaaggtaaggaggcaccatttacaaaatttgaccccagctgtctctttcctgcttgtagagactactggacctatcaggggagtttcactaccccaccatgtgaagaatgtatagtgtggctcctgctgaaggaaccaatgacggtgtccagcgaccagatggctaagctgaggtccctgctgtcgtccgctgagaacgagccgcctgtgcctttggtgtccaattggagacctccccaacccatcaataacagggttgtacgtgcctcctttaaatag

SEQ ID NO: 217004 - DNA, 735 bp, synthetic construct
  misc_feature 1..735: note = Description of Artificial Sequence: Synthetic coding sequence
  source 1..735: mol_type = other DNA
atggcaaaagaatggggttatgcatcccacaacggtccagatcattggcatgaactatttccaaatgccaagggcgagaaccagtctccatggtctgtgtcttatgacgggggatctgccaaaacaatcttgaacaacggaaaaacctgtagggtcgtgtttgacgacacatatgatcggtctatgttgagaggaggcccactacctggcccatataggctgcgccagttccacctgcactggggatcctccgacgaccatggttcggagcataccgttgacggcgtcaaatacgccgctgagcttcacttggtacactggaatccaaaatacaatacctttaaagaagctctgaagcagcgcgacggcattgccgtcatcgggatctttttaaagatcgggcacgagaatggtgagtttcaaatttttctcgatgcattagacaaaattaagacgaagggaaaagaagcacccttcaccaaatttgacccatcttgcctatttcctgcctgtcgcgattactggacatatcagggtagctttactactcccccatgcgaagaatgtattgtgtggctgctgctgaaggagccaatgaccgtgtcctccgaccagatggccaagcttcgatccctgttgtcatccgctgagaatgaacctcccgtgcccttagtgtctaactggagacctccccagcctataaataacagggtagtaagagctagctttaagtag

SEQ ID NO: 217005 - DNA, 954 bp, synthetic construct
  misc_feature 1..954: note = Description of Artificial Sequence: Synthetic coding sequence
  source 1..954: mol_type = other DNA
atggttgtgatgaactccctccgagtcatcctgcaggcttctccaggaaagctcttatggaggaaattccaaatcccccgatttatgcccgctagaccctgctccctttacacttgcacatacaaaactcgcaaccgcgcactgcatccactgtgggaatctgttgacttagtccccggaggcgatcggcagtcacccatcaatatcagatggcgtgatagtgtttatgatccaggcctcaagcctttgacaatctcatatgatccggcaacatgccttcacgtgtggaataacgggtatagctttctggtggagttcgaggacagtacagacaagagcgttatcaagggagggcctttggagcataactatcgacttaagcagtttcacttccattggggtgcaatagacgcatggggaagtgagcatacggtagacagcaaatgcttccccgctgagttgcacttggtacactggaatgcggtccggtttgagaactttgaggatgccgctctggaggagaatgggttagccgtgatcggagtgttcctcaagttaggcaaacaccacaaagaactgcagaaactggtggacacattaccctctattaaacacaaggacgcactggttgaatttggcagcttcgatccgtcctgtctgatgcccacatgccccgactattggacatactctggctcactgaccacgccccctctttcggagtcagtgacttggatcataaaaaaacaaccagtggaagtggaccacgaccagctggagcaatttagaacccttctgtttaccagtgagggggaaaaagagaagcgcatggttgacaacttccggccactgcaacctttaatgaaccgcactgtgcggagttcttttcggcacgactacgtcctgaacgtacaggctaaaccaaaacctgcaactagccaggccacaccctag

SEQ ID NO: 217006 - DNA, 954 bp, synthetic construct
  misc_feature 1..954: note = Description of Artificial Sequence: Synthetic coding sequence
  source 1..954: mol_type = other DNA
atggtcgtgatgaactcgctcagagtgatcctgcaagcgagtcccggaaagttattatggaggaagtttcaaattcctcgatttatgccagccaggccgtgctccctgtacacctgtacttataagacccggaaccgggctttacacccactgtgggagtcggtggatcttgtgccgggaggggaccgacaatcaccaattaacatccgctggcgcgactctgtctatgaccccggacttaaacctctgactatttcttatgaccctgccacatgtctgcatgtgtggaacaacggatacagcttcctggttgagttcgaggattcgaccgataagtcagtaatcaaagggggtccactggaacacaattaccgcctcaagcaatttcattttcactggggcgcaatagatgcatggggatctgaacatacagtggattctaaatgttttccggctgagctacatctcgttcactggaacgcagtaagatttgaaaacttcgaggacgctgctctggaggagaacggcctggccgtgataggggtgttcctgaagctgggcaagcatcacaaggagctccagaagttagtggatacgcttccatcgattaagcataaagatgccctcgtggagttcggctcattcgatccaagctgtctgatgccaacttgtccagattactggacatattccggatcccttacgacacccccactttcagaaagcgtcacctggatcattaagaagcagcctgtggaggttgatcacgatcaacttgagcagtttcgcacccttctattcacttccgagggagaaaaagagaaaaggatggtggacaatttccgcccactccagcccttgatgaaccgaactgtccgatcttcctttcgccacgattatgtcttgaacgtgcaagccaagccaaaacccgcaaccagtcaggctacaccatag

SEQ ID NO: 217007 - DNA, 411 bp, synthetic construct
  misc_feature 1..411: note = Description of Artificial Sequence: Synthetic coding sequence
  source 1..411: mol_type = other DNA
atggttgtgatgaattcgctgcgggtaatcctgcaggcttctcccggtaaattgctctggcggaagttccaaattccacgctttatgcctgctagaccctgttctctgtatacatgtacctataaaacaagaaacagagccctgcatcctttgtgggaaagtgtagatcttgtccccggaggcgaccggcaatcgcccatcaacatccgctggagagactccgtgtatgatccgggtcttaagccgctgactatctcctacgatcctgcaacctgcctccacgtatggaacaatggttattctttcctggtcgagtttgaggactctacagataagtccgtgataaaaggagggccattggaacacaactaccggctcaagcagttccatttccactggggggctatctag

SEQ ID NO: 217008 - DNA, 231 bp, synthetic construct
  misc_feature 1..231: note = Description of Artificial Sequence: Synthetic coding sequence
  source 1..231: mol_type = other DNA
atggttgtgatgaatagcttaagagtgattctccaggcctctcccggtaagttgctttggagaaagtttcaaatccccagatttatgccggctaggccatgttcgctttacacatgcacatataaaacccgtaacagagccctgcaccctctttgggagagtgttgacctagttcccggaggcgataggcagtctcctattaatattcgatggcgagacagtgtgtactag

SEQ ID NO: 217009 - DNA, 540 bp, synthetic construct
  misc_feature 1..540: note = Description of Artificial Sequence: Synthetic coding sequence
  source 1..540: mol_type = other DNA
atgcgcgctttagtgctcctcttgtccttgtttctccttggtggtcaggcccagcatgtgtccgactggacatattctgaaggcgcacttgatgaagctcactggccgcagcactatcccgcttgcggtggtcagagacagtctcccatcaacctgcagcgcactaaggttaggtataatccctctttaaaaggcctaaacatgacaggctatgaaactcaggctggggaattcccaatggttaataacggacacacggactggcaggcggagctttttctcccctctctatccagcccatgcggggagggggcaaagcacaaaggacagcgccaatggctctgttctccatccctcgacagctggtgggaagcaattatcgacggtggaagcctttgggcgaccttggcggagtgtggcctccgggctgaggggccagaggaaggcaggcacatggaagaaaagtcccctgctagtcagggtgcctgcagcgggtcgagactgccaatcagtcgtggcccttgtacctttttcctgtag

SEQ ID NO: 217010 - DNA, 942 bp, synthetic construct
  misc_feature 1..942: note = Description of Artificial Sequence: Synthetic coding sequence
  source 1..942: mol_type = other DNA
atgagggccctagtcttgctactgagcctgttcctgctagggggacaggcccaacacgtgtccgactggacctattctgagggagcactggatgaggctcattggccacagcactaccctgcttgcggaggtcagagacagtccccaattaacctccaaagaactaaggtacgctataatccctcgctcaagggtctgaacatgaccggttacgaaacacaggctggcgagttccccatggtcaataacggccacacggtgcaaatcagtctcccatcgaccatgaggatgaccgtggccgatggcactgtatatatcgcccaacagatgcatttccactggggcggagcctcctctgagatttccggctcagagcatacggtggatggaattagacacgtcatcgagatccatatagtccattacaactccaagtataagtcatacgacatcgcccaggacgcccctgatgggttggcagtcctggctgccttcgtggaagtcaagaactatcctgaaaacacctactactccaattttatctctcatttagccaacatcaaatatcctgggcagcgcacaactctcacaggcctcgatgtgcaagacatgctccccagaaacttacagcattactacacctaccacgggagtctgaccacccctccgtgcaccgagaatgtccattggttcgtgctcgctgacttcgtgaagctgtcccgaacccaggtgtggaaacttgagaactccctgttggatcacaggaacaagacaatccacaatgattaccggagaactcaacctctcaaccacagggtagtggagtcaaattttcctaatcaaggcaagggccatgggggacaccgtgggcgttctcaaaaccctcgagtacaaccaaccagtactcgccatcccctggctctgggctctctcgaagcttag

SEQ ID NO: 217011 - DNA, 927 bp, synthetic construct
  misc_feature 1..927: note = Description of Artificial Sequence: Synthetic coding sequence
  source 1..927: mol_type = other DNA
atgcgcgctttggtccttctgctttcgctgttcctgctgggcggacaggcccagcacgtgagcgattggacctattcagagggcgcattagacgaagcccattggcctcaacactatcctgcttgtggtggacagcgacagtcaccaataaaccttcagaggaccaaagtccgctacaatccgtccttgaagggactgaatatgacaggttatgaaacacaagctggagagtttcccatggtaaacaatggccacactgtccaaatctcattgccttccactatgagaatgacagttgctgacggtacagtctacattgcccagcaaatgcacttccactggggtggggcttcttccgaaatctccggcagcgagcataccgtcgacgggatccggcacgtaatagaaatccatatagttcactacaacagtaagtataaaagctatgatattgctcaggatgcacccgacggtctggcagtgctcgcagcttttgtagaggtgaagaattatccagagaatacctattatagtaacttcatttctcatcttgctaacatcaagtatcccggacagcgaactacactgacaggcctagacgttcaggacatgctgcctaggaatttgcagcattactatacttatcacggatcactcactacacctccttgcaccgagaatgtgcactggttcgtgcttgccgatttcgtcaaactaagccgtacccaagtgtggaaattagagaattcactcctggatcacaggaataagacaattcacaacgactacagacggacacagccccttaaccaccgcgtcgtggagagcaacttccccaaccaggagtataccttggggtctgagttccagttctatttgcataagattgaggaaattctcgattacttgagacgggcactgaactag

SEQ ID NO: 217012 - DNA, 795 bp, synthetic construct
  misc_feature 1..795: note = Description of Artificial Sequence: Synthetic coding sequence
  source 1..795: mol_type = other DNA
atgaccggtcaccatggttggggatacggccaggacgatggcccttcccactggcacaagttgtaccccattgcacaaggtgatagacagtcaccaattaatatcatcagcagtcaggcggtctacagcccatccctgcagcccctcgagctgagctatgaagcctgtatgagtctttcaatcaccaataatgggcatagcgtgcaggtggacttcaacgacagtgatgataggacggtcgtgaccggcggtcctctcgagggtccttacagactgaaacagttccacttccactggggtaagaaacatgatgtcggttctgagcatacggtggacgggaagagctttccaagtgagctgcatctggtacactggaacgccaaaaagtatagcacatttggtgaagctgcctcagcgccagatggtctggcagtggtgggtgtgtttttggagacaggggatgagcatccctccatgaatagacttacggatgctctctacatggtccgttttaaaggcacgaaggctcaattcagttgctttaacccaaaatgccttctcccagcctcacgtcattactggacttacccaggatctcttaccacgcctcccctgagcgaatctgttacctggattgtactcagggagccgatttgtatctctgagagacaaatgggtaaattccggagcctgctctttacctcagaagacgatgaacgcattcacatggtgaacaacttccgcccaccacaacctctgaaagggagggtcgtgaaggctagttttagagcatag

SEQ ID NO: 217013 - DNA, 627 bp, synthetic construct
  misc_feature 1..627: note = Description of Artificial Sequence: Synthetic coding sequence
  source 1..627: mol_type = other DNA
atgagcctgtcgatcacaaacaacggacatagtgttcaagtcgatttcaacgattcagacgaccgcaccgtagtgacagggggaccactggagggcccataccgactgaagcagttccatttccactgggggaagaagcacgatgttgggtccgaacataccgtggatggaaagagtttcccctctgaactgcatctggtgcattggaacgccaaaaaatactccacatttggtgaggctgcctcagcgccagatggcctggcggtcgtcggtgtgttcttggaaactggcgatgagcaccctagcatgaaccgactgaccgacgctctgtatatggtgagatttaaaggcacaaaggcacagttctcctgttttaatcctaaatgtctgctgcccgcttccaggcactactggacttaccctggatcattgactacccccccactctccgagtccgttacttggatcgtcttgcgggagcctatctgtatctccgagaggcaaatgggcaagttccggtcactgctgttcacatcggaggatgacgagcgaatccacatggtgaataatttcagaccacctcaacctctgaaaggacgtgtggtaaaggcgtcctttagggcgtag

SEQ ID NO: 217014 - DNA, 873 bp, synthetic construct
  misc_feature 1..873: note = Description of Artificial Sequence: Synthetic coding sequence
  source 1..873: mol_type = other DNA
atggctgacttgtcattcatcgaagacacagtagccttccctgagaaagaggaggatgaggaagaggaagaggagggggttgagtggggatacgaagagggtgtggagtggggtctggtgttccctgatgctaacggagagtaccagtcacccattaacctcaactcgcgcgaggcccgatatgatccatcactgctggatgtcaggctatcacccaattacgttgtctgccgagactgcgaggtcaccaatgatgggcacacaattcaggtgatcctcaaatccaaaagcgtcttaagtgggggtccactcccacagggccatgagtttgagttgtacgaagtgagatttcactggggcagggaaaaccaaaggggctccgaacacaccgtgaactttaaggcctttcccatggagctacacttaatacactggaactctaccttatttggcagcattgatgaggctgtcggcaaaccccacggcatcgctattatagctctattcgtgcaaatcggcaaagagcacgttggtttaaaagccgtgactgagatcctgcaggacatccaatacaagggcaaatcaaagactatcccctgttttaatcctaacaccttgctccccgatccgcttttaagggattattgggtctacgagggaagcctgacaatccctccgtgcagcgagggagtgacatggattctgtttcgctatcctttgacaatatcccagctgcagatcgaagaatttagacgcttgagaactcatgtgaagggcgcagagctggtggaagggtgcgacggaatcctgggggataacttccgtccgacccaacctttgtcggatcgagtaatccgggctgcatttcagtag

SEQ ID NO: 217015 - DNA, 987 bp, synthetic construct
  misc_feature 1..987: note = Description of Artificial Sequence: Synthetic coding sequence
  source 1..987: mol_type = other DNA
atggagatcgtctgggaggttctgttccttctgcaagcgaatttcatcgtgtgtatctccgcccagcaaaattcaccaaaaattcacgagggctggtgggcctacaaggaggtcgtacagggcagttttgtgccagttcccagcttctggggactcgtcaatagcgcctggaacttgtgctccgttggtaagcggcagtcccccgtgaacattgagacctctcacatgatattcgaccccttcctcaccccattgagaatcaatacaggcggtcggaaagtgagcggaaccatgtataacacaggacgccatgtcagccttagactggataaagagcatctggttaatatttctggcggtcccatgacttacagccaccggctcgaggaaatacggttacatttcggtagcgaagactctcagggaagtgagcacctgctcaatggccaagctttctccggcgaggtacagttaatacactataaccacgagttgtatacaaacgtcactgaagctgccaagtctcctaatggcctagtggtagtgagtatctttatcaaagtgagcgactctagtaatccattcttaaatcggatgttgaaccgggataccattacccgcatcacatacaaaaacgacgcctatttgctgcaggggcttaatatcgaggaactgtatcctgagacatcatccttcatcacctatgatggctcaatgactatcccaccgtgttatgagaccgcctcatggataatcatgaataaaccggtatacataacaaggatgcagatgcactctcttcgtctattgtcccagaaccagccaagccaaatctttctttcaatgtccgataacttcagacccgtgcagcccctgaataacagatgcattcgcactaacattaacttttcattgcaggggaaggactgtcctaataaccgagcccaaaagctccagtatcgggttaacgagtggttacttaagtag

SEQ ID NO: 217016 - DNA, 1005 bp, synthetic construct
  misc_feature 1..1005: note = Description of Artificial Sequence: Synthetic coding sequence
  source 1..1005: mol_type = other DNA
atggcgtccatccgctcgaggtctggctgtggcttcaccgaaccagatgagctatgcatggtaggcgtgagggaaaacgcgcagcagaatagcccaaaaatccatgagggttggtgggcctacaaggaagtggtgcagggcagtttcgtgccagtgcctagtttctggggtctggtcaatagtgcgtggaacctgtgctccgtgggaaagcggcagagccctgttaatatcgagacctcacacatgatcttcgatcctttcctgacgccgctgagaatcaacaccgggggtcggaaggtgtcaggtacaatgtacaatacaggtaggcatgtctctctcagactggataaggagcacctggtgaacatcagtggcggtcccatgacctactcccaccgattggaggagattcggcttcacttcggctcggaggactcccaaggctccgagcaccttctgaacgggcaagcattctccggggaagtgcaactgattcactataaccatgaactgtataccaacgtgaccgaggcagctaagagccccaatgggctcgtggtagtcagcatcttcattaaagttagtgatagtagcaatccttttctcaacaggatgctgaaccgcgacaccataacacgaattacctacaagaacgacgcctaccttctccaaggactgaacatagaagaattgtacccggaaacttccagtttcatcacttatgacggaagtatgaccatcccaccatgttatgaaaccgctagctggattattatgaacaaacccgtctacattacccgaatgcagatgcacagtctgagactactgagccagaatcagcctagccagattttcctctctatgagcgacaacttccgtcctgtgcagccactgaataaccgctgtattagaaccaacatcaacttctctctccagggcaaggactgtccaaacaacagggctcagaaattgcagtaccgcgttaacgagtggttactgaaatag

SEQ ID NO: 217017 - DNA, 987 bp, synthetic construct
  misc_feature 1..987: note = Description of Artificial Sequence: Synthetic coding sequence
  source 1..987: mol_type = other DNA
atggaaatcgtttgggaggttttatttctgctccaagccaactttatcgtgtgcattagtgcgcagcagaattcaccgaagattcacgagggatggtgggcctataaggaggtcgttcaggggtccttcgtgccggtcccatccttctggggcctggtgaactcagcgtggaacctttgctcagtcggcaagaggcagtcaccggtgaatatagaaacctctcacatgattttcgatccatttttaacaccattgcggattaacaccggtgggagaaaggtaagtggcacaatgtacaatacaggccgacatgtctccctacgcctcgataaggagcatttagtgaacatctccggcggtccgatgacctactcccacagactcgaagaaatcagactccatttcggtagcgaagactcacaagggagtgagcatctattaaatggacaagcctttagcggcgaagtgcagctgatccactacaatcatgagctgtacactaacgtaaccgaagctgcgaagtccccaaacggtctcgttgtcgtttctatcttcattaaagtttccgatagctccaatccatttctcaacaggatgctgaatagagataccataacacgcattacatacaagaacgacgcatatcttctgcagggcctgaatatagaggaactgtatcccgaaacaagtagcttcattacatatgatgggagtatgactatccctccatgctatgagactgcctcatggataatcatgaataagccagtttacatcacgcggatgcaaatgcatagcctcaggttgctttctcagaaccagccttcgcaaatcttcctgagtatgagtgataacttcaggcccgtgcaacccctaaataatcgttgtatccggaccaacattaacttttccttacagggcaaggattgcccgaacaaccgcgcacagaagcttcagtatagggtgaatgagtggctcctgaagtag

SEQ ID NO: 217018 - DNA, 987 bp, synthetic construct
  misc_feature 1..987: note = Description of Artificial Sequence: Synthetic coding sequence
  source 1..987: mol_type = other DNA
atggagatcgtgtgggaagtgctttttctgttacaggccaactttatagtgtgtatctccgcacagcagaatagccctaaaattcatgaagggtggtgggcctacaaagaagtcgtacagggctcgttcgtgcctgttcccagcttttggggccttgtgaattctgcctggaatctctgctccgttggcaaacggcagagcccagtgaatatcgaaacctcccacatgatctttgatccattcctgaccccactaagaataaacactggagggcgtaaggtgagcggcacgatgtataatacaggccgacacgtgtctcttcggctggacaaagaacacctcgtgaatatcagtggcggtcctatgacatattcccatagactagaagagattaggttgcattttggcagtgaagattcccaggggagtgaacatctccttaatggccaagcttttagcggcgaagtgcagctgattcattacaaccatgagctatataccaatgtcaccgaggccgcaaaaagccccaacggcctagtagtggttagcatttttattaaggtgtccgattccagtaacccttttctgaaccgcatgctaaatagagatactatcacgcggataacttataaaaatgatgcgtacctccttcaagggctcaatattgaagaactttaccctgaaactagctcgttcataacctatgacggcagtatgacaattccaccctgttatgaaacagcctcctggattataatgaataagccggtctacatcacaagaatgcaaatgcattcactcagactgctgtcacagaaccagccctctcagatctttctgagtatgtccgacaactttagacccgtgcaaccccttaataatcgatgcattcgaacgaatataaatttctcactacagggcaaagattgccctaacaatcgtgctcagaagctgcagtatcgggtgaacgaatggcttctgaagtag

SEQ ID NO: 217019 - DNA, 987 bp, synthetic construct
  misc_feature 1..987: note = Description of Artificial Sequence: Synthetic coding sequence
  source 1..987: mol_type = other DNA
atgggcgcagctgctcggctgtcagcccctcgagctctggtgctctgggccgctttaggcgcagcagcacacatcgggccagcgccagacccagaggattggtggtcatataaggacaatcttcagggtaactttgttcccggtccaccgttctggggtctggtcaatgccgcatggtcactgtgcgccgtgggcaagcgccagagccctgttgatgtggaattgaaaagagtcctgtacgacccttttctaccccctttgcggctgtctactgggggtgaaaagctgcgtgggacactgtataataccggccgtcatgtgagcttcctgcctgctcctaggccggtggtgaatgtgtccgggggaccactgctgtactcacacaggttaagtgagctgcgactgcttttcggggctcgagatggcgctggcagcgagcatcagattaaccaccagggattttcagccgaggtgcagcttatccacttcaatcaggaactgtatggcaactttagcgccgctagtcgtgggccaaacgggctggccatcctgtcactgtttgtcaatgtagctagcactagtaaccctttcctgtccaggctgctaaatagagacaccattactcggatttcctataaaaacgacgcctattttctgcaggatctgtccctcgagttgttgttccccgagagttttggattcattacatatcaagggagcctgagcactcctccatgctctgagactgtaacatggatcctaatagaccgtgccctgaacattacaagccttcaaatgcattcactgcggctcctaagtcaaaaccccccttcccaaatttttcagtcccttagtggaaactctagaccccttcaacccctggctcaccgagcgttgcgagggaacagagaccccaggcatcccgagaggcgctgtcggggtcctaactacaggctgcacgtcgacggcgttccccatggcaggtag

SEQ ID NO: 217020 - DNA, 1065 bp, synthetic construct
  misc_feature 1..1065: note = Description of Artificial Sequence: Synthetic coding sequence
  source 1..1065: mol_type = other DNA
atgccgagacggtccttgcacgccgctgccgtcctgctactagtgatcctgaaggagcagccttcttcccctgcaccggttaacgggagtaaatggacttactttggccctgacggagagaactcatggtctaagaaatacccaagttgcggagggctgctgcagtcaccaatcgacctgcactccgacatactgcagtacgacgcaagtctaactcccttagaattccagggctataacctctccgccaataagcagtttttgctcacgaataatggccacagcgtcaaactcaacctccccagcgatatgcacattcaaggactgcagtcccgctattctgctacacaactgcatttgcactgggggaatcctaatgatccacatggaagtgaacacactgtgagcggccagcactttgccgctgaattgcatattgtgcattacaacagcgatttgtatccagatgcctcaaccgcatctaataagagtgagggcctggccgtcctggccgtcctgattgaaatgggctcttttaatccatcttacgataagatcttctcccacctgcaacacgtgaaatataaaggtcaggaggctttcgttccaggctttaatatcgaggaactcctgccagagaggacagcagagtactaccgataccgtggtagcttaaccacccctccttgtaaccccacagttctttggaccgtgttccgaaatcctgtccaaatctcccaggaacaattgttagcattggagacggcactatactgtacccatatggatgacccgagccctagggaaatgataaataatttcaggcaagtccagaaattcgatgaaaggttggtgtatacgtcgtttagtcaagtgcaggtgtgcactgctgctggtcttagcctcggcatcattctgagtctggctttagccggaattctcggaatctgtatcgtggttgtcgtgtcgatttggctattccggcgaaagtctataaagaagggagacaacaagggtgtgatctataaacccgcaactaagatggagacagaggctcacgcgtag

SEQ ID NO: 217021 - DNA, 1032 bp, synthetic construct
  misc_feature 1..1032: note = Description of Artificial Sequence: Synthetic coding sequence
  source 1..1032: mol_type = other DNA
atgcccagaaggtctctgcatgccgctgctgtgctgctgctggtgatcctgaaggagcagccaagctcccctgcgccagtgaatggatcgaagtggacgtactttggccctgatggcgagaactcctggtccaaaaagtatcctagctgcgggggtctgctgcagagtccgattgatcttcatagcgacatactccagtacgatgccagcctcaccccgctggagtttcaggggtacaatctttctgcaaacaagcagttcctactcacaaacaacggccactcggtcaaacttaatctgccgtcagacatgcatattcaaggcctgcagtctagatactctgctactcagttacacctgcactggggcaatcccaacgacccccacggtagcgagcacacagtcagtggccagcactttgccgcagagttacacattgtgcactacaacagcgacctctacccagacgcatccactgcatctaacaagtctgagggcctggcggtgttggcagttcttatagaaatgggcagcttcaatcctagctatgacaaaattttcagccacctgcagcatgtcaaatataagggccaggaagcctttgtgccgggatttaatatcgaagaactccttcccgaacgtaccgctgaatattacagatataggggctccctcactacccctccttgtaaccccaccgttctgtggacagtctttcggaatcccgtccagatttctcaagaacagctgttagcactcgaaactgcactttactgcacacatatggatgatccgtcacctagagaaatgattaataatttccgacaggtgcagaaattcgacgaaaggttggtatacacttccttcagccaaggaataatcttaagcctggctctggctggtatactcgggatctgcatcgtggtcgtagtctcgatctggctgttcagaaggaagagcatcaaaaaaggggataacaaaggcgtgatatacaagcccgcaactaagatggaaaccgaagcgcatgcatag

SEQ ID NO: 217022 - DNA, 852 bp, synthetic construct
  misc_feature 1..852: note = Description of Artificial Sequence: Synthetic coding sequence
  source 1..852: mol_type = other DNA
atgccaaggcgttcactgcatgccgcagccgttctgttactggtgatccttaaggaacaaccaagctctcctgcacctgtgaatggctccaaatggacttatttcgttaagctgaatcttcccagtgacatgcacatacagggtctccagtcaaggtattctgccacccagttgcatttgcactggggtaacccaaatgacccccatggaagcgaacacacagtgtctggccagcattttgccgcagagctgcacattgtgcactataacagcgacctatacccagatgcctctacagcgtccaacaagagcgagggcctagcagtgctcgcggtgctaattgaaatgggctcttttaacccaagctatgataaaatctttagtcacctgcagcatgtgaagtacaaaggacaagaggccttcgtcccaggattcaacatcgaggaattgctacccgagaggacagccgagtattatcggtataggggttccctcacaactccaccttgtaatcctactgttctctggacagtgtttaggaaccccgtgcaaatctctcaagagcaactgttggctctggagacggccttgtattgcacacatatggacgacccatccccgcgtgagatgattaacaactttaggcaggtgcagaagttcgacgagcgccttgtgtatacttctttttcgcagggtatcattctgagtcttgcgctcgccggaatcttgggaatctgcatcgtggttgtggttagcatttggctcttccgcaggaaatcaataaagaaaggagacaacaagggcgtcatttacaaaccagccactaaaatggaaaccgaagcccacgcctag

SEQ ID NO: 217023 - DNA, 1014 bp, synthetic construct
  misc_feature 1..1014: note = Description of Artificial Sequence: Synthetic coding sequence
  source 1..1014: mol_type = other DNA
atgctgttcagcgctctactgctggaagtgatttggattttggcagccgatggcggacagcactggacgtacgagggccctcacggacaggaccattggccggcttcttacccggaatgcggcaataatgcacagagtccgatcgacatacagacggactctgtcacgttcgatcccgacctgccagcactgcagcctcacggctatgatcaacccggtacagaacctctggacctgcataataacggacataccgtgcagctgtcactcccttccaccctgtatctgggcggattacccagaaagtacgtagccgctcagctccacttacactgggggcagaagggatccccaggcggatcagaacaccagatcaacagcgaagcgaccttcgccgagttacacattgttcattacgatagtgactcatatgacagcctcagcgaggccgctgagaggccgcaggggttggctgtgctgggtatactaattgaggttggcgagaccaaaaacatcgcatatgaacacatcctctcacacttgcatgaggtccgacataaagatcagaaaacatctgtccccccatttaatcttagggagctgctcccgaagcaactgggtcagtattttcggtataatggttctttgactacgcccccatgctatcagtcagtcctttggacagtgttctatagaagaagccaaatttctatggagcaactagagaaactgcagggcacgctgttctcaactgaggaggagcctagcaagcttctggtccagaattacagagcactccagccgctcaatcaacggatggtgtttgcaagcttcatacaagccggatcatcctatacgacaggcgagatgctgtccctgggagttggtattcttgtcgggtgtctatgtctcttattggctgtgtattttatcgcaagaaaaatccggaagaagagattggaaaatcgcaagtccgtggtctttacctcagcgcaggctacaaccgaggcctag

SEQ ID NO: 217024 - DNA, 834 bp, synthetic construct
  misc_feature 1..834: note = Description of Artificial Sequence: Synthetic coding sequence
  source 1..834: mol_type = other DNA
atgtctagtggtatacacgtcgcattagtcacgggcggaaacaaaggcatcggccttgctatcgtccgcgatctgtgtagactgttttccggcgatgtggtgctgactgctagagacgtgacccgtggacaagctgccgtccagcagttacaggccgaggggctgtctcccaggttccatcagctggatattgatgacttgcagtccatacgcgctctgagggatttcctgcgcaaggaatatgggggtctggacgtgctcgttaacaacgcaggtatcgctttcaaagttgccgatcctacgcctttccatattcaagctgaagtgacaatgaagactaacttctttgggactagagatgtgtgtaccgagctactcccattaataaaaccccagggcagagttgtaaatgtcagttccattatgtcagttagggctctgaaaagctgcagccctgagctgcaacagaaattccgctctgagaccatcacagaggaagaactggtcggcttaatgaacaagttcgtggaagacaccaagaagggagtacatcagaaggaaggatggccatcctcggcctacggagtgacaaagattggtgtgactgtgttgtcccggatccacgccaggaagcttagtgaacaaagaaagggcgacaaaatcctccttaatgcttgctgtcctggctgggtccgaacggacatggcaggcccaaaagctacaaagagccccgaggagggagccgagacccccgtctatttagctctgctcccacccgacgccgaggggccacatggtcagtttgtgagtgagaaaagagtagaacagtggtag

SEQ ID NO: 217025 - DNA, 834 bp, synthetic construct
  misc_feature 1..834: note = Description of Artificial Sequence: Synthetic coding sequence
  source 1..834: mol_type = other DNA
atgtcatcttgttcgagagtcgctttagtgacaggggcaaatagaggtattgggctggccattgctagagaactttgcagacagttttcgggggatgtcgtattgacggctcgggacgtcgctcgcggacaagctgctgtgcaacaactacaagcagaaggtctgtcaccccgattccaccagctagatatagacgacctccagagtatcagagcccttcgagattttctgagaaaagaatatgggggtttgaacgtgcttgtcaacaacgcagctgtcgcattcaagtctgacgatcctatgccatttgacataaaagccgaaatgacgcttaagactaatttttttgcgacaaggaacatgtgcaacgaactattgccaatcatgaagccccatggccgtgtggtcaacatctccagcctacagtgcctgcgcgcttttgagaactgctccgaagatcttcaggagaggtttcatagtgagacccttactgaaggtgacctggtcgatctgatgaagaaatttgtggaggatacaaaaaacgaagtgcatgagcgtgagggctggcccaattcaccttatggggtgagcaagctgggcgtcaccgtgcttagtcgcattcttgcacgcagactcgacgaaaaaaggaaagctgatcggattttagttaatgcttgctgcccgggacctgtcaaaaccgatatggacgggaaggattcgattcgcaccgtcgaggagggggcagaaacccccgtctatctcgctttactacctcctgatgcgacagagccacaagggcaattggttcatgataaggtcgtgcaaaactggtag

SEQ ID NO: 217026 - DNA, 2169 bp, synthetic construct
  misc_feature 1..2169: note = Description of Artificial Sequence: Synthetic coding sequence
  source 1..2169: mol_type = other DNA
atgctcacaatggggaggctacagcttgtggtcctgggacttacatgctgctgggcagtggccagtgccgcaaaactcggcgctgtgtacacggagggtggtttcgtggagggcgtgaacaaaaaactgggcttactgggcgacagcgtcgatatttttaagggaataccttttgccgcacctactaaggcgcttgagaacccccagccccaccctggctggcaggggacattgaaggctaaaaatttcaaaaagcgctgcctccaggctacaatcactcaggactccacgtatggagacgaggactgcctgtatctgaatatctgggtgcctcaaggtcgaaagcaggtgagccgcgacctcccggtgatgatttggatttacggcggagcattcctgatgggttccggccacggagctaattttttgaataattacctgtacgacggcgaggagattgccacccggggaaatgtgattgtcgtgacattcaactacagagtaggaccactgggcttcctctccaccggagatgcgaacctgcctgggaattatgggttgagggatcagcacatggctatagcttgggtcaaacggaatatagccgcttttgggggtgaccccaacaatattacattattcggtgagtctgcaggcggtgcttctgtctcactacaaacgctgagcccttataacaagggactgatacgacgtgctattagccaaagcggagtcgcgttaagtccctgggtgatccagaaaaacccacttttttgggcaaagaaggtggctgagaaggttggctgcccagtaggtgacgccgcaaggatggcccagtgcctaaaagtgacagatccacgcgctcttacactggcctacaaggtgccactggccggactggaatatccaatgctacactacgtgggcttcgtaccggtgatcgatggcgatttcatccccgcagatccaatcaatctgtatgccaacgccgctgacatcgactacatagcgggtaccaacaatatggacggccatattttcgctagcatcgatatgcccgctattaataaaggcaataaaaaggtcacagaagacttctacaagttggtgagcgaatttacaataaccaagggtctgaggggagcgaagacaacattcgatgtgtacaccgaatcatgggcacaggatccaagtcaggagaacaagaaaaagacagttgtggatttcgaaaccgacgttctcttcctggtgcctactgagattgccctcgcccaacatagggctaatgctaagtcagcaaagacgtatgcctatctcttcagtcatccttctaggatgcccgtctacccaaaatgggtcggcgcagatcacgcagatgatatacagtacgtctttggaaaaccgttcgccacaccaacgggttataggccccaggaccgaacggtgtccaaagcgatgattgcctactggacgaactttgccaagaccggggatcccaacatgggggacagtgcagtccccacgcattgggaaccatacacaaccgaaaattccggctacctggagatcactaaaaagatgggtagttctagcatgaagcggtctctgagaacaaatttcctcaggtattggactctaacttacttagcactgcccacagtgaccgatcaggaggcgacccctgtccctcccaccggtgactccgaggcaactccagtgcctccaacgggggattctgagacggctccagtgccacccaccggggactctggggcacccccagtgcctcccacgggagatagcggcgctccacccgtacctccaaccggagacagtggcgctccaccggtgcccccaactggtgattcgggggctcctcccgttccccctaccggcgatagcggtgcaccaccggtcccccctactggcgatgccggaccccctcccgttcctcctaccggtgactcgggcgctcctcccgtccctccaacaggcgactccggggcacctcccgtgacacccaccggggattccgagacagcaccagtccccccaaccggcgactcaggggcaccacctgtcccaccgaccggtgacagcgaggccgctccggtccctcccacagatgacagcaaggaggcccagatgccagcagtcatccgattttag

SEQ ID NO: 217027 - DNA, 2064 bp, synthetic construct
  misc_feature 1..2064: note = Description of Artificial Sequence: Synthetic coding sequence
  source 1..2064: mol_type = other DNA
atgggtcgtctgcagctcgtagtgctgggtttaacctgctgctgggcggtggcctctgctgccaaactgggagctgtatacacagagggcggatttgtggagggggtgaataaaaagctggggctcctaggggacagcgttgatatctttaaaggcattccattcgcagctcctactaaagcgctggaaaacccccagccgcaccccggatggcagggcacgctgaaagctaaaaatttcaaaaaacgttgtttgcaggccactatcactcaagattctacttatggagatgaagattgcctgtatctcaacatttgggttccccaggggagaaaacaggtgtcacgggatctgccagtcatgatctggatttatggcggtgcatttctgatgggatccggacatggcgcaaattttctcaacaactatctctacgatggtgaagaaattgccactcgcggaaatgtcatcgtggtgacatttaattacagagttggccctctcggttttttatccactggagacgcaaacttacccggaaactatggactaagagaccagcacatggccatcgcttgggttaaacgaaatattgccgctttcggcggagaccccaacaacattactctctttggcgagtcagccggaggtgccagtgtgagtttacagacgctgtccccatataacaaaggattgattcgcagggccatatcacagtccggcgtggccctctcaccttgggttattcaaaagaacccacttttctgggccaaaaaagttgcagagaaagtgggatgtcccgtgggcgatgctgcgcgaatggcccagtgcctgaaggtgaccgaccctcgggctctgactctggcctataaggttcctctggcagggctcgagtatcccatgctccactatgtggggtttgtccctgtgattgacggtgatttcattcctgccgatccaattaatctgtacgcgaacgcagctgacatcgactacatcgccggtactaacaacatggatgggcatattttcgcgagcatagatatgccggctattaataaggggaataaaaaggtaacagaggaggatttctacaaactcgtgtccgagttcacaattaccaagggcttacgtggagccaagacgaccttcgacgtgtacacagagagttgggcccaagacccaagccaggagaataagaagaaaacagttgtagacttcgagaccgatgtgctatttctcgttccaaccgaaatcgcccttgcccagcatagggctaacgccaaggatccaaatatgggcgactctgccgtgcctacccattgggagccctacactactgaaaacagcgggtacttagagatcacaaaaaaaatggggtcttcctccatgaaaagatccttgaggaccaatttcctgaggtactggaccctaacctatctggctctgccgaccgtcacggatcaggaagccacacctgtccctcccaccggggactccgaggctacacccgtgccaccaacgggtgactctgaaacggcaccagtgccccctaccggcgactccggggcacctcctgtgccacctaccggtgacagcggggctcctcctgtgccacctacaggggactccggtgccccacccgtcccccctaccggagatagcggggctccccctgtgcctccaactggggacagtggagcgcctcccgttcctcctactggcgattctggagccccaccagtaccacctaccggggatagtggcgctcccccagtgccccctactggtgacagcggagccccacccgtgccgccaactggggacgcaggcccaccacctgtgccacccactggcgactctggagcccctccagttccaccgacaggagactcaggcgcaccacctgttactccaacaggggactctgagaccgcccctgtgccgccaactggcgattctggtgcccctcctgtgcctccgacaggagacagtgaggccgctcccgtccccccaacggacgactccaaagaagcccagatgccagcagtgattaggttctag

SEQ ID NO: 217028 - DNA, 2271 bp, synthetic construct
  misc_feature 1..2271: note = Description of Artificial Sequence: Synthetic coding sequence
  source 1..2271: mol_type = other DNA
atgctgacaatggggcgtttgcagttggtggtgctgggcctgacttgttgctgggcagtagcctctgccgcaaagctcggagccgtttacaccgaagggggtttcgtcgagggtgtcaacaagaagctgggactcctgggtgacagtgtagacatatttaaggggataccgttcgccgctccaaccaaagccttggaaaacccccagcctcacccagggtggcaggggaccttgaaagctaaaaatttcaagaaaagatgcctgcaggcaactatcacccaggattccacctacggagacgaggattgtttgtacctgaacatctgggtaccacagggcaggaagcaggtcagccgagatctgcccgtgatgatctggatttacggtggggcttttctcatgggctccggccacggcgcaaactttcttaacaactatttatatgatggcgaagaaatcgcaacccggggtaatgtgatcgtcgtaaccttcaattaccgagtggggcctctgggctttttgtccactggcgacgctaatcttccagggaattacgggctgcgcgatcagcacatggccatcgcatgggtgaagaggaacattgccgcatttgggggtgatcctaataacataacactgttcggagagtcagcagggggagcctctgtgagccttcagacactctccccctataataaaggattgatcagacgggctatctcgcagtcgggagtggcactgtccccatgggtgatacagaagaaccctctgttctgggcaaaaaaggttgctgaaaaggtcggctgtccagtgggtgacgcagctcggatggcccagtgcttaaaggttacagaccctcgtgcactgactctggcctataaggtaccactggcgggactggaatatccgatgttacattacgtgggtttcgttccagtgatcgacggcgactttatcccagctgaccccatcaacctatacgctaacgcagccgacattgactatatcgcaggtaccaacaacatggacggccatatcttcgccagcattgatatgcctgctattaacaagggaaacaaaaaagtaacagaagaggatttctacaaactggttagtgagttcactatcacaaagggattgaggggcgcaaaaacgacattcgatgtgtacacagaaagctgggcacaggacccctctcaggagaataaaaaaaaaacagtggtggatttcgagacagacgtgctatttctggtacctacagagatagcccttgcacagcatcgggctaatgccaagagcgccaagacctacgcttacctgttctcgcacccctcaagaatgccagtgtatccaaagtgggtgggagccgaccacgccgacgacatccagtatgtgtttggcaaaccattcgcgacacctaccggctataggcctcaagaccggaccgtctccaaggctatgattgcttattggactaatttcgcaaagacaggcgaccccaatatgggcgattccgctgtgcccacccattgggaaccatacactaccgaaaatagtggttacctcgagattaccaaaaagatgggcagctctagtatgaaaagatctctaagaaccaactttctccgctactggactctgacgtatctcgcccttcccactgtgaccgatcaggaagcgaccccagtaccaccaacaggtgactccgaagcaacccccgtgcctcctaccggggactcggagacggcccctgtgccccctactggggattccggcgctcccccagtgccacccaccggcgattcaggggctcctcctgttccccctacaggagattccggagcaccaccagtgcccccaactggtgacagcggggctcccccagtgccacccacaggcgatagcggcgcacccccagtaccacctactggcgatagcggtgctcctccagttcccccaaccggtgatagtggtgcccctcctgttccacctacgggcgacagtggcgcaccccctgtgcctcccaccggagatgccggtcccccacccgtgcctcctaccggtgattcaggagcaccccctgtgcctcctactggagattcaggggcacccccagtgactcctactggcgatagcgaaacggcccctgtccctcctaccggagattccggcgctccacccgtgccacccaccggcgattctgaggctgctcccgtgccacccaccgatgactctaaggaggctcagatgcctgcagtgatccggttctag

SEQ ID NO: 217029 - DNA, 1707 bp, synthetic construct
  misc_feature 1..1707: note = Description of Artificial Sequence: Synthetic coding sequence
  source 1..1707: mol_type = other DNA
atgtggctcagagccttcatcctggctacgctgagcgccagcgcagcctgggcgggacacccgtcctccccgccagttgttgacacggttcatggaaaggtgcttggtaagttcgtgtccctggagggcttcgcccaaccggtcgctatatttctcggaatcccgttcgcaaaacctccgctaggccctcttagatttactcccccacagcccgctgaaccttggtcgtttgtcaagaatgctacaagctaccctcccatgtgcacgcaggaccccaaagcaggccagctactctcagagctgttcacaaacagaaaggagaatatccccttaaagctctctgaagattgcttgtacctaaacatttatacacctgccgatctcaccaagaagaaccgccttccggtgatggtctggattcacggcggaggcctgatggttggagccgctagcacttacgacggcctggctctagcggctcacgaaaacgtcgtggtagtgaccatccaataccgtctcggcatctggggatttttttcaaccggcgacgagcattctcgcggaaattgggggcacttagaccaggtggccgctctccggtgggtacaagacaacatcgcatctttcggcggaaatccaggctctgtgacaatctttggcgaatcggcgggaggcgaatcagtatctgtgctggtcctttcaccactggcaaagaatttattccatagagcgatctcagagagcggcgtggcactgacatccgtgctggtcaagaagggtgatgtgaagccgctggccgagcagatcgccatcacagcagggtgcaagaccaccacatccgctgttatggtgcactgcttgcgccagaaaacagaagaagagctgcttgagaccactctgaaaatgaaattccttagtttggatctgcagggcgatcctcgtgagagccaaccattgctcgggacggttatcgatggaatgctgcttctcaaaactcccgaagagcttcaagccgagcgcaattttcacacagtcccttatatggttgggattaataagcaggagtttggatggctgatccctatgcagctgatgagctatccactgagtgaaggacagttagatcagaaaacagctatgagcctgctgtggaaaagctacccactagtgtgtatcgcaaaggaactgataccagaggcgaccgagaagtatttagggggaactgacgacaccgtcaagaagaaggacctgtttctggaccttatcgccgatgtcatgttcggcgtcccgtccgtgatagtggccagaaaccatcgggacgccggtgccccaacctacatgtacgagttccagtacaggccatcatttagctccgacatgaagccaaagacagtgatcggcgaccatggcgatgagctgttttcagttttcggggcacccttcttgaaggaaggagcttcagaagaggagattaggttaagcaaaatggtgatgaagttttgggccaactttgcccgaaatgggaatcctaatggcgaaggactgccccattggcctgagtacaatcagaaagagggttatctgcagattggcgcaaacactcaggcagcacagaaattaaaagataaagaagtcgctttctggactaatctctttgctaaaaaagccgtggagaagcctcctcagaccgagcacatcgaactatag

SEQ ID NO: 217030 - DNA, 1704 bp, synthetic construct
  misc_feature 1..1704: note = Description of Artificial Sequence: Synthetic coding sequence
  source 1..1704: mol_type = other DNA
atgtggttgagagcatttattctggccactctcagtgcttctgctgcatggggccaccctagcagccccccagtggtggacacagtccatgggaaggtactcggaaaattcgtaagcctggaaggcttcgcacaaccagtcgccatctttcttggcattcctttcgccaaaccacctctcggtcctctgcggtttacccctccccagccagctgagccttggtcctttgttaaaaatgcgacgtcctatccccctatgtgtacccaagatccaaaagcgggtcagctgctcagcgaactctttaccaaccgcaaagaaaacattcctctcaagctgagcgaagattgcttgtatctgaatatctatacccctgccgacctgactaagaagaaccggctccccgtaatggtgtggatccacggtggaggactaatggtcggggcagcaagtacctacgacgggttagcactggccgctcacgaaaatgtggtcgtggtgactatccagtataggctcgggatttggggatttttcagcacaggcgacgagcattcaaggggtaactggggacatttagatcaggtggccgcactgagatgggtgcaggacaacattgcctccttcggtgggaatcccggtagtgtgacaatttttggagagtctgctggcggtgaaagcgtttccgtcctggtactcagtccccttgctaaaaacttgttccatagagctatcagcgaatccggagtagctctaacatccgtgctcgtgaagaaaggcgatgtcaaaccattagccgagcagatagctatcacggctggatgtaagacaaccacgtcagccgtaatggtccactgccttcggcaaaagacagaggaggaacttctcgaaaccacgctaaaaatgaaatttttgtccctagatctccagggcgaccctcgcgagagtcagccccttttgggaactgtcatcgatggcatgctgctgctgaagacacccgaggaactccaggcagaaaggaattttcacaccgttccctacatggtgggaattaataagcaggaatttgggtggctgatccccatgcaactgatgtcataccctttgtctgagggacagctcgaccagaagacagctatgtctctcctgtggaagagttatccactggtgtgcatagctaaagagctcatccccgaggccaccgagaaatacctggggggaaccgacgataccgttaaaaagaaagacttgttcctggacctgatagcagatgtgatgtttggagtcccatctgtcatagtggctagaaatcacagagacgccggtgcgcctacttatatgtatgaatttcaataccgcccaagcttcagctcagacatgaaacccaaaacagtcattggcgatcatggggacgagctttttagcgtgttcggagcgccttttcttaaagaaggagcttccgaagaggagatcaggttgagtaagatggtaatgaagttctgggcaaacttcgccaggaacggcaacccgaacggagagggcctgccccattggcctgagtataatcagaaggagggctatctgcagataggggcaaacacacaggctgctcagaaacttaaggataaggaggtggcattctggactaacttgttcgccaaaaaggccgtcgaaaaaccaccccagacggagcacattgaactttag

SEQ ID NO: 217031 - DNA, 1701 bp, synthetic construct
  misc_feature 1..1701: note = Description of Artificial Sequence: Synthetic coding sequence
  source 1..1701: mol_type = other DNA
atgtggttaagagccttcatcctagcaactttgtcagcctctgctgcctgggggcacccttcctccccaccggttgtggacacggttcatggaaaggtcctggggaagtttgtgtcgctggagggattcgcccaacctgtggcaatttttctcggaatccccttcgcgaagcctcctctcggtccactgcgctttacaccaccacagcctgcagagccatggtcgttcgtaaagaacgcaaccagctatccccctatgtgtacccaggacccaaaagcgggacagctgctttcggaactgtttacaaataggaaggaaaacatccccctaaaactctccgaggattgtctgtacttgaatatctacacacctgcggacctgacaaagaaaaaccgtctgcccgtaatggtgtggattcatgggggtggactgatggttggagctgcatcaacatacgatggactggcactggctgctcacgaaaatgtcgtggttgtgacaatccaatacaggctgggtatttgggggttttttagtaccggggatgagcactccaggggcaactggggacatcttgaccaagtggccgcactccgctgggtgcaggataacatagcatcctttggaggcaacccgggaagcgtaacaatttttggagagagcgcaggcggagagagtgtgtccgtcctcgtgctgtccccgcttgccaaaaacctgtttcaccgcgctatttctgagtctggagtggcccttacatcagtcttagtgaagaaaggagacgtgaaaccacttgctgagcagatcgccatcaccgccggttgcaagacgaccacgtcagcagttatggtccactgcctcaggcagaagaccgaagaagaacttctcgagaccacattgaagatgaaatttttgtccttggacttacagggtgacccacgggagagccaacctctgctcgggaccgtgattgacgggatgttgttgttaaagacaccagaggagctccaggcggagaggaacttccacactgtaccatatatggtcggtatcaacaagcaggagttcggatggttgattcctatgctgatgtcgtatcctctgagtgaaggccagctagatcaaaagactgcaatgtcgctcctgtggaaatcttatcctttagtctgcatagcgaaagagctcatcccagaggcgactgagaaatacctgggcggaacagacgatactgtgaagaaaaaggatctctttctggaccttatagctgatgtgatgtttggtgtaccctccgtaatagttgctcggaatcacagggatgccggagcacctacatacatgtacgagtttcagtatcggccatcttttagctcagacatgaaaccgaagactgtcatcggcgaccatggggatgaactgttctctgtcttcggcgcaccctttctgaaggaaggcgcatccgaggaagaaatccggctgtccaagatggtgatgaaattctgggcgaactttgccaggaacggaaatccaaacggcgagggactcccacactggcctgaatacaatcagaaggagggatatcttcagattggagccaatactcaagccgcacagaagctgaaagataaagaagtagcattttggaccaacttgtttgcaaagaaagccgtagagaagccaccccagaccgaacatatcgaattatag

SEQ ID NO: 217032 - DNA, 1299 bp, synthetic construct
  misc_feature 1..1299: note = Description of Artificial Sequence: Synthetic coding sequence
  source 1..1299: mol_type = other DNA
atggtttggattcatgggggagggctgatggttggcgcagcctctacatatgacggcctcgctttggctgcacatgagaacgtggtcgtcgtcacaattcagtatcgactgggcatctggggatttttctctacaggagatgagcactcccgcggaaattggggccatctagaccaggtcgcggctctgaggtgggtccaggataacatcgccagtttcgggggaaaccccggatctgtcacaatcttcggagagagcgcaggaggggaaagtgtgagcgtcctggtgctgagcccgctcgcgaagaacttgttccatcgcgcaatctctgagagcggcgttgcccttacctccgttctggtgaaaaaaggcgatgtgaagccgctcgccgaacagattgctatcactgcgggatgcaaaaccactacctctgcggttatggtacactgtctccgccagaaaactgaggaggaactacttgaaacaacactgaagatgaaattcctgagcttggacttgcagggcgacccaagggaatcacagccactgctggggacggtgattgatggaatgttgctactcaaaaccccagaagagttgcaagccgagcgcaactttcacacagtgccatacatggttgggatcaacaagcaggagttcgggtggctgatcccaatgcagctcatgagctacccgctatccgagggccagctcgaccaaaagacagcaatgtccctcctgtggaaaagctatccactcgtttgtatcgccaaggaactcatccctgaagccactgagaaataccttggaggaaccgacgacacagttaaaaaaaaagatttgttcttggaccttattgcagatgtaatgtttggagtcccatccgttattgtggcgagaaaccaccgcgacgcaggagccccaacctacatgtacgaattccaatacaggccttctttcagcagcgacatgaagccaaaaacagttattggcgaccacggcgacgagctgttcagtgtgttcggcgcaccttttctcaaggagggagcatctgaggaggaaatccggttgagcaagatggtcatgaagttttgggccaactttgctagaaatggaaatcctaatggcgaggggctgccgcactggccagagtacaatcagaaggaaggttatcttcagattggtgctaatacgcaggccgctcagaaactgaaagacaaggaagtggctttctggactaaccttttcgccaagaaagccgtggaaaagccacctcagaccgagcacatagagctttag

SEQ ID NO: 217033 - DNA, 1716 bp, synthetic construct
  misc_feature 1..1716: note = Description of Artificial Sequence: Synthetic coding sequence
  source 1..1716: mol_type = other DNA
atggaacgcgctgtgagagtggagagcggtgtgctcgtcggtgtcgtatgcctgctgttggcgtgcccagccacggcaaccggtcctgaagttgcccaaccggaggtggatactaccctgggaagagtgaggggtagacaagttggcgtgaaggggacagatcgactagtaaatgtatttctggggatcccttttgcacagcccccactgggtcccgatcgtttcagcgcccctcatccagcccagccgtgggagggggtgcgggatgcgtcaactgcgcctccgatgtgtttgcaggatgtggagtccatgaacagcagtcggtttgtactgaacggtaaacagcagatcttttccgtctctgaggactgcctcgtattgaacgtgtacagcccggcagaggtccccgctggcagcggaagacctgttatggtttgggtgcatggaggcgcactgattaccggcgcagcaaccagctacgatgggagcgccctcgccgcttacggcgatgtggtggtcgtgaccgtccagtatcgtctgggtgttctcgggttttttagcacaggggatgagcatgcaccaggcaaccaagggtttctggatgtggttgcagctctccgctgggtacaggagaatattgccccatttgggggagatctgaattgtgtgaccgtgttcggtggcagcgccggtggtagtattatctccgggttggttttgtcacctgtggctgcagggctctttcatcgggctattactcagtctggcgtgattaccacgcccggaattattgactcccacccttggcctctcgcccagaagatagccaatacacttgcctgctcctccagcagcccggcagaaatggtgcagtgcctacaacagaaggagggggaggagttggtgttatccaaaaagttgaaaaacactatttatcctctgacagtagatggcactgtgttcccgaaatccccgaaggagcttctgaaagagaagcctttccattccgtgccgtttctcatgggcgtgaacaatcacgaattctcttggttgattccacgcggttgggggttactggacactatggagcagatgagcagggaggacatgctggccatatccacaccagtcctgacatccctggatgtcccacccgagatgatgccaactgtgattgacgaatatctggggagcaatagcgacgcccaggccaagtgccaagcttttcaggagtttatgggagatgtgttcattaacgtcccaacggtgagtttctccaggtatctccgggatagtggcagtcccgtgtttttttacgaatttcagcatcggccatcatccttcgctaagattaagccagcctgggtgaaggccgatcatggagcagagggtgccttcgtcttcggcggtcccttccttatggatgaaagtagccgcctcgcgttccctgaggccaccgaagaggagaagcagctgtccctcacaatgatggcacagtggacccatttcgcgcgaaccggcgaccccaatagcaaggcactccccccatggccacagtttaatcaggccgaacaatacctcgagattaaccccgtgccgcgtgccggacagaaattccgagaggcctggatgcagttctggagtgaaactcttccgagcaagatccagcagtggcaccagaagcagaagaatcggaaggctcaggaggatttgtag

SEQ ID NO: 217034 - DNA, 633 bp, synthetic construct
  misc_feature 1..633: note = Description of Artificial Sequence: Synthetic coding sequence
  source 1..633: mol_type = other DNA
atggaacagatgagcagggaagatatgctagccatctcaacgcctgtgctgacatcgctggacgtgccccctgagatgatgccaacagtgattgatgaatatctgggctcgaactctgatgcccaagccaaatgtcaagccttccaggagtttatgggggacgtgttcattaacgtcccaactgtgtccttctctaggtacctgcgggacagtgggtcgcccgttttcttttacgagtttcaacatcgaccatcatccttcgccaagattaagcccgcatgggtgaaggccgaccatggagctgagggggctttcgtgttcggtggcccttttctaatggatgagtcttcccgccttgctttccccgaggccactgaggaggagaagcagttgtcactgactatgatggcacagtggactcactttgcccgtacaggtgacccaaactcaaaggcccttccaccgtggccccagttcaaccaggccgaacagtatctggagataaatccagtgcctagggctgggcagaaattccgggaggcttggatgcaattctggtctgagaccctcccctcaaagatacagcaatggcaccagaagcaaaagaaccggaaggcccaggaggatctctag

SEQ ID NO: 217035 - DNA, 1707 bp, synthetic construct
  misc_feature 1..1707: note = Description of Artificial Sequence: Synthetic coding sequence
  source 1..1707: mol_type = other DNA
atggaacgcgcagttagagtggagtcgggggtgctggtcggagtcgtctgtctcctgctcgcctgtcccgctactgccacgggcccagaagtcgcccagccggaagtagacactacccttgggcgagtgcgcggtcgccaagtgggagttaagggaaccgatcgactggtcaacgtatttttggggatcccctttgctcagccccctctgggcccagatcgcttcagcgccccacaccccgcacaaccgtgggagggcgtccgcgacgcgtcaactgctccgccaatgtgtcttcaggacgtagagtcaatgaatagctccagattcgtccttaacggcaagcagcagatcttctcggtcagcgaggattgccttgtgttaaatgtgtacagtcccgctgaagtcccggctgggagcggcagacccgtgatggtctgggtccacgggggagctttgatcaccggcgctgctacatcctatgacggctctgccctggcggcatacggcgatgtggtggtagtcactgttcagtatcggctgggtgtgctgggatttttctccacgggggacgagcacgcccctggcaatcagggatttctcgacgttgtcgccgcattgaggtgggtccaggagaatattgctccgttcggaggcgatttgaattgtgtcacagtgtttggaggctctgccggaggttcaattatttcaggcctcgttcttagccccgtagctgccggtctcttccaccgagccatcacgcagtcaggggtgattaccacccccggtatcatagactctcacccatggcctctcgcacagaagatcgctaacactttagcatgcagttcttcttcccccgcagagatggtccagtgtcttcaacagaaggaaggcgaagaactcgtgttgtccaagaagctgaagaacacaatataccccctcactgtcgacggaaccgtgttccccaaaagcccaaaagaattacttaaagaaaagccctttcattccgtgccctttctgatgggcgttaacaatcacgaattttcttggcttatccctagaggctgggggctgctagatacaatggagcagatgagccgagaggacatgctggccatcagcacgcccgtcctcaccagtctggatgtgcctccggagatgatgccaaccgtgatcgacgagtacctgggctcgaattctgatgcgcaggccaagtgtcaggcatttcaggagtttatgggagacgttttcattaacgttccaactgtctccttctcacgctatctacgcgatagcgggagtcccgtgttcttttacgaatttcagcacaggccttctagttttgctaagattaaacccgcttgggtgaaggccgatcacggagctgagggggcttttgtctttgggggtccatttctaatggacgaaagctccaggctcgaggccacagaagaagagaagcaactcagcctgactatgatggcccagtggacccattttgccagaaccggggacccaaattccaaagccttgcccccatggccacagtttaaccaggctgaacaatacttagaaatcaaccccgtgccaagagcagggcagaaattccgagaggcatggatgcaattctggagcgagaccctgccttccaagatccagcagtggcaccagaagcagaagaacagaaaggcacaggaggacctttag

SEQ ID NO: 217036 - DNA, 738 bp, synthetic construct
  misc_feature 1..738: note = Description of Artificial Sequence: Synthetic coding sequence
  source 1..738: mol_type = other DNA
atggctaatgaggcctatccgtgcccttgcgacatcggtcaccgactggagtacggtgggctcggccgagaggtgcaggttgagcatattaaagcatacgtcactaagtcacctgtcgatgcaggcaaagcggtgattgtcatccaggatatctttggctggcaactgccgaacacacggtacattgctgacatgatcagcgggaatggttataccactattgtaccagatttttttgtcgggcaggaaccatgggacccaagcggcgattggtcaatatttccagaatggctgaaaactagaaacgctcagaaaatcgatagggaaatcagcgccatactgaaatacctgaaacagcagtgtcatgcgcagaagatcggcatcgtgggattctgctggggcggaactgctgttcaccatctgatgatgaaatattccgagtttcgagccggagtttccgtgtacggaatcgtgaaagattccgaagatatctacaacctgaaaaatccaacgttattcatattcgctgagaacgacgtcgtgatccctctaaaggacgtctctctcttaacccagaaattaaaggaacactgcaaggtggagtatcagatcaagaccttctccggacagacgcacggattcgttcatcggaagcgggaagattgctctcctgccgacaagccatatatcgatgaggctagacgtaatctgattgagtggctgaacaaatacatgtag

SEQ ID NO: 217037 - DNA, 1260 bp, synthetic construct
  misc_feature 1..1260: note = Description of Artificial Sequence: Synthetic coding sequence
  source 1..1260: mol_type = other DNA
atgagaggactgcttgtcctgtcagtgttgctaggcgcagtgtttggaaaagaagattttgtaggccatcaggtccttcgcatctccgtggcagacgaagcccaggtgcagaaagttaaggagctcgaggatcttgagcacttgcaattagatttctggcggggacccgctcatccgggaagccccatcgacgttcgggtcccatttccaagtattcaggcggtgaaaatctttctggaaagccacggaatctcctacgaaacgatgattgaggatgtccagtcgctgttggatgaagagcaagaacaaatgttcgccttcaggagccgagcacgctcaacagacacttttaactacgctacttatcataccctcgaagagatatacgatttcctagacctattagttgcggaaaatccccacttggtgtcaaaaattcagattggaaacacttacgaaggcagacccatttacgtccttaaattttcgactggaggctcgaaacggcctgcaatttggattgatacaggtatccactcgagggaatgggtgactcaggcttctggcgtgtggttcgccaagaaaatcacccaggactacgggcaggatgcagctttcacagccatactcgacactctggatatctttctggagatagttactaatcccgacgggtttgcattcactcattccaccaacaggatgtggagaaaaacaagatctcataccgcgggtagcttgtgtatcggcgtcgacccaaatcgaaactgggatgctggatttgggctgtcaggtgccagctctaatccttgctccgaaacttatcatggcaagtttgccaactcagaggttgaggtaaagagtatagtggacttcgtgaaggatcatggtaatattaaagcctttatctcgatccattcttactcccagctgcttatgtacccctacggctacaagaccgaacccgtgccggaccaagacgaactggatcagctttccaaggctgcagtgacagccctagcaagcttgtacggcaccaagtttaattatgggtccattattaaggctatttaccaggccagtggatccacaatcgactggacctatagtcagggcattaaatacagctttacattcgagctcagggatactgggaggtatgggttcctcctccccgcttcccagattatcccgacagcgaaagagacttggcttgctttacttaccattatggagcacacccttaatcacccatactag

SEQ ID NO: 217038 - DNA, 1098 bp, synthetic construct
  misc_feature 1..1098: note = Description of Artificial Sequence: Synthetic coding sequence
  source 1..1098: mol_type = other DNA
atggaccgggcagccctgctgggcttagcacgcctgtgtgccctgtgggcagccttgcttgtgttgttcccttatggagcacagggaaattggatgtggctggggatcgcctcattcggagttcccgagaagctgggatgcgccaaccttcctctgaattcgcggcagaaggaactctgtaaacggaagccctatcttctcccctccatcagagagggagctaggctagggatacaggaatgcgggtctcagttccgccatgagcgatggaactgcatgattacagcggctgcgacgactgctcccatgggtgcgtctcctcttttcggttatgaattgtccagcggcaccaaggaaactgccttcatttacgcagtcatggcagctggactggtgcactcagttacccgcagttgctccgcgggtaatatgaccgagtgtagctgcgacaccactctgcaaaatggcggttcagcttctgaaggctggcattggggtggatgctcggatgacgtgcaatatggcatgtggtttagccgtaagttcctggatttccccatcgggaataccaccggtaaggagaacaaggtgctgcttgccatgaacctccacaataatgaggccggacggcaggcagtagctaagcttatgtcggtcgattgcaggtgtcacggggtgtctggctcttgtgctgtaaaaacctgttggaaaaccatgagctctttcgaaaagatcggacatcttctcaaggacaagtatgagaattcaatccagatctcagataaaaccaagagaaaaatgagacggcgagaaaaggaccaacgcaagatccctattcacaaagacgatttactgtacgtgaacaaatccccgaactattgcgtggaggataagaagctcggaattcctggcacccagggcagagagtgcaaccgcacatcagaaggcgctgatggatgtaatctgctttgttgtggtcgcggatacaatacacatgtggtacgacatgtagagagatgcgaatgcaaatttatttggtgctgttacgttcgctgtagacgatgtgagtccatgaccgacgtgcacacctgtaagtag

SEQ ID NO: 217039 - DNA, 1254 bp, synthetic construct
  misc_feature 1..1254: note = Description of Artificial Sequence: Synthetic coding sequence
  source 1..1254: mol_type = other DNA
atgaggcttattctgccagtaggccttatcgctaccacactagccatcgcgcctgttcggtttgacagggagaaagtgttcagggttaagcctcaggatgaaaagcaggcagatatcattaaggacctggcgaaaactaacgaacttgatttttggtaccctggggctacccatcacgttgccgcaaacatgatggtggactttcgagtgtctgaaaaagaatctcaagccattcagtcagctttggatcagaacaagatgcattacgagattctgatccatgatctgcaggaagaaatagaaaaacagttcgacgtcaaggaggacattcccggacggcacagttacgccaagtataacaattgggaaaagatcgtggcctggactgagaagatgatggataaatatcctgagatggtctccagaattaagataggctctacagtggaggacaaccccctgtatgtacttaagataggagagaagaatgagcgtcggaaagcgatcttcacagattgcggcatccacgcgagagagtgggtgtcccccgcattctgtcagtggttcgtgtatcaggctacaaaaacctacgggaggaacaagatcatgaccaaattactggaccgaatgaatttctatattctcccagtgttcaacgtggacggatacatctggagctggacgaagaacaggatgtggaggaagaatagaagcaagaatcaaaattccaagtgtatcggaactgacctgaataggaactttaacgcatcctggaatagcatccctaacactaatgacccatgcgccgacaactatcgaggatccgcgccagagtctgagaaagaaaccaaggcggtgacaaactttatcaggagccatctcaacgagatcaaggtctacatcacattccactcctatagccagatgttgttgttcccttacggctacacttcaaaactgcccccaaaccacgaggacctggccaaagtcgccaagatcggaactgacgtcctgagcacccgatacgaaactaggtacatctatgggccaattgaatcaacaatttaccctatttccgggagttctctggattgggcttacgacttgggcatcaaacacacgtttgctttcgaattgagggacaagggcaagttcggttttctgttgcctgaaagtaggataaaacctacatgtcgggaaacgatgctggctgttaaattcattgccaagtatatactcaagcacacgtcatag

SEQ ID NO: 217040 - DNA, 1260 bp, synthetic construct
  misc_feature 1..1260: note = Description of Artificial Sequence: Synthetic coding sequence
  source 1..1260: mol_type = other DNA
atggctatgcgactgatccttttcttcggggctctgttcggtcacatctactgcctggaaaccttcgtcggcgatcaggttctggagattgtgccgagcaatgaggaacaaatcaaaaacctgctgcagctcgaggcgcaggaacatctccagctcgatttctggaaaagccccacaaccccaggagaaacggcccatgtgagggtaccgtttgtcaacgtgcaagccgtgaaggttttcctggagtcccagggaattgcgtacagtatcatgatcgaagatgtgcaggttctgctggataaggaaaacgaggagatgctcttcaataggagacgcgagaggtcaggtaatttcaacttcggagcctatcatacgctggaggaaatatctcaggagatggataacctggtggcggagcaccctggcctggtgtctaaggtgaatataggtagtagcttcgaaaaccgcccaatgaacgttctgaaattcagtactgggggagataagccagccatatggctggacgcgggtatacacgccagagaatgggttacacaagcaactgcactgtggaccgctaacaagatagtgtcagactatggtaaggaccccagtataaccagcatcctcgacgctttggatatttttctgctccccgtgaccaatcccgacgggtatgtcttctcgcagaccaaaaacaggatgtggaggaaaacgagatctaaggtttcaggctccctttgcgtgggagtagacccaaaccgtaattgggatgcagggtttggtggacccggtgccagctcaaatccttgctctgactcttaccacgggccatctgccaacagtgaagttgaagtgaaaagcatagtcgatttcattaagtcacacgggaaggtgaaagcctttattacccttcactcctactctcagcttctcatgtttccctacggttacaagtgcaccaagctggacgatttcgatgaactctctgaggtcgcccagaaggccgcacagtcgcttagatcgctacacggaacaaaatataaggtcggcccaatatgctccgtgatctatcaggccagcggtggtagcattgactggtcctatgattatggaattaagtactcttttgcttttgagttgagggacacaggtagatacggcttcctacttccagcacgccagattctgccgacagctgaagagacttggctaggactgaaggctattatggaacacgtgagggaccacccttattag

SEQ ID NO: 217041 - DNA, 1167 bp, synthetic construct
  misc_feature 1..1167: note = Description of Artificial Sequence: Synthetic coding sequence
  source 1..1167: mol_type = other DNA
atgcgctggatactgttcattggggctctaataggatcgtctatctgtggtcaggagaagttttttggggatcaggtacttagaatcaacgtcagaaatggtgacgagatatctaagcttagccagctcgttaatagcaataatctgaaattaaatttctggaaatcaccttcttcttttaatagaccggtcgatgtgttggtgccctcggtgtcactgcaagccttcaagtcatttctccggtctcagggattagagtatgccgtaactatcgaggacctgcagatttatcatgagatggataacattgcggcagacttcccagatctggcccgtcgggtcaaaataggccactctttcgagaatagacccatgtatgtgcttaagtttagcaccggtaagggcgtccgccgtcccgcagtctggcttaatgccggaatccactcgagagaatggattagccaggccaccgcgatctggactgctcgaaagatcgtgtcagattatcagcgagacccggcaatcacctcaatccttgagaagatggacatatttttgctgccagttgccaatcctgacggctatgtttacacacagactcagaaccgcttatggagaaaaacacgcagcaggaatccgggtagttcctgtataggcgcagaccccaaccgtaactggaacgcctcctttgctgggaaaggggcaagcgacaacccatgctccgaggtgtatcatggtccacacgcaaactctgaagttgaggtgaaatccgtcgtggactttatccaaaaacatggtaattttaaagggttcattgatttacattcgtattcccaactattgatgtacccctatggatacagtgttaagaaagcacctgatgctgaggagctggataaagtggccaggctggcagccaaggccctggcgagcgtatccggaaccgaataccaggttggcccaacttgcaccacagtgtaccctgcttcaggcagttcaattgactgggcatacgataacggcatcaaattcgccttcacatttgagcttcgcgacactggcacctatggttttctgctcccagcaaaccagatcatcccaacggccgaagagacatggctgggcctgaagaccatcatggagcatgtacgcgacaacttatattag

SEQ ID NO: 217042 - DNA, 681 bp, synthetic construct
  misc_feature 1..681: note = Description of Artificial Sequence: Synthetic coding sequence
  source 1..681: mol_type = other DNA
atgaagattgtgtctgactatcagcgggatcccgcaataactagcatcctggaaaaaatggacatttttctcctgccagtggctaaccccgatgggtacgtatacacacagactcagaatcgtctgtggcgtaagacccgttcccgcaatccagggtcatcatgcatcggcgcagacccaaacagaaactggaacgcttcgtttgctggcaagggggcatccgataacccttgttctgaggtgtatcatggcccacatgctaacagcgaagtagaggtgaagagtgtggtggacttcatccaaaaacatgggaattttaagggcttcattgatcttcatagctattcacagctcctaatgtatccctacggatatagtgtgaagaaagctccagacgccgaagaactggataaagtggcccgattggcagcaaaggcactcgcctccgtctctgggacggaataccaggtgggccctacctgtaccactgtgtatccggcttccggcagctccatcgactgggcgtatgataatggcataaagtttgcgtttacattcgagctgcgagacaccggaacatatggcttcctgctccccgcaaaccagattattcctactgccgaagagacttggctcgggttgaaaactataatggaacatgtgagggataatttgtattag

SEQ ID NO: 217043 - DNA, 582 bp, synthetic construct
  misc_feature 1..582: note = Description of Artificial Sequence: Synthetic coding sequence
  source 1..582: mol_type = other DNA
atgcatcatcttaataagacccacagtggactgatccatatgttttcgatagggaggtcatatgagggacgcagcttatttatcctgaagctcgggaggcgctccaggctgaagcgcgcagtgtggatcgactgcggcatccatgcaagagagtggataggacctgcattttgccagtggtttgtcaaggaggctctgttgacatataagtcagatcccgctatgaggaagatgcttaaccatctgtatttttatattatgccggtgtttaacgtcgacgggtaccacttctcctggaccaacgatagattttggagaaaaactcggtcaaggaattccaggttccgctgccgcggagtggacgccaaccgtaactggaaagtcaagtggtgtgacgtatcctcggggagttccatggattgggcctacaaaaacgggattccttacgccttcgcattcgaactgagggacaccggatatttcgggttcctcctaccagagatgctgattaagcctacttgcacagagactatgttggcagtcaaaaatatcactatgcacctcttgaagaagtgcccctag

SEQ ID NO: 217044 - DNA, 1314 bp, synthetic construct
  misc_feature 1..1314: note = Description of Artificial Sequence: Synthetic coding sequence
  source 1..1314: mol_type = other DNA
atgaagtgtcttggaaaaagaagaggccaggccgcagcctttttgcctctgtgctggctgtttttgaagatcctgcaaccaggtcactcacatctctataacaaccgttacgcaggtgacaaggttatcagattcattccaaaaacagaagaggaggcctatgcgctcaagaagatttcgtaccaattaaaggtagacctatggcagccgtccagcatcagctacgtcagcgagggcaccgtcaccgacgttcacataccacagaacggatcgcgcgctcttctggcctttcttcaggaagccaatattcagtataaggtgcttatagaggacctccagaagacactagaaaagggtagttctttgcacacacagaggaaccgaaggtctctgtctggatacaactatgaggtgtaccacagcctggaagagattcagaattggatgcaccacttaaataaaacacattccggattaatacatatgttttcgatcggcaggagctacgaaggcagaagtcttttcattctgaagctcgggagacggtcaaggctcaagagagcagtgtggatcgattgtggcatacacgcccgagagtggattgggccagccttttgtcagtggttcgtgaaagaagccctccttacttataaatctgatccggctatgcggaagatgcttaaccatctgtatttttacatcatgcctgtgtttaacgttgatggataccacttcagctggaccaatgacagattctggcgcaaaacccgcagcaggaacagcaggttccggtgtcgcggtgtggatgctaacagaaattggaaggtgaaatggtgtgacgagggagcctccatgcatccatgcgacgatacatactgtgggccattccctgaatccgaaccagaggtgaaggccgtggccaatttcttacgtaagcataggaagcacataagggcttatctcagcttccacgcctatgcccagatgttgctgtacccgtactcatataaatacgctaccatcccaaacttcagatgtgtggagagcgcagcttataaagcagtaaacgctctgcaaagtgtatatggcgtgcggtaccgctacggacctgctagtacgacgctttatgtcagctctggctcctctatggactgggcctataagaatgggatcccctacgccttcgccttcgagctgagagacaccggctactttggattcctactgccagaaatgttgatcaaacctacctgcaccgagactatgctggccgtaaagaatattactatgcatctgttgaagaaatgcccttag

SEQ ID NO: 217045 - DNA, 948 bp, synthetic construct
  misc_feature 1..948: note = Description of Artificial Sequence: Synthetic coding sequence
  source 1..948: mol_type = other DNA
atgaagtgcctcgggaagaggagaggacaggcggcagcgtttctgcccctctgctggctcttcctcaaaatcctccaacccggacatagtcatttatacaacaaccgctatgcaggtgacaaggttatccggttcattccaaaaacagaagaagaagcctacgcgctgaagaagataagctaccagctcaaagttgacctgtggcagccaagctctatctcgtatgtgtcggagggcacggtgaccgacgtccacatcccacaaaatgggagtagggcacttctggcgtttcttcaggaagccaatattcagtataaggtgctcattgaggacctgcagaagactttagagaaaggcagctccctccacacccaaaggaaccgccgtagtctgagtggctataactacgaggtgtatcacagtttggaagagatccaaaattggatgcatcatttaaataagacacatagcggactaatccatatgttctcgattggcagatcatatgagggcagaagcttgttcatacttaaactcggtaggcgcagcaggcttaagagagcagtgtggatcgactgtggtatccatgcccgtgaatggattggaccagcattttgtcagtggttcgtgaaagaagcccttcttacatacaagtccgacccggctatgagaaagatgctaaatcacttgtatttttacatcatgccagtctttaacgtcgatggctatcacttctcctggaccaatgaccggttttggcgtaagactcggagcaggaattctcggttccgctgccgtggcgtggacgcaaatcggaactggaaggtcaaatggtgtggaaaattcggaacaaactgggatcccgaccccaaggtaagtgccggattcaccctccagaacatgagtcccgaagatagccatggccgactgatgttcttttgtatgtag

SEQ ID NO: 217046 - DNA, 1272 bp, synthetic construct
  misc_feature 1..1272: note = Description of Artificial Sequence: Synthetic coding sequence
  source 1..1272: mol_type = other DNA
atgaagctctgctccctggccgtccttgtccccatcgtcttgttctgtgagcaacatgtgtttgcatttcagtctggccaggttttagccgcactgccaagaacctccaggcaggtccaagtgcttcaaaatctgacaacgacttacgagattgtcctgtggcaaccagtgacagccgacctcattgtgaaaaaaaagcaggtacatttctttgtgaatgccagcgacgttgataacgtcaaagcgcatctaaacgtgagcggaatcccatgcagtgtcctcctggctgacgtagaggatctcatccagcaacagattagcaacgatacggtgagcccaagggccagcgcctcatattacgaacaataccacagcctgaatgagatttacagttggatcgagtttatcacagagagacacccagacatgctgacaaagatccacatcggatcaagtttcgaaaaataccccctctatgtgctgaaagtctccggcaaggaacaggctgcaaagaacgcgatctggattgactgcggaattcatgctagggagtggatctcaccggctttctgtctgtggtttattgggcatattacgcaattctacgggatcatcgggcagtacaccaacttactgaggcttgtcgacttttacgtcatgccagtggtgaatgtggatggctacgactatagctggaaaaagaaccggatgtggagaaagaaccggtccttttacgccaataatcattgtatcggaactgacctaaatagaaactttgctagcaaacactggtgcgaagagggcgcttcttctagcagttgctctgaaacgtactgtggactttatcccgagagcgaaccggaggtgaaggctgtggcaagttttcttcggagaaatattaaccagattaaggcttacatctcaatgcattcatacagtcagcacatcgttttcccctatagctatactcgtagcaaaagtaaggatcatgaagagttgtcactggtggcttctgaggccgttagagccattgagaaaatatcaaaaaacaccaggtacactcacggccacggctccgagactctgtacctggctcccggaggcggagatgattggatctatgatctcggcataaagtattccttcacaatcgaattgcgggatacagggacatatgggtttctcctgccagaacggtacatcaaacccacctgtcgggaggcgttcgccgcagtgtccaaaattgcctggcacgttatccggaacgtgtag

SEQ ID NO: 217047 - DNA, 1083 bp, synthetic construct
  misc_feature 1..1083: note = Description of Artificial Sequence: Synthetic coding sequence
  source 1..1083: mol_type = other DNA
atgaaactgtgctctctcgcagtgctcgtccccatcgtgctgttctgcgaacaacacgtgttcgctttccagagcgggcaagtgctggccgctttgccacgcacctcaaggcaggttcaggttctgcagaatctcacaacaacgtacgaaatcgtgctctggcagccagttacagcagatctaattgtgaagaaaaaacaagtgcattttttcgtgaatgcaagcgacgttgacaatgtgaaggcgcacctaaatgtgagtggaatcccttgttccgtgctattggctgatgtcgaggacctcattcaacaacagatctccaacgacacagttagccctcgggctagcgccagttactacgaacagtaccacagtctgaacgagatttattcttggatcgagtttattaccgaacggcatcccgacatgttaaccaagatccatatagggagctcgttcgagaaataccctctatatgttctgaaggttagcgggaaggagcaggccgcaaaaaatgccatatggatcgattgtggcattcatgctcgcgagtggatatctccggcattttgtctctggtttattggacacaatcgaatgtggcggaagaacagatcgttctatgccaataaccattgcatcggaaccgatcttaatcgcaacttcgctagcaaacattggtgcgaagagggcgcatcctcttcaagctgttccgagacgtattgtggactgtatccggaatctgagccagaagtgaaagctgtggctagcttcttacgcaggaacatcaaccagatcaaggcctatatatctatgcactcgtatagccagcacattgtgtttccttactcatatactcgatccaaatctaaagaccatgaggaactgtcacttgtggctagtgaagccgttagagctatcgagaagatttctaagaatactaggtatacccatgggcacggaagtgaaacactgtacctggctcccggaggcggagacgactggatctatgacctggggataaaatactccgtcacctccaatccacctgtggagaagctcttgcctctgtccctcaagtag

SEQ ID NO: 217048 - DNA, 849 bp, synthetic construct
  misc_feature 1..849: note = Description of Artificial Sequence: Synthetic coding sequence
  source 1..849: mol_type = other DNA
atgttgccccttctgcggtgcgtgcctagagtgctaggctcttccgtggctggcctgcgggcagctgctccggcttctccattccgccagctccttcagccagctcctcggctatgtacccgccctttcggcctactttctgtacgggcaggttcagaaaggcgacccggactgcttcggcctaggggaccctgcgcctgcggctgtggctgtggatcattacataccgatggcgacaaggccttcgtcgattttcttagtgatgagatcaaggaggagcggaagatccaaaagcacaagaccttgccaaagatgtctggtggatgggagctggagttgaatggaaccgaggccaaactggtgcggaaagtggcaggagagaaaatcactgtaacctttaatatcaacaatagcattccacccacttttgatggtgaggaagaaccatcccaggggcaaaaggtagaagaacaggagcccgagctgactagtactcctaactttgtggtcgaggtgattaaaaacgatgatggaaagaaggctctcgtgttagactgccattatccagaagatgaagtcggacaggaggatgaagctgaatctgacatcttcagcattcgtgaagtgtcattccaaagcacgggcgaatctgagtggaaagacactaactatacgctgaacacagactcactggattgggccttgtacgaccatctgatggacttcctggctgatcgaggggtggataacacgttcgctgacgaacttgtggaactcagcacagctttagagcatcaggagtacatcaccttcctcgaggacttaaaatcatttgttaagtctcaatag

SEQ ID NO: 217049 - DNA, 3402 bp, synthetic construct
  misc_feature 1..3402: note = Description of Artificial Sequence: Synthetic coding sequence
  source 1..3402: mol_type = other DNA
atgcgctttgtgctcagcggcaatcttcatggtggatcagttgtggcctcttaccccttcgatgattcccccgagcacaaggctacggggatatattccaaaacatccgacgacgaggtgttcaaatacttagcaaaggcgtacgcaagcaatcaccctatcatgaagactggcgaaccgcactgccccggagacgaggacgagacatttaaggacgggatcacgaacggggctcattggtacgacgttgaaggagggatgcaggattacaactacgtctgggctaattgctttgagattacacttgaactcagctgctgcaagtaccctccagcttctcagcttagacaggaatgggaaaacaacagggagtcacttatcacactgatcgagaaagtgcacatcggagtcaagggatttgtgaaagacagcatcaccggctccggtctggagaacgccacgatttctgtggcaggaatcaatcacaatatcacaacaggacgttttggggacttctatagactgctggtccccggtacttataacctcaccgttgtgcttaccggttatatgcctctgacagtgacaaatgttgttgtgaaagagggacccgcaactgaggttgactttagtttacgccctactgtgacttcagtgatcccagatactactgaagctgtgtctaccgcttctacagtggcaattcctaacatcttaagtggaacaagcagtagctatcagccaattcagccgaaagatttccaccaccatcattttcctgatatggaaatctttctgaggcgcttcgccaatgagtatcccaacattacccgcttgtacagcctcggcaagtcagtggagtcccgcgaattatacgttatggagatcagcgacaacccaggcgtgcatgaacccggtgagccggaattcaagtatataggcaatatgcacgggaacgaggtggtagggagggagctcctgttaaatctcatcgaatatttatgtaaaaattttggcaccgatccagaggtcacagacttggtgcataataccaggattcatcttatgccatccatgaatccggacggctacgagaagtctcaggagggagacagcattagcgtcatcggtcggaataactctaacaactttgatctgaaccgcaattttcccgatcagttcgtccagatcacagaccccacccagccagagaccatcgccgtgatgtcatggatgaagtcatacccctttgttttgtctgcaaacctgcacgggggttctttggtggtgaactacccttttgacgatgatgagcagggccttgctacctactctaaatcccccgacgatgccgtcttccagcagatcgctctgagttatagtaaagaaaattcccaaatgtttcagggaagaccatgcaaaaacatgtatcctaacgagtacttccctcacggtattacaaacggcgcatcctggtataatgtgcctggcggtatgcaagattggaattacctccaaacgaactgttttgaagtgactatcgaactggggtgcgttaagtaccctctggaaaaggagctcccgaacttttgggagcagaacaggcggtctctcatccagttcatgaaacaagtgcaccagggagtccgcggttttgttctggacgcaactgacgggcgaggcattctcaatgccactattagcgtggctgaaataaaccaccccgttactacctataaaactggcgactattggcgactcttggttcctgggacttataagataaccgcatcagcaaggggctacaatccggttaccaagaatgtcactgtaaagagcgaaggcgcaatccaggtcaactttaccctggtgagaagttcaacagactcaaataacgagtcaaagaaagggaagggcgcatctagcagcacaaacgacgcttcagatcccacaactaaggagttcgagactctgattaaagatttgtcggccgagaacggtttggagtccttaatgctgcgcagctcaagcaacctagcattggctctataccgataccattcctacaaggacttgtcagagtttctgagaggtttggtgatgaactaccctcacataaccaacctaaccaaccttggccagtccactgagtacaggcacatatggtcactggagatctctaacaaacccaatgtgtcagaacctgaggagcccaagatacggtttgtcgcaggaattcacggcaatgcgcctgtgggtacggagctcctgttggcactggccgaattcctgtgcctgaactacaagaagaacccagctgtcactcagctggttgaccggacccgtatcgttatcgtaccttccttgaatcctgacgggcgtgaaagagcgcaggaaaaggattgtaccagcaagatcgggcagacaaacgccagagggaaggacctggacaccgacttcacgaacaacgcatcccagcctgagacaaaggccatcatagagaacctgattcaaaagcaggattttagcttgtcagtcgccctggatggcggaagcatgctagtgacatatccctatgacaaacctgttcaaactgtagaaaataaggaaacattgaaacacttggcgagcctgtatgcaaacaatcacccatctatgcatatgggtcagccttcttgccccaataaaagcgacgagaatatccctggaggagtgatgaggggagcagaatggcactctcacctgggcagtatgaaggactattctgttacatacggccactgtccagagattactgtttatacatcatgttgctatttcccatctgctgctcggttgcccagcttgtgggctgataataaacgctcactgttaagtatgttggttgaagtccacaaaggggtccacggtttcgttaaggataagaccggtaagcccattagtaaggccgtcatcgtgctgaatgagggtataaaagtgcagaccaaggagggcggatacttccacgtgcttctggcaccaggcgtgcacaatataatcgccatcgcagacggctatcagcagcagcattctcaggtattcgtccatcacgatgccgctagctcagtggttattgtgttcgatacagacaacagaatattcgggctgccacgagagctggttgtgactgtcagcggggctaccatgtcagcccttattctcacagcctgcatcatctggtgcatctgtagtatcaagagcaacagacataaggatggtttccatcgactgagacagcatcacgacgagtacgaagacgaaatccgaatgatgtcgaccggtagcaaaaagtccctgctttcccacgagttccaggatgaaaccgacaccgaagaagagaccctctacagtagcaagcactag

SEQ ID NO: 217050 - DNA, 1149 bp, synthetic construct
  misc_feature 1..1149: note = Description of Artificial Sequence: Synthetic coding sequence
  source 1..1149: mol_type = other DNA
atgagaaggcggaggcggctgcagcaagaggacggcatcagcttcgaatatcaccgctatcctgaactcagagaggcccttgtttcagtctggctccagtgcactgcaatatcaaggatttatactgttggacgaagtttcgagggccgagaacttctggtgatagagctttcagacaaccccggagtgcatgagcctggggagccagagtttaagtatattggtaacatgcacgggaatgaagctgtgggccgtgagctccttattttcctggctcaatacctttgtaacgagtatcagaagggcaacgaaactatcgtgaacctgattcactccacgagaatccatataatgccttctctgaaccctgatggtttcgaaaaagctgcgagccagcccggagagcttaaagattggttcgtggggaggtccaacgcacagggaattgacctgaataggaactttccagatttagacagaattgtgtacgttaatgaaaaagaggggggacccaataatcacctgctgaagaatatgaagaagattgtggaccagaacacaaagctggcacctgagactaaagcggtgatccattggataatggacatccctttcgttctttcagccaatctgcacggcggtgatcttgtcgctaattacccttatgacgaaacaagatctggatctgcccacgaatactcctctagcccggatgatgcaatcttccagtcactggcacgggcttattcctccttcaacccggcaatgtcagacccaaaccgaccgccttgccgtaagaacgacgacgattcatctttcgtcgacggcaccacgaatggcggagcatggtacagcgtgcccggaggtatgcaagactttaactaccttagtagcaattgttttgagatcaccgtggagctttcatgcgagaaattccctccagaagaaaccctcaagacctattgggaggacaataagaatagcctgatatcgtacctggaacagattcataggggggtgaaagggttcgtccgcgacttacaaggaaatcctatcgccaatgcaacaatctctgtcgagggaatagatcacgacgtcaccagtgcgaaagatggggattactggcgcctattaacgtggaaactgtag

SEQ ID NO: 217051 - DNA, 1431 bp, synthetic construct
  misc_feature 1..1431: note = Description of Artificial Sequence: Synthetic coding sequence
  source 1..1431: mol_type = other DNA
atggcaggccgaggaggatccgctctgctggctttgtgtggcgctctcgcagcctgtgggtggctcctcggagctgaagcccaggagccaggagcgcctgccgctggaatgagacgtaggaggcggctacagcaggaggacggtatctccttcgaataccatagataccccgaactgagagaggctttagtgagtgtgtggcttcagtgtacagccattagccgaatctacaccgtgggcaggtctttcgaggggcgtgagctgttggtcatcgaacttagcgacaacccaggcgtgcacgaacctggggagccggaatttaagtacatcgggaatatgcatggcaacgaggccgtcggtagagaactgctgatcttcctcgcgcagtacctgtgcaatgaataccagaaggggaacgaaactatcgtgaacctcattcattccacacgtatccacattatgccgagcctcaatccagacggatttgaaaaagctgcgtcgcagcccggagagttgaaagattggttcgtcggcaggtccaacgctcagggtattgatctgaacaggaatttcccagatctcgatcgaatagtctacgtgaacgagaaggaaggtggaccaaacaatcaccttctgaaaaacatgaagaaaattgtggaccagaacactaaattggccccagagacaaaagccgtgatccattggatcatggacattcccttcgtgcttagcgctaatctgcatggaggagacttagttgccaattacccctacgatgagactcggtccgggtcggcgcatgagtatagttcttcaccagacgacgccatttttcaatctctggccagagcctatagcagtttcaaccctgcgatgagcgacccaaacagacccccatgtcggaagaatgatgacgatagctcttttgtggacggcaccactaatggcggagcatggtattcagtgcctggaggtatgcaggacttcaactatctctcttcgaactgtttcgaaatcactgtggaattgagttgtgaaaagttcccacccgaagagaccctcaagacctattgggaggacaataagaattctttgatttcctatttggagcagattcatcgcggagtcaagggcttcgtgagggatctgcaggggaaccctattgctaatgcgacaatcagtgtggagggtatcgaccacgatgtcacatccgccaaggatggtgattactggcgtctactcattcccggtaattataagcttacggcctctgcccctggatacctcgctattacgaagaaggtggccgtcccatactccccggctgccggagtcgactttgaacttgagtcattctctgaacgcaaggaggaggaaaaagaggagctcatggagtggtggaagatgatgtctgagacattgaacttctag

SEQ ID NO: 217052 - DNA, 1332 bp, synthetic construct
  misc_feature 1..1332: note = Description of Artificial Sequence: Synthetic coding sequence
  source 1..1332: mol_type = other DNA
atggatttcccttgtctctggctggggctgctgcttcccctggttgccgctcttgattttaattatcaccgccaggagggaatggaggccttcctcaagaccgttgcacagaactatagctcagtgacgcacctgcattccatagggaaatctgtgaaggggcgaaatctttgggtgttggtcgttgggagattccccaaggagcaccgaattggaattcctgagttcaaatatgtggctaatatgcatggggacgaaactgtgggtagagagctgttgttgcacctgatcgactacctggtgacaagtgacggtaaagatcccgaaattactaacttaataaatagcactagaatccacattatgccaagcatgaatcctgacggtttcgaggcagtaaaaaagcccgactgttattattctatagggagggagaactataatcagtatgatctcaaccgcaattttcctgatgcctttgagtacaataatgtctcccggcaacctgaaacagtggctgtgatgaaatggctaaagacggagacattcgtcctgtccgctaatctgcacggcggagcgctggtcgccagctaccctttcgataatggagtccaagccacaggcgctctgtactcccggagcttgacccccgatgacgacgtattccagtacctcgcccacacctacgcttcccgaaatccgaacatgaaaaaaggcgatgagtgcaaaaacaagatgaattttcccaatggcgtaactaacggctattcctggtatccacttcagggcggaatgcaggattataactatatctgggcccaatgttttgaaatcacactggagctgtcgtgttgtaagtaccccagagaagagaagctgccaagcttttggaacaacaacaaggccagtcttattgaatacattaaacaggtgcaccttggagtgaagggccaagtcttcgatcagaacggaaacccactccccaatgtcatcgtcgaagtccaagacagaaaacacatctgtccctataggacaaacaaatatggagaatactacctcctcctgctcccagggagttacatcataaacgttacggtacccggacatgatccccacatcactaaagtcattataccagaaaagtctcaaaacttctccgccctcaagaaagacatcctgctcccttttcagggacagttggattccatccccgtgagcaacccatcctgccctatgatccccctctatcggaacctgcctgatcatagcgccgctaccaaaccttctctgtttctgttcctcgtgtctctgcttcacattttcttcaaatag

SEQ ID NO: 217053 - DNA, 1332 bp, synthetic construct
  misc_feature 1..1332: note = Description of Artificial Sequence: Synthetic coding sequence
  source 1..1332: mol_type = other DNA
atggatttcccttgcctctggctaggtttactgttgcctcttgtcgccgctctcgacttcaattatcacaggcaggaggggatggaggctttcctgaagaccgttgctcagaattacagcagcgtaacacatctgcacagtataggcaagtccgttaagggtcgcaacctgtgggtgctggtggtgggccgtttccccaaggagcaccgcatcgggatcccagagttcaaatatgtcgcaaacatgcatggagatgaaactgtaggtagagagcttctcctccatctaatcgactatttggtcacctccgacggaaaggatcccgagataaccaatttaattaatagcaccaggatccatatcatgccaagcatgaatccggacggttttgaggctgtgaaaaagccggattgctactacagtataggtcgagaaaactataaccagtacgatctgaatagaaatttcccagacgcattcgagtataacaacgttagtaggcaaccagagaccgtggccgttatgaaatggttgaaaaccgaaacctttgtgctgtctgcaaacctgcacggtggagcattagtggcctcttaccctttcgataatggggtacaggccacaggggcactctattcacgatctctgacgcccgacgatgatgttttccagtacctcgctcacacttatgcctccaggaaccctaatatgaaaaaaggagatgagtgcaaaaataagatgaacttcccaaatggggtgacaaatggttatagctggtaccctctgcagggagggatgcaggactacaattatatttgggcgcagtgcttcgagattacgctggagctgtcctgttgtaagtatccgagagaggaaaaactgccatccttttggaataacaacaaggcctctctcatagaatatatcaaacaggttcaccttggcgttaagggtcaagtgttcgatcagaatggaaaccccctgcccaatgtgattgtggaggtgcaggaccggaagcacatatgcccttaccggacgaataaatatggcgagtattacctgctcttacttcccggtagttacatcataaacgtgaccgtgcctggacacgatccccatataactaaggtgattatcccagaaaagagtcagaatttcagcgcactcaaaaaggatatcctcctgcccttccagggacagctggattcgatccccgtctctaacccctcttgtcccatgattccgctgtatcgcaatctgcctgaccattccgctgcaacaaagccttctctctttctgtttttggtgtcccttctccatatatttttcaaatag

SEQ ID NO: 217054 - DNA, 1332 bp, synthetic construct
  misc_feature 1..1332: note = Description of Artificial Sequence: Synthetic coding sequence
  source 1..1332: mol_type = other DNA
atggacttcccctgtctatggctcggactgctacttccgctggtcgctgcattggactttaattatcaccgccaggaggggatggaagctttcctgaaaacagtggctcagaattactccagcgtgacgcacctgcattcaattggcaagtccgttaagggacggaacctgtgggtactcgtggtgggcagattcccaaaggagcaccgcatcggtatacctgaatttaagtacgtagcaaatatgcatggcgatgagacagtagggagagaactgttgctgcatctgatcgactatctcgtgacctccgatggaaaggaccccgagattacaaacctaatcaactccactcggatccatatcatgcccagcatgaaccctgacggcttcgaagctgtcaagaaaccagactgctattacagcataggaagagaaaactacaatcagtatgaccttaacaggaacttccccgatgcatttgaatacaacaacgtatctagacagcctgaaaccgtcgccgtcatgaagtggctgaagacagagacttttgtgcttagcgccaatttacacggcggagccttagtcgcttcctatcccttcgacaacggcgtccaggcaaccggagcgctttactcccgcagtctgacaccggacgatgacgttttccagtacctggcccatacatatgcgtcgcgtaacccaaacatgaagaaaggcgatgagtgcaaaaataaaatgaattttccaaacggtgttaccaatggttatagttggtatcccctgcagggaggtatgcaggattacaattacatttgggcccagtgctttgaaatcacattggagctgtcatgttgtaaataccctagggaagaaaaactccctagtttttggaacaacaataaagcatccttaattgagtatatcaagcaggtacacctcggtgtgaagggacaggtgtttgatcaaaacggcaacccgctacccaacgtgatcgtcgaggtccaagacagaaagcacatctgcccgtatcggactaataagtatggggagtattatctgctgctgctcccaggtagttacatcattaacgtcacggtaccaggtcatgacccccatataaccaaggtaattatccccgaaaagagccagaatttcagcgccctcaaaaaagatatcttgcttccttttcagggccaactagatagcatccctgttagtaatccatcatgcccaatgatccccctgtatcgaaaccttcccgatcactcagcagccaccaaaccgtcactgtttctgttcctggtgtccctgctacacatcttctttaaatag

SEQ ID NO: 217055 - DNA, 411 bp, synthetic construct
  misc_feature 1..411: note = Description of Artificial Sequence: Synthetic coding sequence
  source 1..411: mol_type = other DNA
atggactttccttgtctctggctgggcctcttgcttcccctcgtggccgcactggactttaattaccaccggcaggaggggatggaagccttcctgaaaactgtggctcagaactacagcagcgtgacccacctgcattctataggaaagtcagtgaagggcagaaacctatgggttctggtggtcgggaggtttccaaaggagcacaggattggtatccccgaatttaagtacgtcgcgaacatgcatggcgacgagaccgttggcagagagcttcttctacatctgatcgactacctagtgacgtctgatgggaaagatccagagataaccaatctgataaacagcacccgcatccatattatgccctccatgaaccccgatggattcgaagccgtcaagaaaccctag

SEQ ID NO: 217056 - DNA, 750 bp, synthetic construct
  misc_feature 1..750: note = Description of Artificial Sequence: Synthetic coding sequence
  source 1..750: mol_type = other DNA
atggacttcccttgcttatggctgggcttactgctgcccctcgtggcggctctggactttaactaccatcggcaagaaggtatggaagctttcctgaaaacggttgctcagaattatagcagcgttactcacttacactctatcgggaaatctgtgaagggcaggaatctgtgggtgctagtggtgggcagattccccaaggagcaccgaatcggaattcccgagttcaagtacgtggcaaacatgcatggggatgagacagtgggcagagagctgcttttgcacctgatagattacctggtaaccagcgacggaaaagacccagagatcaccaacctcatcaacagcacaaggattcacatcatgccgagtatgaaccctgacggctttgaagctgtgaagaagcccgactgttattactctattggccgagaaaattacaaccaatacgatctcaacagaaacttccccgatgctttcgagtataacaacgtgtccaggcaaccagagacggtagccgttatgaaatggctcaaaacggagacgttcgttctttccgcaaatctccacgggggtgcactcgtggccagttacccatttgacaatggtgtacaagctactggagccctgtattccaggagtctgacaccagatgacgacgtattccaatacctagcacatacatacgcttccagaaaccctaatatgaagaagggggatgagtgtaaaaataaaatgaactttccctag

SEQ ID NO: 217057 - DNA, 1332 bp, synthetic construct
  misc_feature 1..1332: note = Description of Artificial Sequence: Synthetic coding sequence
  source 1..1332: mol_type = other DNA
atggacttcccatgtctgtggttagggttgctgctgcctctcgtcgctgctctggacttcaactaccataggcaggaagggatggaggcttttctcaaaacagtcgcccaaaactattcaagcgttactcacctccatagcatcggaaagtccgttaaaggacggaatctgtgggtacttgttgtcggaaggttcccaaaggagcatcgcatcggcatccccgagtttaagtatgtcgctaatatgcacggtgacgagaccgtcgggagagagttgctgctgcatctcatcgattatctggtgacgtcggatgggaaagacccagaaatcaccaacctgattaatagcacccgaatccacattatgcccagcatgaacccggacggtttcgaggcagtgaaaaagcccgattgctactattccatcggaagggaaaattacaatcaatacgacttaaaccgtaattttccagacgcctttgaatataacaacgtgtcaaggcagcccgaaacggtggcggtcatgaagtggctcaagactgagacctttgtcctcagcgcaaatctgcacggcggagcccttgttgcctcctacccattcgacaatggggtccaggccactggagccctttattctcgatctctaacacccgacgacgatgtcttccaatatctcgctcatacatatgccagtcgaaacccaaacatgaagaaaggtgatgagtgcaagaataaaatgaactttcccaacggagtgacaaatggctacagctggtaccccctccagggtggcatgcaggattacaattatatctgggcccagtgtttcgaaatcaccttagaactcagctgctgtaagtaccccagggaagaaaaactgccctcgttttggaacaataacaaggccagcctcatagaatacatcaaacaggtacacctgggtgttaagggacaggtgttcgaccaaaatggcaacccactgccaaatgtgatcgttgaggtacaggaccgtaaacatatttgcccttaccgaaccaataaatatggcgagtattatctactgcttcttcctggtagctatattatcaacgtaactgtgcccggtcacgacccacatataaccaaagtgattattcctgagaagagtcagaacttctcagccctgaagaaagatatcctcttgcccttccaggggcagctagattctattcccgtaagcaaccctagctgcccaatgatccctctgtataggaacctaccggaccactccgccgcaacgaagccctcgctgttcctctttcttgtctcactgctgcacattttctttaagtag

SEQ ID NO: 217058 - DNA, 1377 bp, synthetic construct
  misc_feature 1..1377: note = Description of Artificial Sequence: Synthetic coding sequence
  source 1..1377: mol_type = other DNA
atgagtgatttattgagtgtgtttttacatcttctgttgctctttaagttggttgctcccgtgacctttagacaccatcgatacgacgacctagtgcgtacactctataaggttcaaaatgagtgtccaggaatcacccgcgtctattccattggaaggagcgtcgaaggtaggcatttgtatgttctcgaattctccgatcaccctggcattcatgaacccctggagcctgaggtcaaatatgtgggcaacatgcacggaaacgaggccctcggtagagaactgatgctccagctgagcgagttcctctgcgaagaattccgaaacagaaatcagcggatcgtgcaactgatacaggatacacggatccatattttgccgagtatgaatcccgacggctatgaggtggccgctgcgcagggcccaaacaagcccggttacttggttggcagaaataacgccaacggcgttgacctgaacaggaactttcccgatctcaatacctacatttattacaacgagaagtacggaggtcccaaccaccacctaccccttcccgacaactggaagtcccaagtcgagcctgaaaccagggctgttatccgatggatgcactcattcaatttcgttctgtccgctaatctgcatggtggagctgtagtcgctaactatccctacgataaaagcttcgagcatagagtgaggggtgtcagacgcacagccagtacacccaccccagacgacaaactattccagaagttggccaaagtgtactcatacgcccatgggtggatgttccaggggtggaactgtggagattatttcccagacggaatcaccaatggggcttcctggtattccctgtccaaaggcatgcaggacttcaactacctccatactaattgttttgagatcacactcgagctttcctgtgacaagttcccgcctgaggaagagctgcagagagagtggcttggcaacagggaagcactgatccagttcctggagcaggtgcaccaggggataaaaggtatggtgctggacgagaattataacaatctggcaaacgctgtaatttcagtttccggcatcaatcatgacgtgaccagtggcgaccatggcgattatttcagattgcttctgcctggtatctataccgtgtcagccaccgccccaggctacgacccggagacagtgacagtcacagttggccctgcagagcccacactcgtcaacttccacctaaagaggtctattccacaagtgtctcctgtgcgcagggctccctcacggagacacggtgttcgcgctaaagttcagccacaagctcggaagaaggagatggagatgcgtcagctacagcggggaccagcatag

SEQ ID NO: 217059 - DNA, 615 bp, synthetic construct
  misc_feature 1..615: note = Description of Artificial Sequence: Synthetic coding sequence
  source 1..615: mol_type = other DNA
atgcactcattcaacttcgtgttgtcagccaatttacacggaggtgcagtcgtagccaactacccatatgataaaagttttgagcaccgagttcgcggtgttcgcagaactgcatcaacacctactcccgacgataagttattccagaaattagccaaagtgtacagctacgctcacggatggatgtttcaagggtggaattgcggggactatttccccgacggaatcacgaatggggcttcctggtactccctgtcaaaaggaatgcaggattttaactacctccacacaaattgttttgaaataacactggaattatcctgtgacaagtttccgccagaggaggagctacagcgagagtggttgggcaatagggaggcgctaatccagtttttggagcaggtacaccaaggcattaaaggtatggtgctggacgagaattataacaatctcgccaatgcggtaatctctgtgtcaggaataaatcatgacgtcactagtggcgaccacggagactatttccgcctacttctgccaggaatatatacggtgtcagccacagccccaggttatgatcccgagacggtgaccgttactgttggtccagctgagtag

SEQ ID NO: 217060 - DNA, 1638 bp, synthetic construct
  misc_feature 1..1638: note = Description of Artificial Sequence: Synthetic coding sequence
  source 1..1638: mol_type = other DNA
atgctccccggagcatggctgctctggacgtctctgctgctgctggcgaggcccgcacagccgtgtccaatgggctgcgattgcttcgtgcaggaagtcttttgttctgacgaggaattggctaccgtgccacttgacatcccaccctacacaaaaaatatcattttcgtagaaacatcctttacgacgctagagacgagagccttcgggtccaaccccaatctgacgaaagtggtattcctgaacacacaattgtgccagtttcgtccggacgcgtttggcggtctgcctaggttggaggatctggaggttaccggctcaagttttctgaacctttccaccaacattttcagtaaccttactagcctagggaaactgaccttgaactttaatatgctggaggccttacctgagggcctgttccagcatctcgccgcactggagtcccttcatctgcaggggaaccagctccaggctcttccgagaaggctgtttcagcccctgacacaccttaaaaccctcaacctggcacaaaatctgctcgcccagctgcctgaggaattgttccaccccctgacaagccttcagacactcaaactctctaataatgctctgtcaggactgccacagggagtttttggaaaactaggtagcttgcaggagctctttctggatagtaataacatcagcgagttaccgccacaggtcttcagtcagctcttttgtctggagagactttggctacagcgaaatgctattactcatcttcccttgtcaattttcgcctccctcggcaatcttaccttcctgtccctgcaatggaatatgctcagggtacttccggcaggactgtttgctcacaccccttgccttgtgggattgtctcttacgcataatcaactggaaacagtggcagaagggacattcgcccatctaagtaacctgcggagtttaatgctgtcctataatgcaattacccatcttcccgctgggatattccgggatctagaggagctggtgaaactctacctgggtagcaataacctaacagctctccatcctgccctgtttcagaacctttcgaaactcgaactgttaagcctcagcaagaatcagttaacaactctgcctgagggcatcttcgatacaaattataatctcttcaacctggcacttcatggcaacccgtggcagtgcgactgtcacctcgcgtacctattcaattggcttcaacagtacacagatagactgctgaacatccagacatattgcgctggaccagcttacctgaaaggtcaggtggtgcccgcactaaatgaaaagcagctggtctgtcctgttacgagggaccatctgggttttcaggtgacgtggcccgacgaatcaaaagctggcggttcatgggaccttgcggtccaagagagggccgctcggtcacagtgtacctatagcaacccagaggggacagttgtgttagcctgcgatcaggcccagtgccggtggttaaatgtccaattaagccctcagcagggctcactgggactgcagtacaacgcctcccaagagtgggacctcagatcctcttgtggatccttgcgactgactgtaagcattgaagccagagccgcaggaccttag

SEQ ID NO: 217061 - DNA, 1638 bp, synthetic construct
  misc_feature 1..1638: note = Description of Artificial Sequence: Synthetic coding sequence
  source 1..1638: mol_type = other DNA
atgcttcccggagcatggttattgtggacctccctgcttctcctggccaggccagctcagccatgtccaatgggttgcgattgctttgtgcaggaagtcttttgttccgatgaagagcttgccacagtacccctggacatccctccgtacactaagaatatcatattcgtggaaacgtcctttaccacccttgaaacacgggcattcggctcaaaccctaacctgacaaaggtggttttcctgaacactcagttatgtcagtttaggcctgacgccttcggcggtctgcctcgcctcgaagatctcgaggttacgggatcaagctttcttaatctgagcacgaacatcttttctaatctgacatccctgggtaagctaaccctgaatttcaatatgctggaggctcttcccgagggactgttccaacatctggccgctctcgaatcactacacctgcaaggcaaccagttgcaggctctaccacgtcggttgttccagcctctcacccacttgaagactctgaatctggctcagaacctgctggcacaactgcccgaggaattgttccaccctctcacgtctctgcagactctgaagctgtccaacaatgcattaagcggtctaccccagggtgtctttggcaagctgggcagcctgcaagaactgtttcttgactcaaacaatatttcagaacttcctccacaggtcttttcccagctgttctgcctggaacggctgtggcttcagaggaacgctattacccacctgccgctgtccatcttcgcttcactgggcaatctgacctttctgagcctccagtggaatatgctacgcgttctcccagccggactgtttgcacataccccgtgtctggttggccttagcttaacacataaccagctggagactgtggctgagggcacatttgctcatctgtccaacctgcgatctttgatgctctcgtacaacgccatcactcacctgccggctggcatatttcgggacctggaagaacttgtgaagctctatctcggctcaaacaacctgaccgccttgcaccccgcactctttcagaacctgtctaaactcgagctgcttagcctgagtaaaaatcagttgaccaccctgcctgagggcatctttgacaccaattacaatctgttcaacctggctctccatggcaatccctggcagtgtgattgccacctggcatacctgttcaactggctgcaacaatatacagatcgtttactgaacatccagacatactgcgctggccctgcctacctcaagggacaagtagtgccagcactgaacgaaaagcaattagtgtgtcctgtgactcgcgaccatcttggttttcaggtcacatggcccgacgaatccaaagcaggtggaagctgggacctagcagtgcaggaaagagccgctcgctctcagtgtacctatagtaatcccgaagggaccgtggttctggcgtgtgatcaggcccagtgcaggtggctgaacgtccaactctccccccaacagggtagcttaggactgcagtataacgcaagccaagagtgggaccttagaagctcctgtgggagtctgcgtttgacagtctccatcgaggcgagagccgctggaccttag

SEQ ID NO: 217062 - DNA, 1431 bp, synthetic construct
  misc_feature 1..1431: note = Description of Artificial Sequence: Synthetic coding sequence
  source 1..1431: mol_type = other DNA
atggtaggcgctatgtggaaagtgatcgtgagtctggtcctcctgatgccaggcccatgtgacggcttatttagatctctttatcggtctgttagcatgcccccaaagggagattctggccagcctctgttcctgaccccttacattgaggccggtaagatccagaagggccgtgaactcagtttggtgggaccctttcccggtctgaacatgaagagctacgcgggatttctgaccgtgaataagacttacaatagcaatctgtttttctggttttttcccgcacagattcagccagaggacgctcccgtggtcctctggctacaagggggaccaggcggatctagtatgttcggccttttcgttgagcacggaccgtacgtcgtgaccagcaacatgacactccgggaccgagactttccttggaccactacgctctccatgctgtacattgacaaccctgttggcacgggcttttcatttactgacgacacccacggctacgctgtaaacgaggatgacgtagccagagacctgtactctgctttgatccagttctttcaaatctttcctgagtataagaataatgatttttatgtaaccggcgaatcctatgcgggtaaatacgtgcccgcaatcgcacatctaatccactccctgaatcctgtacgcgaggtgaagatcaacctgaacggaatcgcaattggggacggatacagtgatcccgagtccattataggcggttacgccgagttcttgtaccagatcggcctgctcgacgaaaagcagaagaaatactttcagaagcagtgccacgaatgcatcgagcacattcgaaagcaaaattggtttgaggccttcgaaatcctggataagttgctggacggtgacttaactagtgacccaagctattttcagaacgtgactggttgctccaactactataacttcttgcggtgcacggagcccgaggatcagctgtattacgtcaaatttcttagtcttcctgaagtgagacaggcaattcatgttggaaaccaaacgttcaatgacggaactattgtcgagaaatacttaagagaggataccgtgcaaagcgtgaaaccttggcttacagaaataatgaacaattacaaagttcttatttacaacggacagctggacatcatcgtggccgcagctctgacagagcgcagcctgatggggatggactggaaggggagtcaggagtataagaaggctgagaaaaaagtctggaaaatctttaagtccgatagtgaggtcgcgggttatatcagacaagcaggggattttcatcaggtgatcattcgtggaggtggtcacatcctcccctacgatcaaccgttacgagcgttcgacatgatcaacagattcatttacggcaagggctgggatccttacgtggggtag

SEQ ID NO: 217063 - DNA, 1431 bp, synthetic construct
  misc_feature 1..1431: note = Description of Artificial Sequence: Synthetic coding sequence
  source 1..1431: mol_type = other DNA
atggttggagccatgtggaaagtcatcgtgtctttggtgctgctgatgccagggccatgtgatggacttttcaggtcactctatcggagcgtctccatgccacctaagggtgattcggggcagcctttgttcctaactccatacatcgaggctgggaagatccagaaagggagggagctctctttagtggggccttttccaggactgaatatgaaatcatatgccggattcttgaccgtgaacaaaacttataattccaatctatttttttggttcttcccggcacagatacaacctgaagacgcacctgtcgttttgtggctgcagggcggtccaggaggctcttctatgttcggtctctttgtggagcacgggccatacgtcgtcactagcaacatgacgcttagagaccgcgatttcccatggactactactttgtctatgctgtacattgataatcccgtgggcactggtttcagttttacagatgacactcacggctatgcggtcaacgaagacgatgtcgcgagagacctatactcagccttaatccagttctttcagatcttccccgagtataagaacaacgatttctatgtgaccggcgaaagttacgccggaaagtacgtacccgctatcgcccatctaatccactccctgaacccagtgcgggaggtgaaaatcaaccttaatggaatcgctataggagatggttattcagaccccgagagcattataggcggatatgccgaatttctttatcagatcggactccttgatgagaagcaaaaaaagtacttccagaagcagtgtcacgaatgcatagaacacattaggaagcagaattggtttgaggccttcgagattctggacaagttattggatggggacctgacttctgacccgtcctactttcagaacgtaactggctgctccaactactacaattttctgaggtgtaccgaaccggaggatcagctgtattatgttaagtttctttcgctccccgaagtgagacaggccatccacgtggggaaccagacttttaacgacggcaccattgtcgagaagtatcttagagaggacacagtacagagtgtgaaaccttggctgaccgaaatcatgaacaactataaggttctgatatacaacggacaactagatatcattgttgccgctgcactgaccgagcgcagcctgatgggcatggattggaagggatcgcaggagtacaaaaaagccgaaaagaaggtatggaagatttttaagtccgacagtgaggttgcagggtacatccgccaggccggagatttccaccaggttatcatccggggtggcggtcacattctcccgtacgatcagcctctgcgcgcttttgatatgattaacaggttcatctatggaaaaggctgggatccgtacgtgggatag

SEQ ID NO: 217064 - DNA, 1431 bp, synthetic construct
  misc_feature 1..1431: note = Description of Artificial Sequence: Synthetic coding sequence
  source 1..1431: mol_type = other DNA
atggtaggcgctatgtggaaggtcatagtgtctctcgttctgctgatgccgggaccatgcgatggactatttcggtctctgtataggtcagtgtcgatgccaccaaagggcgactctgggcagcccctgtttctaacaccatatattgaagcagggaagatacagaaaggacgagaactcagcctcgtcggaccgtttccgggtctgaacatgaaatcttatgccggatttctgacagttaataaaacctataatagcaatctctttttctggttcttcccggctcaaatccagcctgaggacgctcccgtggtcctttggttgcaaggaggccctggcggaagtagcatgtttggactcttcgttgagcacggaccgtacgtggtcactagcaacatgacccttagggacagggatttcccatggacaaccaccctctccatgctctatattgacaaccctgttgggaccggcttttcatttaccgacgatacccatggctacgcggtgaacgaagatgacgtggccagggacttgtacagcgcccttatccagttctttcagatcttccccgaatacaaaaacaatgacttttacgttacaggggaaagttatgccggaaagtacgttcctgccattgcacacctcatccactctcttaacccagttcgtgaggtgaaaattaacctaaatggaatcgcgataggggacgggtactcagatcctgagagtatcatcgggggatacgctgagttcctgtaccaaatcggtctgctggatgagaaacaaaagaagtattttcagaaacaatgtcatgagtgcattgaacatatccgcaaacagaattggttcgaggcctttgaaatcctagataaactactcgatggggacctgaccagtgatcccagttacttccaaaatgtgaccggatgcagtaactactataatttccttcggtgtacagaacctgaagaccagttgtattacgtgaagttcctgtcgttacccgaggtgaggcaggccattcacgtgggcaaccaaacatttaatgacgggactatagtagagaagtaccttcgtgaagacaccgttcagtccgtaaaaccgtggctgacagaaatcatgaataactataaggtgctgatctacaatggccagctcgacataatcgtggcagccgcactcacggagagatcactgatgggaatggattggaaagggagtcaggaatacaaaaaggccgagaagaaggtgtggaaaatatttaaaagcgattcagaagttgctggctatattcggcaagccggagactttcatcaggttataatccgaggaggtggacacatcctgccttatgatcagccactgcgggcattcgacatgatcaaccgctttatatacggcaagggttgggacccgtacgtcgggtag

SEQ ID NO: 217065 - DNA, 21 bp, synthetic construct
  misc_feature 1..21: note = Description of Artificial Sequence: Synthetic coding sequence
  source 1..21: mol_type = other DNA
atggtcggtgccatgtggtag

SEQ ID NO: 217066 - DNA, 159 bp, synthetic construct
  misc_feature 1..159: note = Description of Artificial Sequence: Synthetic coding sequence
  source 1..159: mol_type = other DNA
atggttggcgctatgtggaaagtgattgtatcccttgtactgcttatgcctggcccatgcgatggcctctttaggtcactgtaccgctcagtcagcatgcccccaaaaggggattcaggtcaacctctgtttcttactccctatatcgaagctggatag

SEQ ID NO: 217067 - DNA, 132 bp, synthetic construct
  misc_feature 1..132: note = Description of Artificial Sequence: Synthetic coding sequence
  source 1..132: mol_type = other DNA
atggtgggcgcaatgtggaaggtgatagtcagcctggtgttgctgatgcccggaccatgcgatggattgttcagatccctgtacaggtctgtgagcatgccacccaaaggcgattctggtcagccgctgtag

SEQ ID NO: 217068 - DNA, 699 bp, synthetic construct
  misc_feature 1..699: note = Description of Artificial Sequence: Synthetic coding sequence
  source 1..699: mol_type = other DNA
atgttcggtctcttcgttgaacacggaccgtacgtcgtaacttcaaacatgacactcagagaccgggacttcccctggacaacaaccttgtccatgctatatatcgacaacccagtcggcacaggcttttcgttcacagatgatacccatggttatgccgtgaacgaggacgatgtagccagagatctgtattccgcgttgatccagtttttccagatcttccctgagtacaaaaataacgatttttacgtcacaggggagagctatgcgggaaaatatgtgcccgctattgctcaccttattcattctcttaatccagttcgggaagtgaagatcaatcttaatggtatagccataggcgacggctatagcgaccccgagagtataattgggggttacgcagaatttctgtaccagattgggctcctcgatgagaaacagaaaaaatactttcagaaacagtgtcacgaatgcatcgagcacattcgtaagcaaaactggttcgaggcgttcgaaatcctagacaagctgcttgacggggacctgacaagcgacccgtcgtatttccaaaacgtgaccggctgctcaaactactacaattttttaagatgcaccgaaccggaagatcagctctactatgtgaagttcctaagtctgcccgaggtgcgacaggctccgagaggtgaatctgatttctag

SEQ ID NO: 217069 - DNA, 1581 bp, synthetic construct
  misc_feature 1..1581: note = Description of Artificial Sequence: Synthetic coding sequence
  source 1..1581: mol_type = other DNA
atggggcacctctccgcccctctccaccgcgtgagagtgccctggcagggactactcctgactgctagtctactgaccttttggaatcccccaaccacggcccagctcaccactgagtcaatgccattcaatgtggctgaagggaaggaggtcctattactggtccacaacttaccccagcaactgtttggatactcctggtacaaaggagagcgcgtggacggcaatcgacaaatagtggggtacgccataggtacccagcaagccacgccagggcctgccaactctggacgcgagacaatctaccccaacgcttctctgcttatccagaatgtcacccagaacgacactggattttatacactgcaagtaattaagagcgacctggtgaatgaagaggctacaggccagttccacgtgtatcccgagcttcccaagccctcaatctccagcaacaactctaatccggtcgaggacaaggacgccgtggcgtttacatgtgaacccgagacccaggatacgacttatctgtggtggattaacaatcagtctttgcccgtatccccaagactgcagctgagcaatggcaaccgtacactgacactgttgagcgtgacgcggaacgacacaggtccgtatgaatgcgaaatccagaatcccgtttctgcgaataggtctgaccccgtgaccttaaacgttacatacggcccagatacacctactatcagcccttccgatacatattatagacccggtgccaatctgagcctatcatgctacgctgcttctaatccccctgcccagtacagttggctgatcaatggcactttccaacagtccacacaggaattgtttatcccaaacataaccgtgaacaactccggatcttacacatgccacgccaacaatagcgtgaccggctgcaacaggaccaccgttaaaactattatcgttaccgaattgagccccgtggtggcaaagccacagattaaagcgagtaaaacaacagtgaccggggacaaggatagcgttaatttaacctgttccacgaatgatacaggaatttccatccgatggttttttaagaatcagtcgctaccctcctcggaacggatgaagctttcccaagggaacactactctgtctattaaccccgtaaagcgggaggacgctggaacttattggtgcgaagtcttcaaccctatatctaaaaaccaatctgacccgattatgctgaatgttaattacaacgccctgcctcaagagaacggactgtcaccaggcgcaatcgcgggaattgtgataggtgttgtagccctagtcgctcttatcgctgtggcactcgcttgcttcctgcactttggcaagacaggaagagcgagcgaccagagagatctcactgaacataagccttctgtctccaaccacacccaggaccactcaaatgacccacccaacaaaatgaacgaagtaacctacagtacattaaattttgaagctcagcagccgacacagccaacaagcgcatcccctagtctgacagctactgaaattatttactctgaggttaagaagcaatag

SEQ ID NO: 217070 - DNA, 1080 bp, synthetic construct
  misc_feature 1..1080: note = Description of Artificial Sequence: Synthetic coding sequence
  source 1..1080: mol_type = other DNA
atgccttttaacgtggctgaaggaaaagaggtcctgctgctggtgcacaatttgcctcagcagctcttcggatactcgtggtacaaaggcgagcgcgtggacggcaatcgccagatcgtaggatacgcaatcgggacgcaacaggccactccaggccctgccaattccggtcgcgaaaccatctatcctaacgcatccctcctgattcagaatgttactcaaaacgacaccggcttttacactctgcaggtcatcaagtcagacctggtgaatgaggaagcgactggacaatttcatgtgtatccagagttgcccaagcccagcatctcttcaaataatagcaaccccgtggaggataaagatgccgtagctttcacctgcgagccagaaacacaggacaccacctacttgtggtggattaacaaccagtccctgcccgtgtccccacggttgcagctgtctaatgggaataggacgctgactctgctaagtgtcactagaaacgataccgggccttacgagtgcgaaattcagaatccagtgtcagccaataggagcgatcccgtgacgttgaatgtcacctacgggcctgatactcctactatctctcctagcgacacatactaccggccaggggcaaacctgagcctgtcctgttatgccgcttccaaccccccagcccagtacagctggttgatcaacggcacatttcaacaaagcacccaagaactcttcataccgaacatcaccgtcaataacagcggctcttacacatgtcacgctaacaattcagtaacaggttgtaacagaacaaccgtgaaaacaattatcgtcacagagatggccttccaccacgttgctaaggccggactgaagctcctgtcgtccagcaacccccctgcctccacaagccagtccgcaaaaatcacggataacgctctgccccaagagaatggactatcccctggcgctatagctggcatagtgattggggtggtggccctggtcgcattgatagccgtggcattggcctgctttcttcactttggcaagactgggagctccggaccactccaatag

SEQ ID NO: 217071 - DNA, 1056 bp, synthetic construct
  misc_feature 1..1056: note = Description of Artificial Sequence: Synthetic coding sequence
  source 1..1056: mol_type = other DNA
atgggccacttgtctgcgccactgcacagggttagggtcccttggcagggtctcctactcaccgctagccttttaaccttttggaacccacctactaccgcgcagctgacgacagagtctatgccatttaatgtcgctgagggcaaggaggtgctcctactcgtacataatctgccccagcagcttttcggctactcctggtataagggggaaagagttgatggcaatcggcagatcgtcggttatgctattggtacccagcaggcaacccctgggcctgccaatagtggtcgcgaaaccatttaccctaatgcaagcctgctaatccagaatgtgacccagaacgataccggattctacactttacaggtcatcaagagtgatctggtgaacgaagaagctacaggccaattccacgtctaccctgagctgcccaaaccaagtatctcctctaataacagcaacccggtggaggacaaggacgcagtggccttcacatgtgaacctgaaacacaagacaccacatacctgtggtggataaataaccagagcttgcccgtgagcccgcgacttcagctgagcaacggcaacaggactctaacacttctgagcgtcactcgcaatgatacagggccttatgagtgcgaaattcagaatcccgtgtccgcaaacagatctgatcccgtgacgctcaacgtcacgtacgggcctgacactccaacgataagcccaagcgacacatattaccggcctggcgctaacttgtcactgtcctgttatgcggcttcgaatcctcccgctcagtactcgtggttgataaatgggaccttccaacaatctacccaggagctcttcatccccaacatcactgtgaataactctggctcatacacttgccatgcaaataatagcgtaactggctgtaatcgcactaccgttaaaaccattatcgtcaccgagagtccagtgctaggcgaggatgaggccgttcccggacagcaccacccccaacacaagccttgccaagagggagggtgctgggatgttttggtttag

SEQ ID NO: 217072 - DNA, 759 bp, synthetic construct
  misc_feature 1..759: note = Description of Artificial Sequence: Synthetic coding sequence
  source 1..759: mol_type = other DNA
atggggcacctctctgctccactccatagagtgcgcgtgccatggcagggcctgcttttaactgcatccctgctgaccttttggaacccacccacaacagcccaactgacaactgagagtatgcctttcaacgtcgccgagggaaaagaggtgttactattagtgcacaatttgcctcagcagctattcggctacagctggtataagggggagagggtggatggaaatcggcagatcgtaggctacgccatcggtactcagcaggccactcctgggcctgcgaattcaggtagggaaactatctaccctaacgcctcactcctcatccaaaacgtgacacaaaatgacacaggcttttacactctgcaggtaattaaaagcgatctcgtcaacgaggaagccaccggacagttccacgtgtatcacaacgcactccctcaggaaaatggcttgagcccgggtgccatcgcaggaatagtgatcggagtggttgccctggtggcactcatagcagtcgctttagcctgtttccttcatttcgggaagaccgggagagcctctgaccaacgagatctgacagagcacaagccatcagtgtctaatcacacgcaggaccacagcaatgatccacccaacaagatgaatgaagttacctactccacccttaacttcgaagcccaacagccaacgcaaccaacttcagcctcacctagtttgacagccaccgagatcatctattctgaggttaagaagcaatag

SEQ ID NO: 217073 - DNA, 1293 bp, synthetic construct
  misc_feature 1..1293: note = Description of Artificial Sequence: Synthetic coding sequence
  source 1..1293: mol_type = other DNA
atgggccatctttccgccccacttcaccgcgttagagtaccctggcaggggctcctcctcaccgcatcccttcttactttttggaatccccctaccaccgcacagttgacaacagagtcaatgccatttaatgtggctgaaggtaaagaagtgctgctcctcgtccataatctgccacagcagctgttcggctactcctggtacaagggggaaagggtggacggcaatcggcagatcgttgggtatgccatagggacacagcaggccactccgggacctgctaattccgggcgagagaccatctaccctaacgccagtcttctgattcagaatgtaactcagaatgataccggtttttacactttacaggtcatcaaaagtgatctcgtcaatgaggaagcaaccggacagttccatgtgtatcctgagttaccaaagcccagcatcagcagcaacaatagtaaccctgtcgaggataaggatgctgtcgcattcacctgtgagcccgaaacacaggacactacctatctttggtggatcaataaccagtctttgcctgtttccccaaggctgcagttgagcaacggaaacaggacattgaccctcctgagcgtgaccaggaacgacaccggcccatatgagtgcgaaattcagaatccagttagtgctaacaggagcgaccctgtcaccttgaacgttacttatggccctgatacgcctacaatctccccatccgatacgtattacagacccggtgccaacctgtccctttcctgttacgcagctagcaatccgcctgcccaatattcctggcttattaatggaaccttccagcagtccacacaggagctttttatccccaatatcaccgtgaataattcaggtagttacacttgccatgcaaataattcagtgaccggctgcaatcggaccaccgtcaaaacaatcatcgtgacggataacgcgcttccacaggagaatggactatcccccggagcaattgccggtatcgtgataggcgtagtggccttggtagcgcttatcgctgttgctctggcttgctttctgcactttggtaagacgggcagggcatcagaccagagagatcttacggaacacaagccctcagtatccaaccatacacaggaccactccaacgaccctcccaacaaaatgaatgaagtcacatatagcaccctgaactttgaggctcagcaacccacccagccaaccagtgcctccccctccttgaccgccactgagatcatctactccgaagtgaaaaagcagtag

SEQ ID NO: 217074 - DNA, 1386 bp, synthetic construct
  misc_feature 1..1386: note = Description of Artificial Sequence: Synthetic coding sequence
  source 1..1386: mol_type = other DNA
atggggcacctttctgccccacttcacagagtgagagtcccgtggcagggcctgctacttacagcctccttacttactttctggaatccgccaacaactgcacagctcaccactgaatctatgccttttaacgtggccgagggaaaagaagtgctgttattggtccataacttaccgcagcagctgttcggctattcctggtataaaggtgaaagggtcgatggcaacagacagattgttggctacgcaataggcactcaacaggcaacccctggtcctgcaaattcagggagagaaactatatatcctaacgcctcgctgcttatccagaatgtgacccagaacgacacaggcttctacaccctacaggttatcaagagcgacctggtgaatgaagaggccacgggtcagttccacgtctacccggaattacctaagccctcaatcagtagtaacaattccaaccctgtggaagataaagacgccgtggcctttacgtgtgagccagaaacgcaggacaccacttatttgtggtggattaacaaccaaagccttccagtaagccctagactgcagcttagtaacggcaacagaacgctgaccctattaagcgtgactaggaatgacacaggcccatacgagtgcgaaattcagaatccagtgtccgccaatcggtccgacccagtgactctcaacgtgacgtacggaccagacactccaactatttccccatctgacacctattaccgacccggtgcaaatctctcactctcctgctacgctgcctctaatccaccggctcagtactcttggttaataaacggaacattccagcagagcactcaggaacttttcattcccaacatcaccgtaaacaattccggttcctacacttgtcatgccaataattctgtgaccgggtgtaatagaacgactgtgaaaacaattattgtcaccgagaggcagaatctgacaatgttaccaaggctggatagtaacagttgggctcaagcaattctgccctctgtttcccagtctgcggagatcactgacaacgcgttgccccaggaaaatgggctcagtcccggagcaatcgcagggatcgtgatcggagtggtggcactggtggcactgattgctgtggctctggcctgttttttgcactttggcaagacagggcgagcttccgaccaacgggatctgaccgaacacaaacccagtgtgagtaaccacacacaggaccattccaatgatcctcccaacaagatgaatgaagttacttacagcacactcaactttgaagcacagcagccgactcagcccacctctgcctctccttcattgactgcgactgagattatctattctgaagtaaaaaaacaatag

SEQ ID NO: 217075 - DNA, 1254 bp, synthetic construct
  misc_feature 1..1254: note = Description of Artificial Sequence: Synthetic coding sequence
  source 1..1254: mol_type = other DNA
atgggacacctgagcgcccctctgcatcgagtgcgggttccttggcaagggttgttacttaccgcctctctcctgacattctggaaccctccgaccacagcccagttaaccaccgagtctatgccattcaacgtcgccgaggggaaggaggtgctactcctcgttcacaacctaccccagcaacttttcggctatagttggtataaaggcgagcgggtggacggtaaccgtcagatcgtggggtatgccatagggacccagcaagcaactcccggtccagccaatagtggaagggaaacaatctacccaaatgcctcactgcttatccagaatgtcacccagaacgataccggattttacactctgcaggtgatcaagtcggacctggtcaatgaagaggcaacagggcaatttcacgtgtatcctgaactccctaagccgagcatttctagtaacaactcgaatcctgttgaagacaaggatgctgtggcttttacatgtgaaccagagacccaagacactacatacttgtggtggattaacaatcagtccctgccagtgagccctcggctgcagctaagcaatggcaatcgcacactgacccttctcagcgtaactcgaaatgatacgggtccttatgaatgcgaaatacagaacccggtttctgccaaccgaagcgacccagtcacattaaatgtcacttacggccctgatacgccaactatctctccttcagatacctactacaggccaggggcaaatctgtccctaagttgttacgcggcatctaaccctcccgctcagtacagctggctgatcaacggaaccttccaacaatcaactcaggaactttttatccccaatatcactgtgaacaactccggtagttatacctgtcatgccaataacagtgtgactggttgcaaccgcactacagtgaaaacaattatcgtaacggagttgtctccagtggtagccaagcctcagattaaggcctccaaaaccacggtgacaggagacaaggactccgtgaatctgacatgcagcactaatgataccggcatctcaatcagatggttctttaagaaccagtccctcccatccagcgaaaggatgaaattatctcagggtaatacgaccctctccattaatcccgtaaagagagaggacgccggaacatactggtgcgaagtgttcaacccaataagcaaaaatcaatcagatcccataatgcttaacgtgaactgcaaatag

SEQ ID NO: 217076 - DNA, 1437 bp, synthetic construct
  misc_feature 1..1437: note = Description of Artificial Sequence: Synthetic coding sequence
  source 1..1437: mol_type = other DNA
atgccattcaatgtggccgagggaaaggaggttctgctactggtccataatcttcctcagcaactgtttgggtactcctggtataagggcgagagagtagatgggaacagacagattgtgggatacgccatcggcactcagcaggctacaccaggacccgctaacagcgggagagagacaatttatccaaacgcatctttgctcatacagaacgtcactcaaaatgacacaggcttttatacgctgcaggtgattaagtcggatctggtcaacgaggaagctactggccagttccacgtataccccgaacttcccaaaccgtcgatatcctcaaataactctaatcccgtggaggataaggacgccgttgcctttacatgcgagcccgagacacaggataccacgtacctgtggtggatcaacaaccagtctttgcctgttagccccaggctccagctaagcaatggcaatcggaccctcacactgctgtccgtcacccggaatgatactggaccttacgagtgcgagattcaaaatcctgtgtcggctaatcggtccgacccagtcacattgaatgtcacctatgggcctgatacacccacgatctcgcccagcgacacttactatagaccaggggctaacctgagcctcagttgctatgcagccagtaatccaccagctcagtatagctggctgataaatggaacctttcagcagtctactcaggagctattcataccgaacattactgtaaacaatagcggcagttacacttgccatgctaataattccgtaaccggctgtaaccggaccaccgttaagactattatcgtgacggaactgtcaccggtggtggcgaagcctcagattaaggcttctaagactacggtgacaggagacaaagacagcgttaacctgacctgcagcaccaacgataccgggatcagcatacgctggtttttcaaaaatcagagtctgccgtcttccgaacgtatgaagctgtcgcagggaaatacgaccttgtcaattaatccagtcaagcgagaagatgctggaacatattggtgcgaagtctttaaccccatctctaaaaatcagtccgacccaataatgctgaatgaaatggcttttcaccatgtggctaaggccggattgaaattactcagttcctctaatcctcctgcgtctacctctcagtcagccaagatcacagagcggcaaaatttaaccatgttgcccagattagattcaaatagctgggctcaggctatcctgccttccgtctcccagagcgccgagataactgacaatgctttgccgcaggagaatggcctgtccccaggagcaatcgccggtatcgttatcggggtagttgcgctcgtggcgctgatcgctgtggccctggcttgttttctgcatttcggtaagaccggatag

SEQ ID NO: 217077 - DNA, 966 bp, synthetic construct
  misc_feature 1..966: note = Description of Artificial Sequence: Synthetic coding sequence
  source 1..966: mol_type = other DNA
atggggcatctgtccgctcctcttcacagagtccgggtgccttggcaaggtcttctgcttacagcttccctgctgaccttttggaatcctcccaccacagctcaactaactacagagtctatgcctttcaatgtggcggaaggcaaagaagtccttctgctcgttcataacctaccccagcagctgttcggatattcttggtacaaaggagaaagagtggatggtaacaggcagatagtaggttacgctattggaactcagcaggccacccctggacccgcaaatagcggaagagaaacaatttacccaaatgcgagtcttctgatccaaaacgtgacccaaaatgatactggtttttatacgctgcaagttattaaaagtgatcttgtgaatgaggaagccaccgggcaatttcatgtctaccccgaattgccaaagccttccatctccagtaataactcaaatcctgtggaggataaggatgccgttgcatttacatgtgaacccgagactcaggacaccacctacctgtggtggataaacaaccagagtctgcccgtgagcccacgtctccagctctccaacggaaatcgaacgctgacattattgagcgtgacccggaacgacactggcccttacgagtgtgagattcagaaccctgtaagcgccaatcgatccgatccagtgaccctgaacgtaacctatggacccgacactcctaccatttccccttccgacacctactacagacctggagcgaatctctcgctcagttgttacgctgccagtaaccctcctgctcagtatagctggctgatcaacgggacttttcagcagtcgactcaagagctctttattcctaacatcactgttaacaattccggcagctatacctgccacgccaacaacagtgtgactgggtgtaacagaactaccgtaaaaacaattatagttaccggcaaatag

SEQ ID NO: 217078 - DNA, 1458 bp, synthetic construct
  misc_feature 1..1458: note = Description of Artificial Sequence: Synthetic coding sequence
  source 1..1458: mol_type = other DNA
cggggagaccgggcagcagtccttgaagctttcctggaacctaagctgtcctcaactggagaagaccgggcatcccgtcggcatcacggcgcacccctgtctcctaccagccagtctgcctgcactctcgggctgctgctgacagcaagcctccttaccttctggaatcctcccaccacggcgcagctgacaacagagtccatgccgtttaatgttgcagagggcaaagaggttttgctgctcgtgcataacctccctcagcagctgttcgggtatagctggtacaaaggcgagagagtggacgggaacaggcaaatcgttggatatgcaattggcacacagcaggccacccctgggcctgcgaactctggccgtgagactatctaccccaacgcttccctgttaattcaaaatgtgacacagaatgatacaggtttctataccctgcaggtcattaagagcgacctggtcaacgaggaggccaccgggcaattccacgtgtatcctgagctccccaaaccaagtataagcagtaacaactccaatccagtggaagataaagacgccgtggcctttacttgtgagcccgaaactcaagatacaacttacctgtggtggattaacaaccagagcctgccagtctccccgcgactgcaactgtctaacggaaaccggacgctcacactgctgtcagtgactcgaaatgatacaggaccctacgaatgtgagatacagaatcctgtctcagcaaaccgaagcgatcccgtgaccctgaatgtgacctacggccctgacaccccgactattagcccctcggatacttactaccggcctggcgctaatttgagcctgagttgctacgccgcaagtaaccccccagcccaatattcttggctgatcaacggtactttccagcagagcacacaggaactattcatccctaacattaccgtgaataattctgggagctacacttgccacgccaacaactctgttacaggatgtaacaggactactgtgaaaacaatcatagtcaccgagttgtctccggtcgtcgccaaaccccaaataaaagcaagcaaaacaaccgtaacgggggataaagattctgtgaacctgacatgctccaccaacgataccggtatcagtataaggtggttcttcaagaatcagagtctaccctcctccgagcgcatgaaattgagccagggcaacactaccctgtccatcaaccctgtaaagcgtgaagatgccggaacctattggtgcgaagtttttaaccccatctcaaaaaatcaaagtgacccaataatgctcaacgtgaactacaatgcattgccccaggagaacgggttgagtccaggcgcaatcgccggaattgtgatcggagtggtagccctggtggctcttattgcagtagcccttgcatgtttcctgcactttggcaagactggatag

SEQ ID NO: 217079 - DNA, 1395 bp, synthetic construct
  misc_feature 1..1395: note = Description of Artificial Sequence: Synthetic coding sequence
  source 1..1395: mol_type = other DNA
atgggccacctgagcgctccacttcaccgggtgcgagtgccctggcagggactgctgttgaccgcttctctgctaaccttctggaaccctccaaccactgcccagttaaccactgagtccatgccttttaatgttgcggagggcaaagaggttctgctgctcgtccataacttaccccaacagctgtttggctatagttggtacaaaggggaacgagtagacggaaacagacagatcgtaggatatgccataggcacgcaacaggctacaccgggaccagcgaactcaggccgtgaaaccatttaccccaatgccagcctcctaatccaaaacgtgacccagaatgatacaggtttttacacccttcaagttattaagtcagacttggtgaacgaggaggccaccggccagtttcacgtttacccagaactgcccaagcctagtatctcatccaataactcaaacccggtggaggataaagacgctgtggcctttacctgtgagcctgagacacaggataccacctatctttggtggataaacaaccagtctctgccggtttcccctaggctccagctttcaaatggaaaccggactttaacattgctctctgttaccaggaacgacacaggaccttacgaatgcgaaattcagaatccggtgagtgcgaaccgatccgaccctgtgacactcaatgtgacgtacggtcccgacaccccaacgatttcaccatctgacacctattataggccgggagcgaacttaagcctaagctgctacgccgctagtaatcctccagcccagtatagttggctcataaatggcacatttcagcagtcaacgcaggagctgtttatccccaatattaccgtgaacaatagtggttcttatacatgccacgctaacaattcggtcactggctgtaaccgcaccaccgtcaagacgatcattgtgacagagctctcacctgtggtggctaaacctcaaattaaagcgtctaagaccaccgtcaccggagataaagacagtgtgaacttgacatgttccaccaacgatactggtatcagtattaggtggttttttaaaaaccagtcactgccctcctccgagcgaatgaagctgtctcagggcaacactactttatccatcaaccctgtcaagagggaagatgccggaacttactggtgcgaggttttcaatcccattagcaaaaaccaaagtgaccccatcatgttaaacgtaaattacaatgcccttcctcaggagaacgggctctcccccggagcaatagctggcattgtcattggcgttgtggccctggtagccctgatcgcggtcgcactggcatgctttcttcatttcggaaaaaccggctccagcgggcctctgcagtag

SEQ ID NO: 217080 - DNA, 1107 bp, synthetic construct
  misc_feature 1..1107: note = Description of Artificial Sequence: Synthetic coding sequence
  source 1..1107: mol_type = other DNA
atggggcacctgtcagcccctctccaccgtgtcagggtaccatggcaggggctcctcctgacagcgtcgctgctcaccttctggaacccaccaacaaccgcccagttaactactgaatcaatgccattcaacgttgctgagggtaaggaagtcctgttgctagtacacaacctgccgcaacagctttttggctattcttggtacaaaggcgagagggtggatgggaataggcaaattgtaggctacgccattggaacgcagcaagccactcccggacccgcaaattccggacgcgagacaatttatcctaatgccagcttgctgatccagaacgtgacgcagaatgataccgggttctacactctccaggtgataaagagcgacctagtcaatgaggaggctactgggcagtttcatgtgtatcccgagctgccaaaaccctcgatctctagcaataactccaaccctgtcgaggataaggatgccgtggcatttacatgtgaacccgaaacacaggacacaacatatctatggtggattaacaatcagagcttgcccgttagtccacggctgcagctcagtaatgggaatcggacgctgaccctcctctcagtaacccggaatgacactggcccttacgagtgtgaaatacaaaaccctgtttcagcaaacagatcagatcccgtgactttgaacgtgacatatgggccagacacccccaccattagtccgtcagatacatattaccgtccaggggcaaacctcagcctgtcttgctacgcagcatctaatccccctgcacagtattcttggctaattaacggcacttttcaacaaagcacgcaggaactgttcatccccaatatcacagtgaataacagcggctcttacacctgccatgccaataacagtgtgacaggctgcaaccggacaacggttaaaaccattatcgttacagataatgccctccctcaagaaaatgggctgagtcccggagccattgccggaattgtcatcggggtggttgcactggttgcgctcatagcagtggctctagcatgctttctccacttcggtaagaccggctcgagtgggcctctgcagtag

SEQ ID NO: 217081 - DNA, 906 bp, synthetic construct
  misc_feature 1..906: note = Description of Artificial Sequence: Synthetic coding sequence
  source 1..906: mol_type = other DNA
atgctggctctacgcgtggcccgtggtagttggggggctctgcgaggcgcagcctgggcaccaggcacccgtcccagcaagagacgggcttgctgggccttgctccctccggttccctgctgcctcggctgtcttgccgagcgctggaggttaagacctgcagcattggggctgcggctgccaggcatcgggcagcggaaccattgctcaggagccggaaaggcagctcctaggcctgccgcaggagctggcgcagctgctgaggccccaggcggtcagtggggacctgcctctaccccttccctatacgagaacccctggaccatcccaaacatgttatcaatgactagaattggtctcgccccagtactcgggtatctcataatcgaggaggacttcaacatagccctgggggtctttgccctcgctggactgactgatttgcttgacggctttatagctcggaattgggcaaatcagaggtcagctctcggcagcgccctggacccgctagcagacaagatcctgatctcaattctctacgttagcttgacatacgccgacctcatacccgtaccattaacctacatgattatttctagagacgtgatgcttattgctgccgtgttttatgtccggtatcggacccttcctacccctcggacactggctaaatactttaatccttgctacgcaaccgcacgtctaaagcctacctttatttccaaagtgaacaccgccgtccagcttatcctggttgccgctagcctcgccgctccggtgttcaactatgcagattcgatctacctgcagatactatggtgctttacggctttcacgacggccgcatccgcctatagttactatcactacggacggaagaccgttcaggtgatcaaggactag

SEQ ID NO: 217082 - DNA, 609 bp, synthetic construct
  misc_feature 1..609: note = Description of Artificial Sequence: Synthetic coding sequence
  source 1..609: mol_type = other DNA
atgcctcagtacgaaaatccctggaccatacccaacatgctaagcatgacaaggatcgggttggccccagtgcttggttacttgatcatcgaagaagactttaatattgccctaggagtttttgcattagctggacttaccgaccttttggatggtttcattgctaggaactgggcaaaccaacgcagtgctctggggagtgcgctggaccctttggcagacaaaattctaatctctatcctgtatgtcagtcttacatatgccgacctgatcccggtgccattgacctacatgataatctcgagggacgtaatgctaatcgccgctgtcttctacgtcaggtaccggactttgccaacgccgaggaccttagcaaaatattttaacccatgttacgccaccgctcgcttaaagccaacattcatatccaaagtgaacactgcggtgcagttgattcttgtggctgcttccctggcggctccggtgttcaactatgcagacagtatttatttacaaatattgtggtgctttactgccttcacgacagccgcatctgcatatagctattatcactacggaagaaagacagtgcaggtcataaaggattag

SEQ ID NO: 217083 - DNA, 618 bp, synthetic construct
  misc_feature 1..618: note = Description of Artificial Sequence: Synthetic coding sequence
  source 1..618: mol_type = other DNA
atgctggccctccgggtagctcggggtagttggggcgcacttcgcggtgcagcgtgggctcccggaacaagacctagtaagagaagggcctgctgggcacttctgccgccagtgccctgctgcctgggctgcctggccgagcgctggcgcttgaggcctgcggctctcggcctgcgcttgccagggattggacagcggaatcactgtagcggagccggtaaggccgctcccagaccagccgcaggagccggagccgcagcagaagctccgggagggcagtggggaccagcttctaccccctctttatatgagaatccctggaccattcccaacatgctgtcaatgacaaggatcggactcgctcccgtcctgggttatttgatcatcgaagaggactttaacattgccctcggagtgttcgcccttgcgggattgactgatttgctcgatggatttattgccaggaattgggctaaccagcgcagcgccttaggatctgctttggaccccctcgcagacaaaatcctgatttcgattctctatgtgtcacttacgtatgccgatttgatcccagcaaatacttgtcaggttttccagagcctgctgtgccattgctag

SEQ ID NO: 217084 - DNA, 12210 bp, synthetic construct
  misc_feature 1..12210: note = Description of Artificial Sequence: Synthetic coding sequence
  source 1..12210: mol_type = other DNA
atggccagtcgggacagcaatcacgcaggcgagtcatttttggggtcagatggtgatgaggaagcaacccgagagcttgaaacggaagaggagtcggaaggggaagaggatgagactgcggctgagtctgaggaggaacccgacagtagactgtctgatcaggatgaggagggaaaaattaaacaagaatacatcattagtgacccctccttctccatggtcacagtacagcgagaggattctggaataacctgggaaacgaatagcagcagaagctctaccccatgggccagcgaggaatcccagacttcaggcgtttgcagcagagagggatcaacggtcaattctcctcctggaaacgtgtcatttattgtagacgaggtcaaaaaggtccgcaagcgaactcataagagcaagcacgggtcccctagcctacggcgtaagggtaatcgcaagcgtaatagtttcgagagccaggacgtgcccaccaacaagaaggggtctcccctgacctccgcatcccaggttttaacgaccgagaaagagaagagttacacgggcatctacgacaaagcacgcaaaaaaaagacaacgagcaatactccccctatcacaggcgctatatacaaagagcataaacccctggttctgcggccagtgtatatcggcaccgtccaatacaaaataaaaatgttcaatagtgtgaaagaagaactcattcccttgcagttctatggcacactccctaaaggttacgtcatcaaagagattcactaccggaagggaaaagacgcctccatctccctcgaacccgatctcgataactcagggagcaatactgtgtccaaaacgcgcaaactagttgctcagagcattgaagataaggtgaaagaagtgttccccccttggagaggcgctctgtcgaagggtagcgagagcctaacacttatgttcagccacgaggatcagaagaaaatctacgccgattcccccctcaatgctacgtccgccctagagcataccgtgccaagctatagttcctcaggcagggccgagcagggaattcagcttcgacactctcagtccgttccccagcagcctgaggacgaggccaaaccccatgaggtagaacctccttcagtcacccccgacaccccagccacaatgtttttgaggacaaccaaggaggagtgcgaactggcctctcccggaacggcagcgtcagaaaacgactcctcggtgtctcccagctttgcaaatgaggttaagaaagaggatgtctactccgcgcatcactcaatatccctcgaagccgcaagtccgggtctggctgcctctacgcaggatggcctggatccagaccaagagcagccagacttgacttcaatcgaaagggctgaacccgtatctgccaagctgacccctacacacccaagtgtgaaaggcgagaaagaggagaatatgctggaaccaagcatctcactgtccgaacccctgatgctggaggaaccggaaaaagaggagattgaaaccagtctacctatcgcgataacaccagaacccgaggactcaaacctagttgaagaggaaattgtagagttggactatcccgaatcccccctagtgtctgaaaaacccttcccccctcatatgtccccagaagtggaacacaaggaggaggagcttattcttcccttactcgccgcttcctcacccgagcatgtggccctgagtgaggaggaacgcgaggagattgcttcagtgtccacgggctcggcttttgtctccgagtattccgttcctcaggatcttaaccacgagttacaggagcaagaaggagaacccgtacccccatccaatgtggaggctattgccgaacacgccgtgctgtccgaggaggagaatgaggagtttgaagcatactcccctgcagccgcaccaacctctgagtcctcactgtccccttcaacaactgaaaaaacttcagaaaaccagtcgcctctgtttagtacagtaacccctgagtacatggtcctttctggggacgaggccagcgagagcggctgttacacaccagactccacctcagctagcgaatacagcgtccctagtctggccactaaggagtctctaaaaaaaaccattgaccgaaagagtcctctgattctgaaaggggtatcagaatacatgatccctagtgaagaaaaggaggatactggaagctttacaccagccgttgctccggcatccgaaccaagcctctcaccctctacaaccgaaaagacctcagaatgccagtcaccgctaccttcgaccgcgacctctgaacacgttgtgccaagtgaaggcgaggatctggggagcgagaggttcaccccagattcaaagctgatatctaagtatgccgcaccactgaatgccacccaggaatcccagaagaaaatcatcaatgaggcatcacaattcaaacccaagggcatttctgaacacacggtgctatcggtggatggcaaggaggttattggcccttcatctcccgatctcgttgtagcctccgagcattccttcccccctcacacaacggagatgactagcgaatgtcaggccccaccactttccgcaaccccctccgagtacgttgttctatctgatgaggaagctgtcgaactggaaaggtatacgccatcaagcacgtcagccagtgaattttccgtacctccatatgccacacctgaagctcaggaggaggagatcgtgcaccgttctctcaacctgaaaggagccagttctccaatgaacctttccgaggaggaccaggaggacataggccctttttccccagatagtgcctttgtatcggagttttcattccccccatacgccacacaggaggcagagaagagagagttcgaatgcgactcacctatttgtctcacctccccttccgagcatacaatcctttccgatgaagacacagaggaagccgagctcttctctcccgactccgccagtcaggtatctatccctccgttccggatctccgaaaccgagaaaaatgagctggaacccgattctctcctaaccgctgtcagtgcatccggatattcctgcttctctgaagccgacgaagaagacattggatccactgctgccacaccggtgtctgagcagtttagtagctctcagaaacaaaaggccgaaacgttccctttgatgtctcctctcgaggatctatctcttccacccagcacagataaatcggaaaaagctgagattaaacctgagatcccgaccacgagtaccagcgtcagcgagtacctcatcctggctcaaaaacagaaaacccaggcttacctagagcccgagtcggaggaccttattccgtcccacctgacctccgaggtggaaaaaggggagcgggaagccagttcatcagtcgctgctattccagctgcccttcccgctcagtccagtatcgtgaaagaggagacaaagccagctagccctcacagcgtgctacccgacagcgtgccagctatcaaaaaggagcaggagccaaccgctgcgctcaccctgaaggccgctgacgagcaaatggcactgagcaaagtgagaaaggaagagatcgtacctgatagccaggaggctactgcccacgtgagccaagaccagaagatggagccccagcctcccaacgtgcccgaatccgagatgaaatacagtgtgttaccagatatggttgatgaacctaaaaagggagtgaaaccgaaacttgtgctgaacgtgacttctgagcttgagcaacgaaagctgagtaaaaatgaaccagaggtgatcaagccatatagcccactcaaggaaactagcctgagcggccctgaagccctaagcgcggttaagatggagatgaagcatgactcaaagatcaccacaaccccaattgtcctacattctgcctcctccggcgtggaaaaacaggtggaacacggaccccctgcactagctttctcggccctttcggaggagatcaagaaggagatcgaaccatctagttctaccacaacagcgtctgtaactaaactagacagcaatctcacaagagcggtgaaggaggaaatacctactgacagctcgctgataacacctgttgatcgccctgtattgaccaaagtcggcaagggggagctgggctccggattacctcctctcgtgactagcgccgacgaacacagcgtgctcgctgaggaggacaaggtggccatcaaaggtgcttccccaattgaaactagctctaagcacttggcatggtccgaagccgagaaggagattaaattcgacagcttaccgagcgtttccagtattgctgagcattccgtgcttagtgaggtcgaggccaaggaggttaaggctggattaccagtgatcaagaccagtagctctcagcatagtgataagtcagaggaggctcgcgtcgaggacaagcaggacctcctcttctctacagtatgtgacagtgagcgcctggtctcctcccagaaaaagtcccttatgtcaacctcggaagtgctcgaaccagagcacgagctgccactttctctgtggggcgagattaaaaagaaagagaccgaactgcccagttcacagaacgtgtcgcctgcctccaaacacattattcccaaagggaaggacgaggaaacagcttcatcatcccccgagctcgagaaccttgcctctggtcttgcgcctacactattgttgttgtctgatgataagaacaaaccagctgtcgaggtgagcagcactgcccagggcgacttcccctctgaaaagcaggatgtagcattggcagaactcagtctggagcccgaaaaaaaggacaagccacaccagcccttggagctgcctaacgcaggcagtgaattcagctcagacttggggagacagagcggctctattggaactaagcaagccaaatctccaatcaccgaaacagaggacagcgtcctagaaaaggggccagctgaattacggtcccgcgaaggcaaggaggagaacagagagttgtgcgccagctccaccatgcccgcaatctccgagttgagctccctgcttcgggaagagagtcagaacgaagaaattaagccttttagcccgaagattattagcctggaatcaaaggaacctccagcttcagtggccgaagggggaaaccctgaagaattccaaccattcaccttcagtctgaaggggctgtccgaagaagtgtcccatcccgctgatttcaagaaagggggtaatcaagagatcggaccgttgcctcccactggaaacctgaaagctcaggtgatgggtgacatcctcgacaaactctcagaggaaactgggcatccgaatagttctcaggtactgcagtcaattaccgaaccgtcaaaaatagccccatccgatctcctggtcgagcagaaaaagactgagaaggccctacactcagaccaaactgtgaaactaccagatgtgagtaccagttccgaggacaagcaagacctgggcatcaagcagttttctctcatgcgagaaaatttgcctctcgagcagtccaaatcctttatgacgacgaagcctgccgatgtgaaagagacaaaaatggaggaatttttcatctcccccaaagacgaaaattggatgctggggaaacctgagaacgtggcctctcagcatgaacagcgcatcgctggatcagtgcagctcgatagcagttctagcaatgagctaaggccagggcagctgaaagcggctgtgtcatccaaggaccacacctgcgaggtgcggaagcaagtcctccctcactccgccgaggaatcccatctttcatcgcaagaggccgtcagcgcgctcgacacatcgtctggaaacacagaaacgctcagctccaagagttattctagtgaggaggtgaaactggctgaggaacctaaatcgctggtccttgccggaaatgttgagaggaacatcgccgaaggcaaggagatccatagcctgatggagagcgaatccctgctgctggagaaggctaatactgagttgtcatggccttcaaaagaagattcccaggaaaagattaaactgccccctgaacgatttttccagaagcccgtctctggcttgagcgttgagcaggtaaagtccgagactatctcctcttctgtgaagaccgctcattttcccgcagagggagtggaacctgccctgggcaatgaaaaagaagcccaccggtccacccccccattcccagaggagaaacctttagaggaatccaaaatggtgcaatcaaaggttatagatgatgcagacgagggcaagaaacccagtccagaggtaaagattcccacacagagaaaacccataagttccatccatgctcgggagcctcagagtcccgagtcgcctgaggttacacagaacccacccactcaacctaaggtggccaagcctgatctgccagaagagaaagggaaaaaaggtatcagtagcttcaaatcatggatgagttccttattcttcggtagttctactccagacaataaggtggctgagcaggaggatctggagactcaacctagtcctagtgtggagaaggctgtgacagtaatcgacccagagggaacaatccctactaatttcaacgtagcagagaagcccgcagatcattccttgagcgaggtgaaactcaagactgcagacgagccaagaggcaccctggttaaatccggggacggccagaatgtcaaagaaaaatcaatgatactgagcaatgtggaggatcttcaacagccaaagtttatatcagaagtttcccgtgaggactatgggaaaaaagagatcagtggcgactccgaggagatgaacattaactctgtggtcacatcagctgacggcgagaaccttgaaatacagtcctacagcttgatcggtgagaaattggtcatggaagaagcaaaaacaatcgtaccccctcacgtgacagattctaagcgggtgcagaagccggcaatcgcacctcctagtaaatggaacatctccatatttaaggaagaacctagatcagaccagaaacaaaagagcctactgagcttcgatgtggtagacaaagttccgcagcagcctaagagcgcctcctctaattttgctagcaaaaacattactaaagagtccgaaaaacccgaaagcataattctgccagtcgaggagtccaaagggagtctcatcgatttcagtgaagacaggctgaagaaggagatgcagaaccctaccagcctgaagatcagtgaagaggagacaaaactgaggtctgtgtctcccaccgagaagaaggataacctggagaacagatcatataccctggcagaaaagaaggtgctggcagagaagcagaattccgtggctcctctggagctgagggacagtaatgagataggcaagacacagatcacactaggatcccgttcgaccgaactcaaggaatcaaaagccgatgctatgccccagcacttctatcagaacgaggactacaatgaacgtcccaaaatcatcgtcggatccgagaaggaaaaaggcgaagaaaaggagaaccaggtctacgtcctcagcgaggggaagaagcagcaggagcatcagccatactccgttaacgttgctgagagtatgagcagggagtcagacatcagtctaggtcattctctcggcgaaacccaatctttctcgcttgtcaaggcgactagcgttactgaaaaaagtgaggccatgcttgctgaggcccaccccgagattcgcgaagccaaggcagttgggacccaaccccatcccttagaggaaagcaaagtcttggttgagaagactaaaacatttctccccgtggccctcagctgcagagatgagattgagaaccattccctctcacaggaagggaatcttgttctcgagaagtcttccagggacatgccggaccactcagaggagaaggagcagtttagagaaagtgagcttagcaagggaggatcggtcgacattaccaaggagaccgttaaacagggcttccaggaaaaagccgtgggcacgcagccccgtcctctggaagaaagcaaagtgctggtggagaagacaaaaacctttcttcctgtggtcctgtcatgtcacgacgagattgagaatcattctctgtcccaggagggcaacctggtgctggagaaatcgagccgagatatgccagaccattcagaggaaaaggagcagttcaaagaatctgaattgtggaaagggggatctgtggatatcaccaaggagtcaatgaaggaggggttcccttcgaaggagtccgagagaacactggctcgcccattcgacgagacgaagagttcggaaacgcctccttacctgttgagccctgtgaaaccacagacacttgcatcaggtgcgagccctgaaatcaatgcggtgaaaaaaaaagagatgccgaggagtgagctcacgccagagaggcatacagtgcacaccatccagacatcaaaagatgatacgagcgacgtccccaagcaaagcgtgctggtgtccaaacaccacctagaagcggcagaagacacacgcgtgaaggagcccctttctagcgccaaatccaattacgcacagttcatttcaaacacgtctgccagcaatgccgacaagatggtgtcgaataaggagatgcctaaggagccagaggacacttacgccaaaggcgaggactttacagtgacgtccaagccagctgggctgtccgaagaccagaaaaccgccttctccataatcagcgaggggtgcgagatcctgaatattcatgctccagccttcatcagcagcatcgatcaggaagagagcgagcagatgcaggacaagttggagtacctggaggagaaagcgtcctttaaaacaatacccctccccgacgattccgagaccgtcgcctgtcataaaacattgaagtcccggctggaggatgaaaaggtgacccctctgaaggaaaataagcagaaagagactcacaaaactaaagaagaaatttcaactgatagcgagaccgatttgtcctttatccagccaacaattcccagtgaagaggattactttgaaaagtataccttgattgactacaatattagcccagacccagagaagcaaaaggcaccgcaaaaactcaacgtagaagagaagctttcaaaagaagtgacagaggaaaccattagctttcctgtgagctcagttgagagtgccctggaacacgagtacgaccttgtaaagctagacgagtcgttttacggtcccgagaagggccacaacattttatcacacccggaaacacagtcacagaatagtgcagatcggaatgtgagtaaggatacaaaacgcgatgttgattctaagagcccagggatgcccctcttcgaggccgaagaaggagtcctgagcagaacgcagatctttccaaccacgatcaaagtgatagacccggagttccttgaagaaccgccagccctggcctttctctacaaggacttatacgaggaagccgtgggcgagaagaagaaagaggaagaaacagcgtctgaaggtgactccgtgaattcggaagcgagttttccaagcagaaattccgataccgacgatggtacgggtatatacttcgagaaatacatcctcaaagacgatatcctgcatgacacgagtctcactcagaaagatcaggggcagggccttgaggaaaaacgtgtcggaaaggacgatagctatcagcctatcgctgcagaaggcgaaatttggggaaaatttggcaccatctgtcgggagaaatccttagaggagcaaaaaggagtgtacggagagggtgaaagtgtggaccacgtcgaaaccgtcggaaacgtcgccatgcagaaaaaggcacccatcaccgaagacgtcagggtcgcaactcagaagattagctacgcggttccgttcgaggatacacatcacgtgctggagcgcgctgacgaagccggaagccatggcaacgaggtgggaaacgccagccccgaggttaacttgaatgtgccagtgcaggtctcattccccgaggaggagtttgcatccggcgctacccatgttcaggagaccagtctggaagaacctaaaatcctcgtgcctcctgagcccagtgaagaaagactgagaaactcaccagtgcaggatgagtatgaattcacagaaagccttcacaatgaggtggtgccccaggatattctgagcgaggagttgagttctgaatctaccccggaagatgttctgtcacaaggtaaggaatccttcgagcacatcagtgaaaatgaatttgctagcgaagcagagcagtccacaccagccgaacaaaaagaactaggcagtgaacgtaaggaggaggatcagctgagctctgaggtggtaaccgaaaaggcacaaaaggagcttaaaaagtcacagattgacacttattgctacacatgtaagtgtccgatttccgctacagataaagtctttggaacacataaggaccacgaggtctcaactctggacaccgccatttcagccgtgaaggtgcagttggccgagttcctggagaatctccaggagaagtccctgagaatcgaggctttcgtttctgagatagagagctttttcaacaccattgaagagaactgttccaaaaatgaaaaaagacttgaagaacaaaacgaggaaatgatgaaaaaggtgctcgcacaatatgacgaaaaagctcagtcgtttgaggaagttaaaaaaaaaaaaatggaattcttacatgaacaaatggtccatttcttacaaagtatggacactgctaaggacacactcgagaccattgttcgggaggcagaggagcttgacgaggctgtgttcctgacatctttcgaagagattaacgagcgcctgctaagtgctatggagagtaccgcctcattagagaaaatgcctgctgctttcagtctctttgaacattatgacgacagtagcgctcgatctgaccaaatgttaaaacaagtggcagtgccccagcctccacggctagagccccaagaaccaaactctgccacctctaccaccatcgctgtgtattggagtatgaacaaagaggacgtcattgatagttttcaggtttactgtatggaggaacctcaagatgaccaggaggtgaacgagctagtggaggagtaccgacttactgtgaaagagtcctactgcatttttgaagatctcgagcctgaccggtgttaccaagtttgggtcatggctgtgaattttaccggatgttcattgccttcagagagagctatcttcaggaccgctcctagcacaccagtcatccgagcggaagactgcactgtatgctggaacaccgccaccattcgctggcgcccaacaacccccgaagcgaccgagacgtacactctcgaatactgccggcagcatagcccggaaggtgagggtctgagatcatttagtggaattaaggggctacaattgaaggtgaacctgcagcctaatgataattatttcttctatgtcagggctattaatgcattcggcaccagcgaacagtccgaggcagctttgatctcgacgcgcggtactcgttttctgttgttgcgtgagactgctcacccagccctccatatcagctcatccggcaccgtcatctcgtttggcgagcgcaggcggcttactgaaatccccagcgttttgggtgaggagctgcccagctgcgggcagcactattgggagactactgtcacagactgccctgcataccgcctcgggatctgctctagtagcgcggtgcaagctggcgctctgggccagggggagacttcttggtacatgcactgtagtgaaccacagcggtatacctttttctactccggcattgtgtcagacgtccatgtgaccgaacgacccgctagggtgggcatcctgctagattataacaatcagcgactcattttcattaacgcagagagtgagcagttactctttatcatccgacaccgatttaatgagggtgtgcacccagcattcgccctggagaagcccggaaaatgtaccttacacctcgggatcgagcctcccgatagcgttcgacacaaatag

SEQ ID NO: 217085 - DNA, 678 bp, synthetic construct
  misc_feature 1..678: note = Description of Artificial Sequence: Synthetic coding sequence
  source 1..678: mol_type = other DNA
atggatctgagagctggggactcgtggggaatgcttgcctgcctgtgtaccgtcctgtggcatctgccagcagtgcctgctctgaaccgtacaggcgaccctggtcccggacccagcattcagaaaacatacgacttgactcggtatctggagcatcagctgagaagtcttgctggtacatatctgaactacttagggcctccttttaacgaacccgacttcaatccaccgagactgggagcagagaccctccccagagcgaccgtagacctggaagtgtggcggtcactcaatgataagcttaggctgacacagaattacgaggcctatagtcatcttctttgctatctgcggggattgaatcgccaggccgcaacggcagagttacggaggagcctcgcccatttctgcacctctctacagggtctgttgggaagcatcgccggagtgatggctgctctgggctacccactgccacaaccactgcctggtacggaacctacatggacgcccggtccagcccattcagattttctgcagaaaatggatgatttctggttgctgaaagagctacagacctggctctggcgcagcgcgaaagacttcaatagactgaagaagaagatgcagccgccagcggctgctgtgacgctccatctgggggctcacggattttag

SEQ ID NO: 217086 - DNA, 648 bp, synthetic construct
  misc_feature 1..648: note = Description of Artificial Sequence: Synthetic coding sequence
  source 1..648: mol_type = other DNA
atgcttgcatgtctgtgtacggtgctgtggcacctaccggctgtacccgctctgaaccgcaccggagaccccggaccagggccttccatccagaaaacttacgacttaacgcggtacctggaacatcagttgcgttctctcgccggtacgtacttgaattatttaggccctcctttcaacgagcccgacttcaatccgccacgactgggggcagaaacactgcccagggctactgtcgatctcgaggtctggcgctccctgaatgacaagctgcgcctgacacagaattacgaggcctatagtcaccttctgtgctaccttcgcggtctcaataggcaggcagctactgccgaactcaggcgctcacttgcgcatttttgcaccagcctgcagggtctgctgggatccatagctggggtaatggctgccttgggctacccactcccccagccattaccgggaacagaacctacttggaccccgggacccgcacattctgactttttgcaaaagatggatgatttttggctgctgaaggaactgcagacttggttgtggcgaagtgcaaaggattttaataggctcaagaaaaaaatgcagccccctgctgcggcagtcaccctgcatctcggggctcacgggttctag

SEQ ID NO: 217087 - DNA, 648 bp, synthetic construct
  misc_feature 1..648: note = Description of Artificial Sequence: Synthetic coding sequence
  source 1..648: mol_type = other DNA
atgctcgcctgtctgtgcacggtgctgtggcatttgcccgcagtgccagccctcaataggactggagacccagggccaggaccaagtatccagaaaacttacgatttaacccggtacctagagcatcagctaagaagtctcgcaggcacatacctcaactatctgggccctcctttcaacgaacctgacttcaacccgcctcgactaggcgctgagactcttccacgcgcaactgtggaccttgaggtttggaggtcacttaacgacaagctgagactcactcaaaattacgaggcctactcacacctactgtgctacctgagaggattgaaccgacaggccgctacagccgagctgaggcgatctctcgctcatttttgtacctccctacaaggtctgctggggtcgattgcgggagtgatggcagccctggggtatcctttaccacaacctttgcctggtactgaacccacctggacccccggacccgcacattcagactttctacagaagatggatgacttctggctgcttaaggagctgcagacgtggctttggaggtcggccaaggacttcaacaggctcaaaaaaaaaatgcagccgcctgccgctgctgtgacgcttcacttaggcgcacatgggttctag

SEQ ID NO: 217088 - DNA, 1881 bp, synthetic construct
  misc_feature 1..1881: note = Description of Artificial Sequence: Synthetic coding sequence
  source 1..1881: mol_type = other DNA
atgttggcattcgccgctagaacggttgtgaaaccactgggctttctaaagccattctccttgatgaaggcatcttcccgtttcaaagctcaccaggatgctttgcctaggctccctgtgccacctctgcagcaaagtttagatcactatttgaaggcccttcagccgatcgtgtctgaagaagagtgggcccacacaaagcagctggtagacgagttccaggcctccggaggggtgggagaaaggctgcagaagggcttggaaagacgggctagaaagacggagaattggctaagtgaatggtggcttaagacagcctacctgcagtatagacagccagtggtaatctactcctcaccaggcgtaatgttacccaagcaagactttgtggatttacagggacagctgaggttcgctgccaaactcatcgaaggcgtgttggatttcaaggtgatgattgacaatgagactctacctgtggagtacctgggcggaaaaccgctttgcatgaaccaatactatcagatcttatcgtcctgccgcgtccctggccctaagcaggacacagtttctaactttagtaagacaaaaaaaccaccaactcatattaccgttgtccataactatcaattttttgagctggatgtctatcactcggacggcacccccctgacagcagaccaaattttcgtgcagctggagaaaatttggaatagcagccttcaaactaacaaggagcctgtcggtattctcacatccaaccacaggaatagctgggcaaaggcttacaatacattgattaaggataaggtgaaccgtgacagcgtgcgaagcatacaaaaatctatcttcacggtgtgcttggatgccaccatgcccagagtcagcgaagacgtctacagatcacacgtggcaggccagatgcttcacggcggaggttcaaggctaaactctggcaaccgctggttcgataagactctccagtttattgtggctgaagatgggagttgcggattggtctacgaacacgccgctgccgagggcccaccaatcgtaacactgctcgactacgtgatagaatacacaaaaaaacccgagctcgttaggagccccctagtgcccctccccatgcctaagaaactcaggttcaatatcacaccggagatcaaaagtgacatcgagaaagccaaacagaacttgtccatcatgatacaagatctggacatcaccgtgatggtgtttcaccatttcgggaaggacttcccaaaatctgagaagcttagccccgacgcttttatccagatggcgctgcagcttgcctattatcgtatttacgggcaggcatgtgcaacctacgaatctgccagcttacggatgtttcatctgggtagaactgatacaattcgctctgccagtatggactccttgacattcgtgaaagccatggacgatagctccgtgacggagcatcagaaagtggagctgctgcgtaaggcggtccaggcacacagaggctatacagatagggccatcaggggagaagcattcgaccgtcatctcctgggcctgaaacttcaagccatagaagacctggtctctatgccggatatcttcatggacacttcctacgccatagcaatgcatttccatctcagcacaagtcaagtccccgctaagacggactgtgtgatgttcttcggtccggtggtgcctgacggctacggagtctgttataacccaatggaggcccatattaatttttcactctccgcttacaacagctgtgcagaaaccaatgccgctcgtctggctcactatcttgagaaggccctcctggacatgagggcgctgttgcagagtcatcccagagctaagctctag

SEQ ID NO: 217089 - DNA, 1638 bp, synthetic construct
  misc_feature 1..1638: note = Description of Artificial Sequence: Synthetic coding sequence
  source 1..1638: mol_type = other DNA
atgttggcctttgcagctaggaccgttgtgaaacctctgggcttcctgaaaccgttcagtttgatgaaggccagttcaaggtttaaggcgcatcaggatgccctgccacggctgcccgtgcctcctctccagcagtcactggatcactaccttaaggcgctacagcccattgtcagtgaagaagagtgggcacacaccaaacaactggtagatgaattccaggctagcggcggagtgggggaacgtttgcagaagggactagagagacgcgcacgcaagacagaaaattggttgagcgagtggtggctgaaaactgcttacctccagtaccgccagcccgtggtaatttactccagtcctggggtgatgctgcctaagcaggatttcgtggacctgcaaggccagctacgattcgctgccaaactgatcgaaggtgtgctcgatttcaaagttatgatagataacgagacgctacctgtagagtacctgggcggaaagcctctttgcatgaaccaatattaccagatcctatcatcctgtagggttcccggacccaagcaggatacagtgtcaaatttctctaaaacaaaaaaaccccctacccacatcacagtggtgcacaactatcagtttttcgagctagatgtatatcactccgacggcaccccactgacagccgatcagatcttcgtacagctggagaaaatttggaactcctctcttcagactaataaggaaccagtaggcattctcacatcaaaccaccggaatagctgggctaaagcctacaacactctaatcaaggacaaagtgaacagggacagtgttcgctccatacagaaaaagaagcctgaactggtgagatctccactagtacccttacccatgccaaaaaaattacgatttaacatcacccccgaaattaaatctgatatcgagaaagcaaaacaaaatctaagtattatgatccaggacttagatatcacggtcatggtattccaccactttggcaaggacttccctaagagcgagaagttgtccccagacgcgttcattcagatggcccttcaactcgcatattatagaatttacggacaggcgtgtgctacgtacgagtcagcatcactgcgaatgttccatctcggacggaccgacacaattaggagtgccagcatggacagccttacttttgtgaaagcgatggacgattccagtgtgactgagcatcagaaagttgaactcctcagaaaagctgtgcaagcacatcggggatacaccgacagagctatacgaggagaggcctttgacaggcacctgctgggcctgaagctgcaggcaattgaagacctggtttctatgcccgatatctttatggacaccagttacgcaatcgctatgcactttcacctgtccacaagtcaggtgcccgcaaaaactgactgcgtcatgttttttggcccagtggtgcccgatggatacggggtgtgctacaaccctatggaggctcacatcaacttctcactcagcgcctacaattcctgtgccgagacaaacgcagctcggctcgcgcattacctggagaaggcactacttgacatgagggccctgttgcagtcccatccaagagccaagctttag

SEQ ID NO: 217090 - DNA, 2322 bp, synthetic construct
  misc_feature 1..2322: note = Description of Artificial Sequence: Synthetic coding sequence
  source 1..2322: mol_type = other DNA
atggcggaggctcatcaggccgtggccttccagttcaccgtcaccccagatggaattgaccttcggctttctcacgaagctctgagacagatatacttatccgggctgcatagctggaagaaaaagtttattcgcttcaaaaacgggataataaccggtgtttaccccgcaagtcccagtagctggctgatcgtggtcgtgggtgtgatgaccactatgtacgccaaaattgacccctcgcttggaataatcgccaagataaacagaaccttggagacagctaactgcatgtcatctcagaccaagaatgtcgtctctggggtgctgttcggcactggactttgggttgcactgattgtgaccatgcggtactctctgaaggtcttattaagttaccacggttggatgttcaccgagcacggaaagatgagcagggctaccaagatctggatgggcatggtaaagatttttagtggcaggaagccaatgctttacagcttccagacaagcctgccacgcttgcccgtgcctgcagttaaggatactgtaaataggtacttgcagtctgtaagacccctaatgaaagaggaagacttcaagaggatgactgccctagcccaagacttcgccgtgggcctcggccctcggcttcagtggtacctgaagctgaagagctggtgggctaccaactacgtctcggactggtgggaagaatatatctatttacggggtagggggcctctcatggtgaacagtaattactacgctatggatttgctgtatatcttgccgacgcatatacaggctgccagagccggaaatgccattcacgcaattttactttatcgtagaaaactggaccgagaagagattaaaccaattagactgctcggctctactatacctctgtgttcagctcagtgggaacgcatgttcaatacttcccgaattcctggcgaggaaaccgacacaattcagcatatgagggactctaagcacatcgtggtctaccacaggggacgctatttcaaagtgtggctgtaccacgatggaagactgctcaagccgcgtgagatggagcaacagatgcagcgaatcctagataatacttccgagccgcagcctggggaggcgagacttgccgctctcaccgcaggggatcgcgtaccatgggccagatgtagacaggcatacttcgggaggggtaagaataagcaaagcctagacgccgtggagaaggctgccttttttgttaccctggatgaaactgaggaggggtatcggtcagaagatcccgacacctctatggactcatatgcaaagtccctcctccatggaaggtgctacgatcgctggttcgataagagctttacattcgtggtttttaaaaacggcaagatgggtctgaatgctgaacactcctgggcagacgccccaattgttgcccacttgtgggagtacgttatgtctattgatagcctgcagctgggatatgctgaagatggccattgcaagggtgacataaaccctaatataccctacccaactcgattgcagtgggacatccccggagaatgccaggaagttatagagacgtcccttaacaccgcgaatttactggccaatgacgtggacttccacagcttcccgttcgtggccttcggtaaagggattatcaagaaatgtagaacttctcccgacgcatttgttcagctggcgcttcaattagcacattacaaggacatgggcaaattttgcctcacgtacgaggcttcaatgacacggctctttcgggagggccgtacagaaacagtccgttcatgtaccactgagtcttgcgacttcgtgcgagcgatggtggatccggctcagaccgtggaacagcggctgaagctcttcaaactggcttcggagaagcatcagcatatgtatcgcttagccatgaccgggtcaggaattgacagacatttattttgcctgtacgttgtcagcaaatatctggcagtggagtctcccttcctaaaagaagtgctgtcagagccatggcgtctctccacctcacagactccgcagcaacaggttgaattgttcgaccttgagaataatcccgagtatgtctcaagtggtggcggatttggtccagtggccgacgacggatatggcgtatcctacattctggttggggagaacctcataaattttcacatcagctccaagttcagctgcccagaaactgatagccatcggttcggccgtcacctgaaagaagctatgactgacattatcaccttgttcgggctgagctctaattctaaaaagtag

SEQ ID NO: 217091 - DNA, 2271 bp, synthetic construct
  misc_feature 1..2271: note = Description of Artificial Sequence: Synthetic coding sequence
  source 1..2271: mol_type = other DNA
atggcagaagctcatcaggctgtggccttccagttcacagtgacccctgatggaatagacctgcgactttctcatgaagcactcagacagatttatctctctggactccacagctggaagaaaaaattcatccggttcaagaacgggattattacaggcgtatatcctgcatccccaagtagctggcttatagtggtggtcggagtgatgacgaccatgtacgcaaaaatcgatccttcactcgggatcatcgctaaaatcaataggaccctggaaactgctaattgcatgagttcccagaccaagaatgtagtgtccggcgttctcttcggaacaggattgtgggtcgccttaattgtcacaatgagatacagcctgaaggtactattgtcctatcacggatggatgttcaccgaacacggcaaaatgagtcgtgcgacgaagatttggatgggcatggtgaaaatatttagcggcaggaagccaatgctctactcatttcagaccagtctccctcgactccccgtgcccgcagtgaaagacactgtcaacaggtacctccagtcagtgcgcccactgatgaaggaagaggactttaaaagaatgactgctctggcccaggacttcgcagttgggctgggccctcgactccagtggtaccttaaattgaaatcatggtgggcaactaactacgtgagtgactggtgggaggagtatatctacctgagggggcgaggcccacttatggtcaactctaattattatgctatggaccttttatacatactgcctacgcatatccaggcagctagggccggaaacgccatacatgcaatcctcttgtacagacggaaattggatagagaggagatcaagccgattcggctcctggggagcacaataccgttgtgcagcgcgcagtgggagcgaatgtttaatacatccagaatccccggagaagagactgacacaatccaacacatgagggattctaaacatatcgtggtctaccatcgtggcaggtacttcaaagtttggctataccacgatgggaggctgctgaagcctagagagatggagcagcagatgcagagaatcctagataacaccagcgagcctcagcccggtgaagccaggttggctgcccttacagccggagacagggtaccatgggctagatgccgccaagcatactttggaagaggtaaaaacaagcagtctctggacgctgtcgaaaaagcggctttttttgtcactctggatgagacagaggagggataccggagcgaagatccggacacctctatggactcttacgctaaaagcctgttgcatggtcggtgttacgaccgttggttcgacaagagtttcacgttcgtggtctttaagaacgggaagatgggacttaatgctgagcactcatgggcagacgctccaatagtggcccatctgtgggagtacgttatgtcgattgactccctccagctgggctacgctgaggacggacactgtaagggggatattaacccaaatatcccatatcccacccggctgcaatgggatattcctggggagtgccaggaggttattgagacttccttgaacacggcaaacctgctggcgaacgatgtagatttccattctttccctttcgtcgcttttggaaaagggatcattaaaaaatgtcgcacttctccagatgcatttgtccagctggcattgcagctagcccactataaagacatgggcaaattctgtctgacatatgaggccagtatgacacgcctttttcgggaggggcgaaccgagacggtgaggtcatgtactacagaaagctgcgatttcgtgagagccatggtggatcctgctcagacagttgaacagcgcctaaaattgttcaaactggcgagcgagaaacaccaacatatgtatcggctagctatgaccgggtcaggtatagaccggcacctgttttgtctttacgtggtgtccaagtacctcgctgtagagtctccatttctgaaagaggtcctctccgaaccgtggcgcctgagtacttcacagactccacagcagcaggttgagttgttcgatctggaaaataacccggagtatgtatctagcggcggagggttcggacccgtggccgacgacgggtatggcgtgagctacatcctggttggggagaatctcatcaactttcatataagcagtaagttttcttgcccagagactgggatcatttcacagggaccttcatctgatacatag

SEQ ID NO: 217092 - DNA, 2322 bp, synthetic construct
  misc_feature 1..2322: note = Description of Artificial Sequence: Synthetic coding sequence
  source 1..2322: mol_type = other DNA
atggcagaagcgcaccaggccgtggcctttcaattcactgtgacgcctgatggaatcgatctccggttaagtcacgaggcactgagacagatatatctgagtgggctccattcatggaagaaaaagtttatccggttcaagaacgggatcattactggagtatatccggctagcccttcctcatggctaatcgtggttgtgggtgtgatgacaaccatgtatgcaaagattgacccttcactgggtattatcgccaaaattaatcggacgctggagacggctaattgtatgtcctcacaaacgaagaacgtggtcagtggagtactgttcggaaccggcctgtgggttgccctgattgtcactatgaggtacagcttaaaagtactgctgtcctatcacggttggatgttcacagagcatgggaagatgagcagagccactaaaatctggatggggatggtcaaaatcttttctggtagaaaacccatgctctacagtttccaaacaagtctgcctcgactgcctgtgcccgcagttaaagataccgtgaaccgctacttgcagtcagttcgcccactgatgaaagaggaagatttcaagcggatgaccgcactggcccaagacttcgcagtgggactcggccctagacttcaatggtacttgaagctcaagtcgtggtgggcaactaattacgtgagtgactggtgggaggagtacatttatctgcgcggaagaggcccactgatggttaacagtaattactacgcaatggacctgctgtatatacttcccactcacattcaagcggctagggctggaaatgcgattcatgcaattctgttgtatcgcagaaaacttgatagagaagagataaagccaatccggctgctcggcagtacaattcccctctgctctgcacagtgggagcgtatgttcaacactagtaggatcccaggagaagagacagataccatccagcacatgcgggactccaaacacatcgtggtctatcacaggggcaggtactttaaagtctggttgtaccacgatggcagactcctgaaacctcgggagatggagcagcagatgcagaggatcctggacaatacatctgagccacaacctggcgaagcgaggctcgccgctttgacagctggggatagggtaccttgggccagatgccgccaggcatattttggcagaggaaagaacaaacaaagcctggatgctgtcgagaaggctgcctttttcgtgacactggatgaaacggaggaaggttatagaagtgaagaccctgatacttccatggactcgtacgccaagtccctgttgcatggacggtgctatgatagatggttcgataagagtttcacattcgtggtctttaagaacggcaagatgggactgaacgcagagcacagttgggccgacgctcctatagttgcgcacctgtgggaatacgtaatgtccatcgacagcctgcagttgggctatgccgaggacggccactgtaaaggagatattaatcccaatatcccatacccaacacgcttacaatgggacatccctggagaatgtcaagaggtgattgagacttctctgaacacagcaaacctactggccaacgatgtggacttccactccttcccatttgtggcctttgggaaggggatcatcaaaaagtgcaggacttcacccgatgcctttgtccagttggctctgcaactcgcacactacaaagatatgggcaagttttgtctgacatacgaggccagcatgacccgtttatttcgcgagggtaggacagaaacggtacgctcatgtactaccgagagctgcgacttcgtgcgcgcaatggtggatccggcacagacagttgaacaacggctgaaacttttcaaactagcctccgagaaacaccagcacatgtataggctcgcaatgacgggctccggaatagaccgtcatctgttctgcctgtatgtagtttccaaatatctggccgtagagtctccttttctgaaggaagtgctgagcgagccctggagactgtctacttcgcagactccacaacagcaggtagaactttttgaccttgaaaacaaccccgagtacgtgagctcaggcggaggctttggacccgtagccgatgatggctacggggtatcctatatcctcgtgggggaaaatctgataaatttccatattagcagtaagtttagctgccccgaaacagactcccacagatttgggaggcacctcaaagaagctatgacagacataatcaccttatttggactttcgagcaatagcaaaaagtag

SEQ ID NO: 217093 - DNA, 2322 bp, synthetic construct
  misc_feature 1..2322: note = Description of Artificial Sequence: Synthetic coding sequence
  source 1..2322: mol_type = other DNA
atggccgaggctcaccaagctgttgcctttcagtttacagtgacccctgacggcatcgatttgcgattgtctcatgaggccctgcggcagatctacctcagcggactccacagttggaagaaaaagtttatccggtttaaaaatggaatcataactggagtgtaccctgccagcccatcaagctggctcatcgtggtcgttggcgtaatgactacaatgtacgctaagattgacccatctctgggcataatcgccaagattaaccgcactctagaaactgccaattgtatgtcctcgcagactaaaaacgtcgtgtcaggagtattgttcggcactggactgtgggttgccctcattgtcacgatgagatattccctcaaagtgctgctgagttaccatggatggatgtttacagaacacgggaaaatgtcaagagcaacaaaaatctggatgggtatggttaagattttctcagggagaaagcctatgctgtactctttccagacaagcctgcccagactgccagtccctgccgtgaaagacactgtgaatcgctaccttcaatccgtccgccctctcatgaaggaggaagattttaagagaatgaccgcgttggctcaggatttcgccgtggggcttggacccaggttgcagtggtacctcaagctcaaatcgtggtgggccacaaattacgtatccgattggtgggaggaatatatttacctgcgtggtcgcggaccactaatggtgaactcaaattactacgcaatggacctattgtacatcctacctacccacattcaggccgctcgggctgggaacgccatccacgccatccttctctataggagaaaattggaccgagaagagattaaacccatccggcttcttgggtccacgattcctctttgctcagcacagtgggaaagaatgtttaatacaagccggattcctggcgaggagacggatactatccaacacatgagggatagtaagcacatcgttgtataccatcggggacggtattttaaggtatggctttatcatgatggtcggcttcttaagccaagggagatggagcagcagatgcagcgaatcctggacaatactagtgaacctcagccaggggaggcacgcctcgccgcacttacagcaggagacagagtgccttgggctaggtgccgacaggcctacttcgggaggggaaaaaataaacaaagtctagacgccgtcgagaaggccgctttcttcgtcaccttggatgagactgaagaaggttaccgtagcgaagaccctgacaccagtatggactcatatgccaagtccctcctgcacgggaggtgctatgaccgctggtttgataaaagcttcacattcgttgtgtttaaaaacgggaaaatgggtcttaatgcagagcactcttgggccgatgctcctatagtggcacacttatgggaatatgttatgtcgatagatagtctgcaactgggatatgcagaggacgggcattgcaaaggggatattaaccctaatatcccctaccccactcggctgcagtgggatatccccggtgagtgtcaggaggtcattgaaaccagcctaaacactgctaacctgttggccaacgatgtggacttccacagcttccccttcgtagcatttggaaagggcatcatcaagaagtgcagaacctcccccgacgctttcgtgcaactggcacttcaactcgctcactacaaggatatgggaaagttctgtttgacgtatgaggcctcgatgactcgattatttcgcgaggggaggacggaaacagtgaggtcgtgcacaaccgagtcatgtgattttgtgcgagctatggtcgatcctgcccagactgtggagcagagactaaagctgtttaagctggcgagcgagaagcaccaacatatgtatagactcgcaatgacaggcagcggcatagaccggcacctgttctgtttgtatgtcgtttccaagtatctcgctgtggagtctcctttcttaaaggaggtgctgtcagaaccctggcgactgtctacatcccagacccctcagcagcaggtggagctgttcgacttggagaataaccccgagtacgttagtagcggagggggatttggccctgtggctgacgatgggtacggagtgtcatacatcctagtgggggaaaatctgatcaactttcacatttcaagcaagttttcctgtcctgaaacagactctcataggtttggcagacacctgaaagaagccatgaccgacatcattacgctgttcggcctcagcagtaattccaagaaatag

SEQ ID NO: 217094 - DNA, 2271 bp, synthetic construct
  misc_feature 1..2271: note = Description of Artificial Sequence: Synthetic coding sequence
  source 1..2271: mol_type = other DNA
atggccgaggctcatcaagccgtggcatttcagtttaccgttacaccagacggcattgacctcagactgtcacacgaagctcttcggcagatatatttgtcggggctgcacagctggaagaaaaagttcattcggtttaagaatggcatcatcactggggtgtatcccgcttctccatctagttggcttattgtggtcgttggtgtgatgacaaccatgtatgccaagatcgaccccagtcttggaatcatcgccaagatcaatcgtaccctggagacagcaaattgtatgtcctcacagacgaaaaacgtggtgagcggagtcttgttcgggacgggactctgggtggcgctgattgtgacaatgcgctactcattaaaagtgcttctgagctaccacggatggatgttcacagaacatggaaagatgagccgagctaccaaaatttggatgggcatggtgaagattttctcaggaagaaagcccatgttgtatagttttcagacctctctgcccagactgcctgttccagccgtaaaagacaccgttaatcgctatctgcagtccgtaaggcccctgatgaaggaagaggacttcaagcgtatgacagccctggcacaggacttcgctgttggacttggccctagactccagtggtacctgaaattaaaatcctggtgggctacgaattacgtgagcgactggtgggaagagtatatctatctgagaggaagagggccactgatggtcaacagtaattattacgcaatggatcttctgtatatccttcccacgcacatccaggcagcacgggcaggtaatgccattcacgccattttgctctatagacggaaactcgatagagaggaaatcaaacccatacgactgctgggctctaccatccctctatgttcagcccagtgggagcgtatgtttaacactagccgcattccaggcgaggaaaccgacaccattcaacatatgagagactctaagcatattgtagtgtaccaccggggtcgctacttcaaagtgtggttgtatcacgacggacgcctcctgaaacctagggagatggagcagcagatgcagcgtatcctggacaacacgagcgaaccccaacctggggaggcaaggctcgctgctcttacagcaggtgacagggtgccgtgggctagatgtaggcaggcttattttggtcgcggtaaaaataaacagtcattggacgctgttgagaaagccgctttttttgtgaccctcgacgaaacggaggaaggctatcgctcagaggatcctgacacgagcatggatagttacgctaaatccttactccacggcaggtgctacgataggtggtttgacaagtcattcacctttgtggtgttcaagaatggaaagatgggtctgaacgctgagcactcgtgggcagatgctcctatcgtcgctcacctctgggagtacgttatgagtatagatagcctgcagctggggtacgcagaggacggccactgtaaaggtgacattaaccccaatattccctatcctaccaggttgcagtgggacatccccggagagtgccaagaagtaattgagaccagcctgaacacagctaacttattagcaaatgatgttgattttcactcctttccctttgtggcttttggcaaagggattattaagaagtgcagaacttctccagatgcattcgtgcaactggcactgcagctggctcattacaaagatatggggaagttctgtcttacttacgaggcatcgatgactcgcctcttcagagagggaagaaccgagacagtgagatcatgcaccacagagagctgcgattttgtacgtgcgatggtggatccagcacaaacggtcgagcagagactgaagttgttcaaactcgctagcgaaaaacatcaacacatgtatcgcctggcaatgaccgggagtgggatcgatcggcatctgttctgcctgtacgtggtgagcaagtatctggcagtggaaagcccttttctgaaggaggtccttagcgaaccctggcggctgtcaacatcccaaaccccacaacaacaggtcgagctgtttgatcttgagaataacccggagtacgtgtccagcgggggagggtttggccctgtcgcggacgacggttatggggtttcctatatcttagtcggggagaatctcattaacttccacatttcatcaaagttcagttgtcctgagacaggaattattagccagggaccctccagtgacacctag

SEQ ID NO: 217095 - DNA, 2319 bp, synthetic construct
  misc_feature 1..2319: note = Description of Artificial Sequence: Synthetic coding sequence
  source 1..2319: mol_type = other DNA
atggctgaggcccatcaagctgtcgctttccagttcactgttacacccgacggggtcgattttcggctgagccgcgaggcccttaagcatgtttatctcagtggcatcaacagctggaagaagagattgatcaggatcaagaacggcatcctcagaggagtgtaccccggaagtccaacatcttggcttgtcgtcatcatggcaaccgtgggatcttccttttgcaacgtggatatctctctcgggcttgtaagttgtatccagagatgtctgccacagggttgcgggccatatcagactccccagactcgggcactgctgtcaatggctatcttctctaccggagtctgggtcacaggcatcttttttttcagacagactcttaagctgctgttgtgttatcatggctggatgtttgagatgcacgggaaaacttccaacctgacacgaatctgggcgatgtgcatcagattactgagctccagacaccccatgttgtacagcttccaaaccagtctgccgaaattgcctgttcctcgcgttagcgcgactattcagcgctacctggagtcagtgagaccgttactggacgacgaagagtactaccgcatggaattacttgcgaaggaattccaggataagacagctcccaggttgcagaagtatctcgtgctaaaaagctggtgggccagcaactacgtttcagattggtgggaggagtacatctacctgcgcggacgttccccgctgatggttaactcaaattattacgttatggatctggtgctgattaaaaacacagacgtccaggcagctagactgggcaatatcatacacgctatgatcatgtatcgtcgcaagctggatagggaagaaattaagcctgtgatggctctgggtattgtgccaatgtgttcctatcaaatggaacgcatgtttaacacaacccggattcctggcaaagatacagatgtattacagcacctttccgactctcgacacgtagcagtataccataaagggaggttctttaaactgtggctttacgaaggcgcacgtctcctgaagccacaggacctcgaaatgcaattccagcggatcttggacgacccatccccaccccagcccggtgaggaaaaattagccgctctgacagcaggcggtcgagttgagtgggcccaggcacggcaggctttcttttcctcggggaagaacaaagcagcattggaggccatcgagagagcagctttctttgtggcattggatgaggaaagctattcatatgacccagaggacgaggcttctctgtctctgtatgggaaagccctcctgcatgggaactgctataataggtggttcgataaatccttcacactcatctcctttaagaacggacaactgggattaaatgcagaacacgcctgggccgacgccccaatcatcggacatttatgggagttcgtgctcggtactgattcattccacctgggctacacagaaactggtcattgtctgggtaagcctaaccccgctctcgcccctccgacccgtctccaatgggatattcctaagcagtgtcaagccgtgatagaatcctcgtaccaggtcgccaaagctctcgccgacgatgttgaactctattgctttcagtttctgcccttcggcaaagggctgattaagaagtgcagaacttccccagacgcgttcgtgcaaatcgcgctgcagctggcacatttccgcgatagaggcaagttttgccttacatatgaggcgtcaatgacccggatgttccgggagggaagaaccgaaacagttagatcctgtacatccgagtccacagcattcgtccaggctatgatggagggtagccatacaaaggccgatctaagagatctctttcagaaagccgcaaagaaacatcagaacatgtatcgcttggccatgacaggggcaggcattgaccgacacctattttgcctttacttggtctctaagtatttaggtgtttcatcccccttcctcgcagaggtcctgagcgagccatggcgcctgagcacttcccaaatccctcagagtcagattagaatgtttgacccagagcagcacccgaaccacctaggcgcaggtgggggttttggacctgtggctgacgatggctacggcgtctcatatatgatcgcaggcgagaacacaatcttttttcacatctcttctaagttctcatcttccgaaacaaacgcacagagattcgggaaccacattcgcaaggctctgctggacatcgcagatttgtttcaggtgcctaaagcctacagctag

SEQ ID NO: 217096 - DNA, 2319 bp, synthetic construct
  misc_feature 1..2319: note = Description of Artificial Sequence: Synthetic coding sequence
  source 1..2319: mol_type = other DNA
atggcagaagcccatcaggcagttgcatttcagtttacggtgacaccggacggagttgatttcagattaagccgggaggccctgaaacacgtttacctgagtggcattaacagttggaagaagcggctgatacggattaaaaacggcatcctgcgcggtgtgtatcccggatcccctacctcttggctggtcgtcattatggcaactgtgggaagttcattttgcaatgtggatatctcattgggcttagtttcatgtatccagcggtgtttaccccaaggatgcggtccatatcagacgcctcagacccgtgctctcctgagcatggccatcttttcaactggcgtttgggtcacaggcatctttttctttcggcagacactcaagctgcttttgtgctaccacgggtggatgtttgagatgcatggaaagacgagtaatctcacccgcatctgggctatgtgcatccgcctcttgagctccagacatcccatgttgtactctttccagacaagcctgcctaaattgcccgtgcccagggtcagtgcaacaattcagaggtatttagagtctgtgcggcctctgctggatgatgaggagtactaccgaatggagcttctcgccaaggagtttcaggacaaaaccgcacccagactccagaagtacttagtacttaaatcttggtgggctagtaattacgtgtcagattggtgggaagagtatatctatttgcgcggacggtctccactgatggtgaattcaaattactacgtcatggatttggtgctgatcaagaacactgatgtacaagctgccaggcttggcaacattattcacgctatgatcatgtacaggcgtaaactggatagagaagagattaagccggtcatggccctagggatagtgccaatgtgttcttaccagatggaaaggatgtttaatactacaagaatacctggaaaagatactgatgttttgcagcatttaagcgactcacgacacgtagcagtataccacaagggcaggttctttaaactgtggttgtacgaaggagccagactactgaaaccccaggacctggagatgcagttccagcgcatcttggacgacccaagtccacctcagccaggcgaggagaaactggctgcactgactgccggtgggagagtagaatgggcccaagcccgacaggcatttttctcctctggcaaaaataaagccgcactggaagcgatcgagcgtgcggctttttttgttgccctggacgaagaatcttactcctacgaccccgaagacgaggctagtctatcgctctacggcaaagctctgctgcatggtaactgctacaacagatggttcgacaaatccttcacactcattagcttcaaaaacggacagctcggtttgaacgctgagcacgcctgggcggatgccccaatcattgggcatctctgggagttcgtgctgggaacggattctttccatctcggctatacggaaaccggccactgccttggcaaacctaacccggcactggcccctcctacgcgactgcagtgggatattcccaagcagtgtcaagccgtaatagaatccagctaccaagtggccaaggcacttgccgacgatgtggagctatattgtttccaattcctcccttttggcaaaggcttgatcaaaaaatgtcgaaccagccctgacgcattcgtgcagatcgcactacagcttgcccattttagagacagggggaagttttgcttaacgtatgaggcatccatgacacgcatgtttcgcgaggggaggaccgaaacagtgcgctcgtgcacaagtgaaagcacagcgtttgtccaagcaatgatggaaggctcccatacaaaggctgacctgcgagacctgtttcagaaggcagcaaaaaaacatcagaacatgtatcgcctggctatgacaggagctggcattgacagacatctgttttgtttgtacttggtttctaagtatttgggcgtttcctctccctttcttgccgaggtgttatccgaaccttggcgcctgagcacatcccagataccacaatctcagatccggatgttcgacccagagcaacatcctaatcatcttggcgctgggggaggatttggacccgtggcggacgatgggtatggtgttagctatatgattgctggcgagaacaccatttttttccacatctcatccaaattcagcagctccgaaactaatgcccaacggttcgggaatcacatccgcaaggcattgttagacatcgcagacttattccaggttcctaaggcctacagctag

SEQ ID NO: 217097 - DNA, 2319 bp, synthetic construct
  misc_feature 1..2319: note = Description of Artificial Sequence: Synthetic coding sequence
  source 1..2319: mol_type = other DNA
atggccgaggctcaccaagctgtggctttccaattcaccgtgaccccagacggcgtggattttcgtctttcaagggaagcattgaagcatgtctacctgtctggcatcaacagctggaagaaacgcctcattcgcataaaaaatggtatactgagaggcgtgtaccctgggagccctacaagctggctggtcgtgatcatggctaccgtgggctcctctttttgcaatgtcgatatctccttaggactggtatcctgcatccaacgatgccttccacagggctgcggaccctaccagacacctcagaccagggcactactctccatggcgatcttctcaactggagtgtgggtaactggtattttcttttttagacaaaccttgaagctcctgctgtgctaccacggatggatgtttgagatgcacggaaagactagtaacctgacgcgcatatgggccatgtgcattcgcttacttagctccagacatcccatgctctatagtttccagacttccctgcctaagttgccggtccctcgcgtgtctgccactatccaacgctacctcgagagcgtgcggcctctgttagacgacgaagagtattatcggatggaactgctcgccaaggaattccaggacaagacagccccacggctgcagaagtacctcgtcctgaaatcctggtgggcctccaattatgtctctgactggtgggaagagtatatttatctgcgagggcgaagccctctgatggtcaattcgaactactacgtgatggatctggttctgatcaagaacacagatgtgcaagctgcaaggttgggcaacatcatccacgctatgatcatgtaccgcagaaagttagatagagaggaaattaagcctgtcatggcactgggaatcgttcccatgtgctcttatcaaatggagagaatgtttaatacaactcgaattccaggcaaagatacggacgtgctccaacatctgtctgattccaggcatgtggcagtctaccataaagggagattcttcaagttgtggctctacgagggagccaggctgctgaaaccccaggacctagagatgcaatttcagaggattctggatgacccttcgccccctcagccaggcgaggagaagcttgctgccttgacagcgggtggcagggtggagtgggcccaggccaggcaagcctttttcagttcgggcaaaaacaaggcagcgcttgaggccatcgagagggctgcctttttcgttgcacttgatgaagaatcatattcttacgaccctgaggacgaggcctccttgtctctctatggcaaagccttgcttcatggcaattgttacaatcgttggttcgataaatcctttactcttatatcattcaaaaacggacaactgggtctcaacgccgagcacgcgtgggccgatgcccctattattggccatctgtgggagttcgtgctgggtaccgattcctttcacctgggatacaccgagaccggccactgtctcggcaagccaaacccagcgctcgccccaccgacgcggctgcagtgggacattcccaagcagtgccaggccgtgatcgaatcaagctaccaggtcgctaaggctttggccgacgacgtcgagctgtattgctttcagtttctgcctttcggcaaggggttaataaaaaagtgccgaacgtcccccgacgcgtttgtgcagatcgcattgcagcttgcccacttcagggaccgaggaaagttctgtctgacctacgaagctagtatgacacgcatgttccgcgagggcagaacggaaactgttaggagctgcacaagcgagtctacagcgtttgtgcaggccatgatggagggcagccatacaaaggccgatcttcgggatctctttcagaaagctgccaagaaacaccagaatatgtaccggctggctatgacaggggctggcatcgaccgccatctgttttgtctttacttggtgtcaaaataccttggggtcagctcaccttttttagccgaggtactgtcagagccatggagactgtctacttcacaaatcccacagtctcagattcggatgtttgatcccgaacagcatcccaatcatctgggtgccggtggtgggttcgggcctgtggccgacgacggctacggtgtttcctacatgattgctggagagaacaccattttctttcacatttcctctaagttcagctcctcagaaactaacgcccagcgattcggcaaccacatcaggaaggccctcttggacattgccgacctcttccaggtgccaaaggcctacagctag

SEQ ID NO: 217098 - DNA, 2319 bp, synthetic construct
  misc_feature 1..2319: note = Description of Artificial Sequence: Synthetic coding sequence
  source 1..2319: mol_type = other DNA
atggcagaagcccaccaagctgttgcctttcaatttacagtaactcctgacggggtggatttcagactgagtcgagaagccctgaagcatgtatacctgtcaggaatcaatagctggaaaaaaagactcatcagaatcaaaaatgggatcctgcggggagtttatccgggatccccaacgtcttggctcgttgtgattatggccacagtcggatcatcattttgtaacgtggacattagcctagggctcgtgagttgtatccaacgctgccttccgcagggatgcggcccataccaaactcctcagactagagcccttctctccatggccatcttttcgacaggagtatgggtaacaggtattttcttcttcaggcagacgctgaaattgctactctgttaccatgggtggatgttcgaaatgcacggcaagacgagtaatctgacacggatctgggcaatgtgcattcggctactgagttcacggcatcccatgctgtattcctttcaaacaagtcttcctaagctaccggtgccgagggtttccgccacaatccagcggtacctggagtcagtgcggccacttcttgacgacgaagagtactatcgcatggaactgctagccaaagagtttcaggataagactgctccacgattacagaaatatctcgtgcttaaaagctggtgggctagcaactatgtatccgattggtgggaggaatatatctacttgcgcggaaggtcacctttaatggttaacagtaattactacgtgatggatctggtgttaatcaaaaatactgacgtgcaggccgctagactgggtaacattattcacgccatgatcatgtacaggcgtaagctggacagagaagaaattaagcccgtgatggccctggggattgtgcccatgtgctcatatcagatggagcgaatgtttaatacgaccaggatcccaggtaaagacactgacgtcctgcaacacctgagtgatagccgccacgtggctgtgtatcacaaaggaagattctttaaactgtggctctacgaaggggctcggcttttaaagcctcaagacctcgagatgcagtttcagcgcatcctggacgacccaagccctccccagcctggagaggagaagcttgctgccttgactgccggaggtcgcgtggaatgggcgcaggcacggcaggccttcttctcatctggtaaaaataaagctgcattagaagctattgagcgggcagccttcttcgttgcattggatgaggagtcatacagttacgatcccgaggatgaagcaagcctgagtctctatgggaaagctcttctgcacgggaattgttacaaccggtggttcgacaaaagcttcacactgatcagctttaagaacggccagctgggccttaatgcggaacatgcttgggcggacgcacctattatcggacacttatgggagttcgtgctggggaccgattcctttcaccttggttacaccgaaaccggacattgtctgggcaagcctaacccggctctcgctcctcctactagattgcaatgggacattcccaagcagtgccaggcagtgatcgaatcatcataccaagtggctaaggcactggctgatgatgtagagctttattgttttcagttcttgcccttcgggaagggcctcattaagaagtgtagaacttccccagacgcattcgtgcagatcgccctccagctagcacacttccgggaccgcggtaaattttgtctgacctatgaagcttctatgacacgaatgttcagagaaggtaggactgagacagtaagatcgtgtacaagcgaaagcacggcctttgtacaggcaatgatggaggggtctcatactaaagcagatctgagagaccttttccagaaagcagccaagaaacaccagaacatgtatcgattggctatgactggggcaggcattgacagacacctattctgtctgtatttggtgagtaagtatctcggggtatcatctcccttcctggctgaggtgctgtcagagccctggcgtctttccactagtcagatccctcaaagtcagatacgtatgttcgatcccgagcagcaccccaaccatctgggagctggtggtggttttggacccgttgccgacgacggttacggagtgtcctacatgatcgctggggaaaataccatcttctttcacatttccagtaagttctccagctccgagaccaacgctcagagatttggtaatcacatcagaaaagccctactcgatatcgctgacctcttccaggtgcctaaggcatacagttag

SEQ ID NO: 217099 - DNA, 378 bp, synthetic construct
  misc_feature 1..378: note = Description of Artificial Sequence: Synthetic coding sequence
  source 1..378: mol_type = other DNA
atggcggaagcccatcaggccgtggctttccagttcactgttacgccagacggagtagactttcggctgtcacgtgaggctctgaagcacgtgtacctgtccggaatcaactcctggaagaagaggctcatcaggatcaaaaatggaatcttaaggggtgtgtaccctgggtctccaacctcatggctcgtggtcattatggccaccgtgggaagctctttctgtaacgtcgatataagtctgggtctggtaagttgcatccagcggtgtctcccgcaaggttgtggtccttaccagactccgcagactcgtgccctgctcagtatggccatcttcagtacaggtgtgtgggtcacaggtatttttttctttcggtag

SEQ ID NO: 217100 - DNA, 1704 bp, synthetic construct
  misc_feature 1..1704: note = Description of Artificial Sequence: Synthetic coding sequence
  source 1..1704: mol_type = other DNA
atggaacttctggctaaagaatttcaagataagaccgcccctcgtctgcagaagtacctcgtgttgaaatcctggtgggcgagcaattacgtcagcgattggtgggaggagtatatctaccttaggggaaggtctcccctgatggtcaattccaattattacgtgatggaccttgtcttgatcaaaaacaccgatgtccaggccgctcgtctgggcaacattattcatgcgatgataatgtaccgccgtaaactcgacagggaggaaatcaagcctgttatggccctggggatcgtcccaatgtgcagttatcaaatggaacgcatgtttaataccacccgtatcccaggcaaagataccgatgtcctacagcatctctctgattctagacatgtcgctgtctatcacaagggacgcttcttcaagttgtggctctatgaaggcgctaggctgttgaaaccccaggatctggaaatgcagtttcagcgtattctggacgacccttctccaccccaaccgggagaggagaagctggccgctctgacggctggaggaagggttgagtgggcccaagccaggcaggccttttttagttccggcaagaacaaagccgcacttgaggcaattgagcgcgctgcattctttgttgctctagacgaggaaagttattcctacgatccagaggacgaggcctccctgagtctctatggaaaggccctcttacacgggaactgttataacaggtggtttgacaagtcttttacccttattagcttcaagaacggccaattgggcctgaatgccgagcatgcctgggcggatgctccaattataggccacctgtgggagtttgtactagggacagatagctttcatctcgggtatacagaaacaggccactgcctggggaaacctaatccagccctagcccctcctacccggttgcaatgggacattccaaagcaagccgtaattgaatcttcttatcaagtcgccaaagccctggcagatgacgtggaactgtattgttttcagtttctgccattcggaaagggcttgatcaagaagtgtcgaacaagtcccgatgccttcgtgcagatagcattgcagctggctcatttcagagataggggaaagttctgtctcacttacgaggcctcaatgacaaggatgttcagggagggtcgtaccgagaccgttcggtcttgtacgagtgaaagtaccgcattcgtccaggccatgatggagggaagccatacaaaggctgacctgagggacttgtttcagaaagccgctaagaaacaccagaatatgtatcgcctggcaatgactggggcaggcatcgacagacatctgttttgtctgtatcttgtgtctaaatatttgggggtttcttctcctttcctcgccgaagtgctaagcgagccttggcgcttgagtacatcccagattccgcagtctcagatacgcatgtttgatccggaacagcaccccaaccatctcggagctggtgggggtttcgggcctgtcgcagacgatggttatggggtgtcctacatgattgctggtgagaatacaatcttttttcacattagctcaaagttttcatccagcgagaccaatgcacaacggttcggaaatcatattaggaaagccctccttgacattgccgatctgttccaagtgcccaaagcctactcatag

SEQ ID NO: 217101 - DNA, 2076 bp, synthetic construct
  misc_feature 1..2076: note = Description of Artificial Sequence: Synthetic coding sequence
  source 1..2076: mol_type = other DNA
atggctgaggcccaccaggccgttgccttccagtttaccgtgactcctgacggcgtggatttcagactgtccagggaggctttgaagcatgtgtatctgtctgggattaacagctggaagaagcgcttgatacgcataaagaacggtattctgcgcggagtctaccctggatccccaacatcatggctggtggtgatcatggcgactgtgggcagctccttctgtaatgtcgatatcagcttggggttggtgagctgcattcagagatgtctacctcaggggtgtggaccgtaccagactccgcaaacccgagcactattatccatggccatatttagtaccggagtttgggttacgggcatcttcttctttaggcagacgctcaagttgctgctgtgctatcacggctggatgtttgaaatgcacggaaaaacttccaacctgacccgcatctgggccatgtgcatccgcctcctcagcagtcgccacccaatgctgtattcatttcagacttcgttgccaaagctgccagtgcctcgggtgtctgctacgatacaacgatatcttgagtccgtgcggccactgttagacgatgaggagtactacagaatggagctgctcgcaaaagaattccaagacaagaccgcccctcgcctgcagaagtatctggtactcaagtcctggtgggccagtaattatgtatcagattggtgggaggagtacatttacctgaggggtcgcagcccgctcatggtgaacagtaattactacgtcatggacctcgtgctgattaagaacaccgatgttcaggctgcaaggctggggaatataattcatgcaatgattatgtacagacgcaagcttgaccgcgaggaaattaaacctgtaatggccctgggcatcgtacctatgtgctcctatcagatggagcggatgttcaatacaacaagaatcccgggaaaagataccgacgtgctgcaacacctttcggattcccgccacgtggcggtgtaccacaagggaaggttttttaagctatggctgtatgaaggtgctaggctcttgtcactgtatggcaaagcgctgctgcacggaaactgttacaacagatggtttgacaaatcattcaccctgatttcttttaagaacggtcagctcggtctgaatgccgaacatgcttgggctgacgctcctattattggtcacctctgggagttcgtgttgggtactgactcatttcacctgggatacactgagaccggtcattgtctgggtaaaccaaacccggctctagcccctcctacaagactgcagtgggacatcccgaagcagtgtcaagcagtcatagaatcatcctatcaggtggcgaaggctcttgcagatgatgtcgagctatattgctttcagtttctccccttcggtaagggactgataaaaaaatgcagaaccagtccagacgcgttcgtgcagattgcattgcagctcgcgcacttcagggaccgcggaaaattctgtcttacttatgaggcctctatgactaggatgtttcgagagggacgaaccgagacggtacgtagctgtaccagcgagagtacagcatttgttcaagccatgatggagggatctcacacaaaggctgacctgagggatctgttccagaaagctgcgaagaagcaccagaatatgtatcgactcgcgatgactggagccggaattgatcgccatctattttgcctctaccttgtgagtaaatatctgggcgtcagttctccctttctcgccgaggtcctttctgaaccttggagattgagtaccagtcagatcccgcagtctcaaattaggatgttcgatcccgagcagcatccgaaccatctgggcgcagggggagggtttgggcctgtggccgacgacggttacggtgtgtcttacatgattgcaggcgaaaacaccattttcttccacatatcttctaagttttcaagcagcgagacaaacgctcagaggtttggcaaccatatccgaaaggcactgctcgatatcgcggacctgtttcaggtcccaaaggcatacagttag

SEQ ID NO: 217102 - DNA, 2217 bp, synthetic construct
  misc_feature 1..2217: note = Description of Artificial Sequence: Synthetic coding sequence
  source 1..2217: mol_type = other DNA
atggccgaagcccatcaggcggtagcctttcagtttaccgtaaccccagatggtgtagacttccggttatcccgggaagccttgaagcatgtgtacctgtctggcattaacagctggaaaaaaagactgattcgcattaaaaatggaatcttgcgcggagtttaccccggtagccctactagctggttggtggtcattatggcaactgtaggttcttctttctgcaatgttgacatcagcctaggcttggtgtcctgtatccagcgctgccttccccagggatgtggtccttatcaaacgccccaaactcgggcactgttatcaatggccatctttagtacgggagtttgggtgaccgggatatttttcttcagacagactctgaagttactcttgtgctaccatggttggatgttcgagatgcacgggaagacgagcaatctgactcgtatttgggcctacctagagagcgtgcgcccactgctggatgacgaagagtactaccgcatggagctactggccaaggagttccaggataagacagcacctcgtctgcagaagtatctcgtactgaaatcatggtgggccagtaattatgtctcagattggtgggaggagtatatttacctcagaggtcgatctccgctcatggtgaattctaattactacgtcatggatctggtgcttattaagaatactgatgtgcaggcagctaggttgggaaacattattcacgccatgatcatgtaccggcgaaagctggatcgtgaagaaattaagcccgttatggcgttaggcattgtgccaatgtgtagctaccagatggagcgcatgttcaacaccacccgcattcccggtaaggataccgacgtccttcaacacctttccgacagcaggcacgtggctgtgtatcacaagggaaggttttttaagctgtggctatatgaaggggctagactccttaagccgcaggacttagaaatgcaatttcagcggatattggatgaccccagtccgccacagcctggggaggaaaagctggccgcattgactgccggaggaagggtcgagtgggcgcaagccaggcaggcatttttcagttcggggaagaacaaggccgcactggaggcgattgaacgtgcggcattttttgtggctctcgatgaagagagttactcttacgacccagaggatgaggcatcactgtccctatacggcaaagccctcctgcatggtaattgttataaccggtggttcgataagtcttttacactgattagttttaagaacggtcagttaggcttgaacgcagagcatgcatgggccgacgctccgattattgggcatctctgggagttcgttctggggacagacagctttcacttaggctatacagagacagggcactgtctcggcaaacccaatcctgcactggcacctcctacgagactacagtgggatattcccaagcagtgccaagccgttatcgagtcttcctaccaggttgccaaagccttggctgatgacgtcgaactgtattgctttcaattccttccctttgggaaaggactcatcaagaaatgtaggacaagcccagacgcatttgttcaaatagctctacagctggcacacttccgggacagaggaaagttttgtttaacttatgaggccagcatgacacgcatgttccgagagggccgaaccgagacagttcgttcatgtacatcagagagcactgccttcgtccaggcgatgatggagggcagtcataccaaagcagatctgcgcgatctgtttcagaaagctgccaaaaaacaccagaatatgtacagactggccatgacaggagctgggatcgacaggcatttgttctgcctgtacctggtgagtaagtatttaggtgtatcttcacctttccttgccgaagttttgagtgagccttggcgtctgagcacatcccaaattccccagagtcagattcgcatgttcgaccccgagcagcacccaaaccatcttggcgcagggggaggctttggcccagtggccgatgacgggtatggggtttcctatatgatcgcaggggagaacactattttctttcatatttcctctaagtttagctcttcagagaccaacgcccaacggttcgggaatcacattaggaaagccttgctagatatcgccgacctgtttcaggtgccaaaagcttatagctag

SEQ ID NO: 217103 - DNA, 1458 bp, synthetic construct
  misc_feature 1..1458: note = Description of Artificial Sequence: Synthetic coding sequence
  source 1..1458: mol_type = other DNA
atgctgtttagctatcagaggagtttacctagacagccggtaccatccgtgcaggacactgtacgcaagtatctagagtccgttcgaccgatcctgtctgatgaggatttcgactggaccgcggtgctagcacaagagttccttcgactgcaggcctctctgctgcagtggtatttgcggctgaaatcatggtgggcctctaattacgtatctgactggtgggaggagttcgtttacttgcgctcccgtaatcccctcatggtcaattctaactattatatgatggacttcctatatgtaacgccaactccgctccaggccgcacgggctgggaatgcagttcacgcactcctgctatacaggcatagattaaaccgccaggagattccccctgtgaggggacctcaatgggttcgtgatggcggagtcgttctctggcctctgggacacgtgggccctgggcgtcagctaaccgctcacggatttctgcagacattgctaatgggtatgcgtcccctgtgctctgcacagtacgaaaagatctttaataccaccaggatccctggtgttcagaaagactacatccgccacctgcatgactcccagcacgtggccgtctttcacaggggtaggttttttaggatgggtacccactctcgtaattccctgctctctccccgagcgttggaacagcagttccagaggatccttgacgatccttcgcccgcatgtcctcatgaggagcacctggctgctctcactgcagcaccacgaggcacttgggcgcaagtgcgcacatcactgaagacacaggccgcagaagcgctcgaggcggtggagggtgccgcttttttcgtgagccttgatgcagaacctgctggattaacaagagaggatccagccgcaagtctggatgcatatgcgcacgctttactggccggacgcggacacgaccgatggttcgacaagagcttcaccctgatagtgttcagtaacggtaagctgggattgagcgtggaacactcatgggctgattgtcctatctctggccacatgtgggaatttactttggctacagaatgctttcagcttgggtactccacagatggccattgcaagggtcaccctgatccaaccttgccacagcctcagaggctgcagtgggacctcccggaccaaatccactcgagtatatcgctggcactgcggggagccaagatcttgtccgagaacgtggactgccacgtggtacctttttccctgtttggaaaaagcttcatacggcgatgtcatctcagttcggattcatttattcagatagcccttcagttggcccacttcagggttagctgggtgccgcatccacagcccccacagggcctgtcgccccctgaacctccaaggccagccccacctaggtttctggtggtcgccgctatcgtcggaaggccgagttag

SEQ ID NO: 217104 - DNA, 2412 bp, synthetic construct
  misc_feature 1..2412: note = Description of Artificial Sequence: Synthetic coding sequence
  source 1..2412: mol_type = other DNA
atggccgaagcacaccaagcggtcggatttagaccaagcctaacctccgacggagcagaagttgagctgtccgccccagttttgcaggagatctacttgtcagggctgcgtagctggaagcggcatctgagtcgattttggaacgattttctgactggtgtttttcccgcaagcccccttagctggcttttcctatttagtgcaatacaacttgcctggtttctgcagttagacccgtctctgggcctgatggagaaaattaaagaattgctacccgattgggggggacaacatcacgggctgcgcggagtactggcagctgcccttttcgcctcatgtctgtggggggctttgattttcacgcttcatgttgcgctgcgcttactgctgagttaccacggttggttgctggaaccacacggagcgatgtcaagccccactaagacttggctcgcattggttcggattttctcaggccgacacccaatgctattcagttaccaacgctccctgccaagacagcctgtgccctctgtccaggatacagtacgtaagtaccttgaaagcgtgagaccaatactgagcgacgaagacttcgattggaccgcagtgcttgcccaggagtttctgaggttacaggcttctttgcttcagtggtacctcaggctgaagtcatggtgggcctcgaattacgtatctgactggtgggaagagttcgtatacctgagaagccggaatcctctcatggtgaacagtaactattacatgatggatttcctgtatgtgacccccacccccctccaggcagcgagagcaggtaatgccgtccatgccctcctactttatcgtcatcggctgaatagacaggagattccacctaccttattaatggggatgaggccactctgctcagcccagtatgagaaaattttcaataccacgcgtattcccggagtacagaaagactacatacgtcatctgcatgactcacaacatgttgcagtgttccaccgagggagattcttcagaatgggcacgcacagcagaaactcactgttgagtcccagagcactggagcaacagtttcagaggatcctggacgacccaagtcctgcttgtccgcacgaggaacatctggccgctttgactgcagctcctaggggcacgtgggcccaggtacggacatctcttaaaacccaagccgctgaagccttggaggccgtagagggtgctgcgttctttgtgtcactcgatgctgagccagccggtctgacaagggaagatccggcagcaagtctcgacgcatacgctcatgctttgttagctggacgcggacacgataggtggtttgataaatccttcactctcatagtcttttctaacgggaagctcggcctgtccgtggagcatagttgggccgattgtcctattagtggccacatgtgggaattcacgttggccacggaatgcttccagctaggttatagcacggacggacactgtaaaggacatccagatccgaccctgccgcagccacagaggttacagtgggacctgccagatcagatccatagctccatctctctggccctaagaggcgcaaaaattctgtcggaaaacgtggactgccacgtagtgccttttagcctcttcggtaagagcttcattcgtcgttgtcacttaagtagcgattcattcatccagatcgcactgcagttagctcattttagagacaggggccagttctgtttaacatatgaaagtgccatgactcgcctgttcctggagggtcgaacagagacagtgaggtcctgcacaagggaggcctgcaacttcgtgcgggcaatggaagataaagagaaaaccgaccctcagtgtctcgctctatttagggttgccgtcgataagcatcaagctctgctgaaggcagcaatgtcaggccaaggggtcgacagacacttgtttgccctgtacatcgttagccgttttttacatttgcagagccctttccttactcaggtccatagtgaacagtggcagttaagtacctcacagatacccgtacagcagatgcacctcttcgatgtacacaattacccggactatgttagctcaggcggtggattcggcccagccgacgaccatgggtatggcgtcagctatatcttcatgggcgatgggatgatcactttccatatatccagtaaaaaaagcagtacaaaaactgactcccaccgcctgggccagcatattgaagacgcgttgctggatgttgcctccctctttcaggcgggtcagcactttaagcgtaggtttagggggtccggcaaggaaaattctcgtcacaggtgcgggttcctttccaggcagacaggagctagtaaagcttcgatgacgtctaccgatttttag

SEQ ID NO: 217105 - DNA, 2145 bp, synthetic construct
  misc_feature 1..2145: note = Description of Artificial Sequence: Synthetic coding sequence
  source 1..2145: mol_type = other DNA
atggccgaagcccaccaggcggtgggcttccgtccttccttgacctccgatggagctgaagtagaactgagcgcacccgtgcttcaggaaatctacttgagtggtctgagatcttggaagcgacatctgagtaggttttggaatgactttttgacaggcgtgtttccagcctccccactcagctggcttttcctctttagcgccatacaactggcatggtttctccagcttgacccctcactcgggctcatggagaagattaaggagcttctcccggactggggcggtcagcaccatgggcttcgaggcgtgctggccgctgctctatttgcctcttgtctttggggcgctttgattttcactctgcacgttgctttaagattgctccttagttatcacggatggttgctcgagcctcatggcgcaatgtcctccccaactaagacatggcttgccctggttcgtatctttagtgggcgtcatccaatgctgttctcatatcagcggtcactgcctcgtcagccagtccctagtgttcaagatactgtgcggaaatacctcgagagcgtgcgaccaatcctatctgatgaggacttcgattggacagccgtgctggcacaggaattcctcaggctccaggcttcattattgcagtggtatttgcgtctcaagtcgtggtgggcttccaactacgtgtcagactggtgggaagaatttgtgtatctgcgatccagaaaccccctcatggtcaattcaaactactacatgatggattttctgtacgtgacgccaacacccctccaggccgctcgtgctggaaatgccgtgcatgcactccttctttaccgacataggctgaaccggcaagagatcccccctacgctgctcatgggcatgcgcccattgtgcagtgcccagtatgaaaagatcttcaataccaccagaatccccggagttcagaaagactatatccgccatctgcacgatagccagcacgtggctgtgttccatcgagggcgatttttcagaatgggaacacattctcggaattccttgctgtctccacgagcccttgagcagcagtttcagcgcatactggatgacccctcacccgcatgccctcacgaggagcatctcgcggctctaaccgcggctccacggggtacatgggcccaggtgagaacatccttaaaaacacaggcggctgaggcccttgaagccgtggagggagccgcattttttgtgagtctggatgccgagccagcgggactgacacgggaggaccccgcagcgagcctcgacgcctatgcccacgcgttgctggccggaaggggtcatgacaggtggttcgacaagagctttacccttattgtgttcagtaacggcaagttgggattgtcagtggaacacagctgggcggattgccctatttccggacatatgtgggagttcaccttagccacagagtgttttcagctgggctacagtaccgacggccattgtaaagggcaccccgaccccaccctgccccagcctcagcggttacagtgggacctcccagatcagatccactcttcaatctcactggcccttcggggagctaagattcttagtgaaaacgtggactgtcatgtagtgcctttctcgctgttcggtaaatccttcatcaggcgatgtcacctatccagcgacagttttattcagatagcgctccagctagcacacttccgcgaccggggacaattttgcttgacctacgaaagcgcgatgactagactatttcttgagggaagaacagagacggtccgatcatgtacacgagaggcatgcaatttcgtccgtgctatggaagacaaagagaagaccgcagatgatcacgggtatggcgttagctacatctttatgggtgatggcatgattacctttcatatctctagtaagaagtcaagtacaaagacagattctcaccggctcggtcagcacatcgaagatgcgcttcttgatgtggcctcattgttccaggctgggcagcactttaagaggcgcttcaggggttcagggaaggaaaactccaggcacaggtgcgggttcctctcaaggcaaacgggggctagtaaagccagtatgacatcgactgatttctag

SEQ ID NO: 217106 - DNA, 2412 bp, synthetic construct
  misc_feature 1..2412: note = Description of Artificial Sequence: Synthetic coding sequence
  source 1..2412: mol_type = other DNA
atggccgaggcccaccaggctgtcggctttagaccaagcctcacttccgacggagccgaggtcgagctttcagccccagtactccaggaaatttacctatccggcctgcggagttggaagcgacatctgtcaagattttggaacgatttcttaaccggggtatttcccgcttcgcccctgtcttggttatttttgttttctgcaatacagctggcttggttcctgcagctagatcccagcttagggctcatggagaagatcaaagagctgttacctgactgggggggacagcatcacggtctgagaggagttctagccgctgcattgttcgcctcctgcctctggggcgcactcatatttaccctccacgtcgccctaaggctcctactctcataccacggctggttactggagccacacggggcaatgtcctcccctactaaaacttggctggcattagtgcgaatcttcagcggtaggcacccaatgctcttctcttatcaacgctccctgccacgccagccagtcccctcagtgcaggacaccgtgaggaaatacctggaaagcgttagacccatcttaagcgatgaagactttgattggacagccgtgctcgcgcaggaatttctgcggctgcaggctagcttgctgcagtggtacttgcggctgaaaagctggtgggcctcgaattatgtttccgactggtgggaagagttcgtatatctaagaagtcgaaacccgctgatggtcaattctaattactatatgatggacttcctctatgttacccctactcctttgcaggccgctcgagccggtaatgctgtccacgccctgctcttgtatcgccacaggctgaacagacaggagattccacctaccctgctgatgggcatgcgccctctttgttctgctcagtacgaaaagattttcaataccactaggattcctggtgtacagaaggattacattagacacctgcatgatagtcagcatgtggccgtctttcatcggggtaggttctttcgaatgggcactcatagccgtaactcactcctgtctcctagagcactggagcagcagtttcagcgaatcctagacgacccttctcccgcttgcccgcatgaggaacacctggcagcactgactgcagcacccaggggcacctgggctcaggtgagaacgtccttgaaaacccaggccgctgaagccctggaggcagttgagggcgcagcgttcttcgtcagtcttgacgctgagcccgctggactgacccgcgaagatcccgctgccagcctggacgcctatgcccatgcactcctggccggaagaggtcacgataggtggttcgacaaatccttcacactgatcgtcttctcaaacggtaagctgggcctgagtgtcgaacattcctgggccgattgccccattagcggacacatgtgggagttcactcttgccaccgagtgtttccagttaggctactccacagatgggcattgcaagggacatccagaccccaccttgccacagcctcagcggctacaatgggatctgcccgaccagattcacagctcaatctctttggctctgagaggggcaaagatactctctgaaaacgttgactgtcacgtggttccctttagcttatttggtaaaagtttcatacgacgatgccacctgtcaagtgactccttcatccagattgccctgcaacttgctcactttcgtgaccgcggtcagttttgtctgacctacgaatccgctatgacgaggctgttcctcgaaggcaggaccgagaccgtgcgaagctgtacaagagaggcttgcaatttcgtgcgagccatggaggataaagagaagacagacccgcagtgtttggccctctttcgcgtggccgtcgataagcaccaggccctgctgaaggccgctatgtctggccagggcgtggaccgtcacctcttcgctctctatatcgtctcaaggtttctccacctccagagccctttccttacccaggtccatagcgagcagtggcagctctccacttcacagattccagtgcagcagatgcatttatttgatgtacacaattacccggattatgtgagctctggagggggtttcggccctgccgacgatcacgggtatggtgtctcctacattttcatgggtgacgggatgataactttccacatctcctctaagaagtcatcaactaagaccgacagccaccgcctaggtcagcacattgaggatgctcttctggatgtggccagcctgttccaggctggacagcattttaagcgcagattcagaggcagtggtaaagagaacagcaggcatcggtgcggattcctcagtaggcagaccggggcaagtaaggcatccatgacttcaaccgacttttag

SEQ ID NO: 217107 - DNA, 2379 bp, synthetic construct
  misc_feature 1..2379: note = Description of Artificial Sequence: Synthetic coding sequence
  source 1..2379: mol_type = other DNA
atggccgaagctcatcaggccgtggggttccgccctagtcttacctccgatggggcagaggttgaactgagcgcacccgtcttacaagagatttatctgtccggactgcgctcctggaaacggcatctgagtcggttctggaacgactttcttaccggcgtttttcccgcaagtcccttgtcttggctgtttctcttttcagcaattcagctggcctggtttttacaattagacccgagccttgggctgatggaaaaaattaaagagctgctccccgattggggcggacagcaccacggactgcggggagttctggcggctgcactgtttgcctcttgcctctggggagccctgattttcacactgcacgttgcccttcgcctcctgttgtcttatcatggctggctcctagagccgcacggagccatgagttctcccactaaaacttggcttgcgctcgttaggatattctccggtcgccacccaatgctattcagctaccagcgcagtcttcccagacagcccgtaccatctgtgcaggataccgtgagaaagtacctggaatctgtgcgacccattctctcagatgaggacttcgactggaccgccgtgctggctcaagaattcctgagacttcaagcctctttgcttcagtggtacctgcggctgaagtcctggtgggcaagtaactatgtgtctgattggtgggaagaattcgtgtacctccgtagccggaaccccctcatggtcaactcgaattactatatgatggctgctcgagcaggtaacgcggtgcacgccctcctcctgtatcggcatcgtctaaatcgccaagagatcccgccaacactcctaatgggtatgagacctctttgcagcgctcagtacgagaagattttcaataccacaaggatccctggcgtccaaaaggattatattcgccacctgcacgattctcagcacgttgcggtgttccatagaggccgattcttccgcatggggacccattctcggaactctctgcttagtcccagggcactcgaacagcagttccaacgcattctcgatgacccctctccggcttgcccacatgaagagcatctcgccgcactaacagctgctcccagaggtacctgggcccaggtgaggacgtctctgaagacgcaggccgcagaagctctggaagctgtggagggagctgcgtttttcgtgtctctcgacgctgaacctgccggtcttacaagggaggatcccgcagcaagcctcgatgcctacgcacatgccctgctggctggcaggggccacgacagatggttcgataaaagctttactctgatcgtgttttccaacggcaagttgggtctcagtgtggaacacagctgggctgattgcccaataagcgggcacatgtgggagttcacccttgccacagaatgttttcagctcggatatagcactgacggtcattgtaaggggcatcccgatcccactctgcctcaacctcagcggctgcagtgggatcttcctgatcagatccattcctctatctcactggccctcagaggcgctaagatcctctccgaaaacgtggactgccacgtggtgcctttcagcctgtttggaaaatcttttatcagaaggtgccatcttagtagcgactcttttatccagatagccttacaactggcgcactttagagatcggggacaattctgccttacatacgaaagcgcaatgacccgattatttctcgagggcaggaccgaaaccgttagatcgtgtacccgagaagcctgcaattttgttagggcaatggaggacaaagagaaaacagaccctcagtgcctggccttgtttagagttgctgtagataagcatcaggctctccttaaggccgctatgtccgggcagggcgtcgatcggcacttgtttgccctttacatagtctcccggtttcttcacctgcagtctccttttctgacccaggttcattccgaacagtggcagttgtcaacttctcaaatcccagtccagcagatgcacctcttcgacgtacacaattaccctgactatgtgtcaagcggcggaggttttgggccagcagacgatcacggctacggagtgtcctacatttttatgggcgacgggatgattactttccacatttcttccaaaaaatcaagtacaaagaccgactctcatcgtctcggacaacatatagaggacgctttactagatgtggcctctctcttccaagcaggccagcactttaagcgccgtttcaggggtagtggcaaggagaactctcggcaccggtgcgggttcctttcccgtcagacgggggcttcaaaagcttctatgaccagcacggacttctag

SEQ ID NO: 217108 - DNA, 2412 bp, synthetic construct
  misc_feature 1..2412: note = Description of Artificial Sequence: Synthetic coding sequence
  source 1..2412: mol_type = other DNA
atggctgaagcacaccaggccgtaggcttcaggccatccctgacttccgacggagccgaggtggaactgagtgccccagtactacaggagatttacctgtcaggactccggtcttggaagcgccacctgtcaagattctggaacgacttcctcacaggggtctttcccgcaagccccctcagttggctctttctgttctcggccatacaactggcgtggttcctccaactggatccaagcctcggtctgatggaaaagataaaagaactgctacccgattggggtggtcagcaccacggactccggggagtcctggccgcagcattgttcgccagttgtctctggggggctctgatttttaccctgcatgtggccctcaggctcctgctaagctatcatggatggttactcgaaccacatggtgcaatgtcctccccaaccaagacgtggctggcattggttcgcatcttcagtgggcgtcaccccatgctattttcataccaacggtctctgccaagacaacctgtccccagcgttcaagacaccgtgaggaagtatcttgaaagtgtgagacccatactctcagacgaagattttgattggaccgcggttcttgcacaagagtttctgcgactccaagcatcattgttgcagtggtatctcaggctcaagtcatggtgggccagtaattacgtatccgactggtgggaagaattcgtgtatctgcggtctcgcaatccgttgatggtgaatagcaactattacatgatggacttcctgtacgttaccccaacgccgcttcaggccgctagagcaggcaacgctgtgcatgctcttctgttataccgtcatcggctcaatcgacaggaaatcccaccaaccttgttaatgggaatgaggcccttgtgctcagcacaatacgagaaaatttttaacactactcgtatcccaggagtccagaaagattatatccggcatcttcacgactcacaacatgtggcagtgtttcatcgaggacggttctttagaatgggcacccactccaggaattctctactgtcacccagggccctcgagcagcagttccagcgcatccttgacgacccttcacccgcatgcccacacgaagagcacctggcagccctgactgccgcacccagaggtacctgggcccaggtgcgtacttctctgaaaacccaggctgctgaggcacttgaagccgttgagggagccgcattttttgtgtctttggatgccgaacccgcaggcttaacccgggaagatccagctgcttctctggatgcttatgcccatgccttgctggccggtaggggccacgataggtggtttgataagtccttcaccctgatcgtcttcagcaatggtaaactcggactgagtgtcgagcatagttgggctgattgtcctattagtggacacatgtgggagtttacattggcgacggagtgtttccagttaggatactccacggacggccattgtaaaggtcatccagatccgaccctgccgcaaccgcagaggctgcagtgggacctccctgaccaaatccactcatccatttctctcgcactgcgaggcgctaagattctcagcgaaaatgttgattgccatgtcgttccctttagtctattcgggaagtcattcatccggaggtgtcacctaagtagcgacagttttatacagatcgcgctacagctagcgcatttccgggacagaggccagttttgtctgacatacgaaagtgccatgacccggctattcttggagggaagaacagaaaccgtccggagctgcacgcgggaagcctgtaattttgttcgggctatggaggataaggaaaagacagacccccagtgtctagctttgtttagggtcgccgtggataaacatcaggccctgctgaaggccgcaatgtccggacaaggagttgaccgacacttgtttgctctttacattgtgtccagattcctccatttacagtccccatttctcacccaggtccacagcgaacagtggcagctgagtacatctcagattcctgtccagcagatgcacctgtttgacgtccacaattacccagattacgtgtctagtgggggtgggttcggccctgctgacgaccatggttacggagtatcttacatttttatgggggatggcatgatcaccttccatattagctccaaaaaatcaagcacaaagactgattcccaccgccttggacagcacattgaagacgccctgttggatgtggcctctctcttccaggctgggcagcactttaagagacggttccgcggatccgggaaagagaactctcgtcatcgctgtgggttcctgtctagacagactggtgcctccaaagcttctatgacgagcaccgacttctag

SEQ ID NO: 217109 - DNA, 1524 bp, synthetic construct
  misc_feature 1..1524: note = Description of Artificial Sequence: Synthetic coding sequence
  source 1..1524: mol_type = other DNA
atggaccccaagctcggtcggatggctgcatcattattagccgtcttgttgctactgcttgagagaggaatgtttagctccccgagtccaccacctgctctgctggagaaggttttccagtacatcgatctccaccaggatgaattcgttcaaactctgaaggagtgggtggcgatcgagtccgattctgtccaacccgtgcctcgcttccgtcaagaactgttcaggatgatggctgtagctgcagatacattgcagcggctgggcgctagagtggccagcgtagacatgggcccacagcagctgccagacggccagtcgcttcctattccacccattatcctggcagagttaggctcagatcctacaaagggtaccgtttgcttttacgggcacctcgatgtccagcccgcagatcgtggcgatgggtggctcacagacccatatgtactcactgaggtcgacggtaagctgtacggcagaggggcaaccgataacaaggggcctgtgctcgcatggatcaacgctgtgtctgccttccgcgctcttgagcaggacctcccagtgaacataaagttcataatcgagggcatggaggaggcagggtctgtagctctcgaagagttggtggaaaaagagaaggacaggttttttagcggcgttgactacatagtgattagcgataacttgtggatcagtcagcgcaaacctgctataacctacggcacacggggaaatagctattttatggtcgaagtgaaatgccgggaccaggatttccacagcggaacctttggcggtatcctgcacgagcctatggccgatctggtggctctgctcggctcactggtggactcctccggtcatatacttgttcccggaatttacgatgaggtagtgcctcttactgaagaagaaattaacacatacaaagcaattcatttggatctcgaagagtatagaaactcctcccgagtggagaaattcctgtttgataccaaggaggagattcttatgcatctgtggcgttatcccagcctgtccatccacggaattgagggggctttcgacgaacctggcactaagacggtaattcctggcagggtcatcggtaagtttagcatcaggctggtgccacatatgaacgtcagtgccgtcgaaaagcaggttacccgccacttggaggatgtgttttctaaaaggaactcatccaacaaaatggtcgtttcgatgaccctgggtttgcatccctggatagctaacatagatgatacccaatatctagcagccaagagggccatccgcactgtattcggcacagagcccgacatgattagagacggaagtaccatcccaattgcaaaaatgttccaggagatcgtccacaagtcggtggtactgatacccctaggtgccgtcgacgatggagagcatagtcagaatgaaaagatcaaccggtggaattatatagaaggcaccaagctcttcgccgcttttttcctggaaatggcccagttgcactag

SEQ ID NO: 217110 - DNA, 2484 bp, synthetic construct
  misc_feature 1..2484: note = Description of Artificial Sequence: Synthetic coding sequence
  source 1..2484: mol_type = other DNA
atgcttctctgtctaagtcccgcttggctaatgaaagtccccgctcccggacaaccaggagaagccgcactgctggtttctaaggctgtgagctttcatcccggtgggttgacctttctcgacgacttcgttcccccacggagagcaacgtatttcctggctggtttaggcctgggcccaggacgtggtagggaagccgctgaactggccagagatttaacctgtccaactggcgcatccgcggagcttgctcggctgctggaggaccggttattaacaaggcaactgttagctcagcaggggggagtagccgtgccagctaccctcgcttttacgtacaagccccctgggctcttgcgaggaggggacgcctccttgggcctcagactggttgaactgtcgggcaaagaaggccaggaaactctcgtaaaggaggaggtggaggcgttcttgcgaagcgaagccctcggagatatcttgcaggttgctgtcaaactgagcggatggagatggaggggaagacaggcatggcgcctgcatcctcgggctgaactgggggctgttgttgacacagtcctggccctccttgagaaacttgaggaagaggagtccgtcctcgtggaggccgtgtacccaccagcgcaacttccgtgttcagatgggccatcgcccggtcctggactggccgtcaggatctgcgcggtggtgtgtcgaacacagggtgaccggcctctcctgtcgaaagtcgtgtgcggcgtgggacgtggtgataggccactacgtcatcacaatagtttgccacggacccttgaggtcgcgttggcacagtgtggcctcggcgaggaagcccaggtcgccgctgttcgccagcgtgtcaaggccgctgccgaggcggctctcgctgcagtgttggccctcgaggctggcctgtcagccgaacagaggggtgggcgacgagcccacactgatttcctgggagtggattttgctctcactgccgcaggcggagtgctgacccccgtcgccctggaacttaatggtggactttgcttggaggcctgcggggcattggaaggactgtgggcggcacctaggctcggtcccgcagcagatgaagcagttgcagcacctctggtcgagacgatgctgagaaggtcggccaggtgtctgatggagggaaagcagctgcttgtcgtaggcgctggcggagtttcaaaaaagtttgtgtgggaggccgctagagactacggtctccagctgcacctcgtcgaatcagatccaaaccatttcgccagtcaactcgtgcagacgttcatccattttgatatgactgaacacagaagggatgaggagaacgcccgactactcgccgagctcgttagagccaggggtctcaagctggacgggtgctttagctactgggacgattgtctggtccttacagctctactctgtcaggaactaggcctgccctgctccagcccagcagcaatgcgcctcgccaagcagaagtcactcacacagttgcatctcctgcaccaccatggtcctccctggcccgcaccaagcctacatgctgtcccttgttgtcctctggaaagcgaagcagacgtcgaacgagccgtccaccaagtacctcttccgggagtaatgaagcttgagttcggggctggcgcagttggggttaggctggtcgaggatgccccacagtgccacgagcatttcagtaggatcacgcgggatttacagggcgaggccgaccatccaggcatcggcctgggctggggtaatgctatgctcctgatggaatttgtcgagggaaccgaacatgatgttgacctcgtgctgtttggaggacggctgctggcagctttcgtgtctgacaacggccctacccgactgcccggattcactgaaactgccgcatgcatgccaaccggtctggctccagagcaggaagcacaaatggtgcaggctgccttccggtgttgcctcgggtgtggcttactagacggtgtgttcaacgtggagctgaagcttaccggggcaggaccacgtctcatcgagattaacccgagaatgggtggtttttacctgcgcgattggatcctagaactgtacggtgtggatctgttactcgccgctgtgatggtggcctgtgggctgagaccagctctccccactcgacccagagctaggggccacctggtaggcgttatgtgtttagtgtctcaacacctccaggctctttctagtaccgcgtcccgtgaaactctgcaggccttgcacgacagagggctgctcaggctcaacttgctagaagaagccctcgtcccaggtgagtacgaagaaccctactgtagtgtggcttgcgccggtcctagtcccaccgaagccagactccgtctgttagggctgtgccagggcttgggcattgatggtccctcttatcctgtggcccatttcctatcacacttcaaatag

SEQ ID NO: 217111 - DNA, 2484 bp, synthetic construct
  misc_feature 1..2484: note = Description of Artificial Sequence: Synthetic coding sequence
  source 1..2484: mol_type = other DNA
atgctcctttgcctctcacccgcttggctaatgaaggtgcctgctcctggtcagcccggtgaggctgcactgctagtttcaaaggccgtgtcctttcatcccggaggccttacatttcttgatgattttgttccaccgaggcgcgcaacgtacttcttggccggactgggtctggggcctggacggggtagagaagcagctgagcttgccagagatctgacctgtcccacaggggcttccgcagagctcgccaggcttctggaagatcgcctcttgactcgtcagttgctggcccagcagggaggtgtagctgttcctgccactcttgcattcacatacaaacctcctggattgctgcgcggtggggacgcctccttaggactgcggctggtggaactctcaggtaaagagggtcaggaaaccctggtgaaggaagaagtcgaagctttcctgagatctgaggctcttggcgatatccttcaggttgcagtcaaactgtccggatggaggtggcgcggtcgccaggcctggcgtctgcaccccagggcagaattaggcgcagttgtcgataccgtcctagctctgcttgagaaacttgaggaggaagaatctgtgctcgttgaggcagtgtatccacctgcacagctcccgtgctctgacggtccctcccccggtcccggactggcagtgcggatttgtgcagttgtgtgtcgcacacagggcgacaggccgctcctctctaaggtggtgtgcggcgtgggtcgaggcgacagacctctgcgacaccataactccctaccgcgtaccttggaagtggctctggctcagtgcggcttgggggaagaagctcaagtcgccgcagtgaggcagcgcgtgaaggccgctgctgaggctgcactggcagccgtcctggcactggaggctgggctaagcgccgagcaacgcggaggcaggcgggctcacactgacttcctcggcgtggatttcgcccttacggcagcaggcggtgtgcttactcctgtcgccctggaattgaacggcggactctgtctagaagcctgtggcgctctcgagggactctgggcagcacccaggctgggcccagcagcagatgaagccgtcgctgcaccccttgtggagaccatgctgcggaggagtgcgagatgcctaatggaggggaagcagctcctcgtggtgggcgcagggggagtttcaaagaaatttgtgtgggaagctgcgagggactacggcctacaacttcaccttgtggagtcagacccaaatcattttgccagtcagctggtgcagaccttcatccactttgatatgaccgagcacagacgagatgaggagaacgcccgtctactcgcggagctggttcgtgcacgtggcctaaagcttgatggatgctttagttactgggacgactgcctggttctgacggctctcctctgccaggagctgggcctaccctgtagcagcccggcagctatgcgcctggccaaacagaagtcactgacccagctgcatttgctgcatcaccacgggcctccatggcctgcgccatcgctccatgccgtgccctgctgcccattggaaagtgaggccgacgtggaacgcgctgtgcatcaagtgcctctgcccggtgtcatgaagcttgaattcggtgctggggcagtgggggtgaggctcgtggaggatgcgcctcagtgccacgagcatttttcaaggatcactagagacctgcagggagaggccgaccatcccggaatcggcctaggatggggtaatgccatgctgttaatggagttcgtggaggggactgaacacgacgttgacctcgttttgttcggagggagattgctggccgcttttgtatctgataacggaccgactaggcttccaggtttcacagaaaccgctgcttgtatgccaacaggcctggcccctgagcaagaggcacagatggttcaggcagcttttaggtgctgtctgggttgtggtctgctggatggcgtctttaacgtagaactcaagctgacaggcgcaggacccagactaattgagataaacccaaggatgggcggattctacctcagagactggatcttggagctttacggtgtggacctcctgctagctgccgtgatggtggcgtgcggcctcaggccagcactacctacacgaccgagggccagaggccacctggtgggggtgatgtgtcttgtatcccagcacttacaggcgctgtcatctaccgcatccagagagacattacaagccctgcatgacagaggcctgctgaggctgaatctgctggaggaagcactggtcccgggagagtatgaggagccgtactgctccgtggcttgcgccggtccctctcccactgaagcacggctccggctcctggggctctgccaggggctgggcattgatggtccctcctaccctgtggcgcattttctctcccatttcaagtag

SEQ ID NO: 217112 - DNA, 2853 bp, synthetic construct
  misc_feature 1..2853: note = Description of Artificial Sequence: Synthetic coding sequence
  source 1..2853: mol_type = other DNA
atgctctccctcgacccttctggccctgagtgggattgccccctgggctctaaagacctggaagaggagggcccttggggcggtgggtcaggcctcccgccaaccggctgctttccgggatcttggcggcaagacgtgggactggactgtaagggatctccagagggagccgaggcccgtgcctggactgtctattactattccctactgcagtcatgtctgcagcaggccggactgcccgagacccaggaccgaggacaagttccaaggacagggtgtcctggagcagaagttactctttgtgtactgggctctccctccaccttcctgcctgttctcctcgagggcggtgtgcaaagcccaggcaatatgctcctttgcctgtcgcccgcttggttgatgaaagtgccagctcctggccagccaggtgaagcagccctgctcgtgtctaaggcagtctcattccaccccggtggcctcacattcctggatgacttcgtgccacccaggcgtgcaacgtatttcctggccggattgggcctagggccaggcagggggagagaggctgctgagctggcccgagatctcacgtgccccactggggcttccgctgaactggccagactcttagaggacaggctgctaacgaggcaattactcgcgcaacaaggaggagttgctgtgcctgccactctggcctttacatacaaaccgccaggtttgctgcgtggtggcgacgcgtccctggggctccggctcgtggagctgtctggcaaagagggacaagagactcttgtcaaggaggaggttgaagcatttctccggtccgaagccttgggtgacattctgcaagtcgcggtgaaactttctgggtggcgttggcgcggacggcaggcctggcggttgcatccgagagctgagctgggcgcagttgtagacactgttctcgcactgctcgagaaactggaagaagaggaatcagtgctggtcgaagcagtttaccctcctgcacagttgccgtgctccgatggaccatcacctggacctggcctcgccgtacgaatctgcgctgtggtgtgtagaacgcagggggaccgcccactgctgagcaaggtggtgtgtggggtggggaggggcgataggcccctgcgacaccataattctctgccgaggaccttggaggtggccctcgcacagtgcgggctgggcgaagaagcacaggtggccgcagtgcgacagagagtgaaggctgctgccgaggccgctctcgcagccgtgctggccctcgaagccggtctgagcgcagagcagcggggagggaggcgggctcacactgatttcctgggcgtggatttcgccctcaccgctgcagggggagtgcttactccagtggccctcgagttaaacgggggactttgcctggaagcttgcggagcacttgaaggcttgtgggcagcaccaaggctaggcccagccgctgacgaagccgttgcagctccccttgtggaaactatgctgaggcgctccgcacggtgcttgatggaaggcaaacaactgctcgtggtgggcgctggaggtgtctccaagaagttcgtgtgggaggctgctagggactacgggctccaactgcatctagtagagagcgacccgaatcactttgccagccagctcgtgcaaaccttcattcattttgacatgacagaacaccgaagggacgaggagaacgcaagacttcttgcagagttggtgcgcgcaaggggtctaaaattggacgggtgtttttcatattgggatgactgtctagttttgacagcactactctgccaggagttgggcctcccttgcagtagtcctgccgctatgagactggccaagcagaaatctctcacccagcttcacctgctgcatcaccatggcccaccttggccagcccctagtctgcatgctgtcccttgttgccccctggagtcggaagcagacgtagagcgggctgtccatcaggttccactgcctggagtcatgaaactggagtttggcgcaggagcagtcggagtgcgcctagtggaggacgcacctcagtgtcacgagcactttagtcgcataaccagagatctccagggcgaggctgatcacccgggtatcggtctagggtgggggaatgctatgttgctgatggagttcgtggaagggaccgaacacgacgtggacctggtgctgtttggaggtcgactactagctgcttttgtgtcagataatggaccaactcgactgcccggattcacagagacagccgcttgtatgcccacgggcctagcgccagaacaggaagcccagatggtccaagccgcatttcggtgttgcctgggctgcggccttctggacggcgtgtttaatgtcgagcttaagttaacaggcgctggtccgagactgattgaaatcaatcctcggatggggggattctacctgcgcgactggatcctagaattatatggcgtcgacctgctgctggcagctgtaatggttgcctgcggactccgtcccgctctgcccacgagaccacgggcaaggggccacctagtgggggtgatgtgtcttgtgtcccagcatctgcaagcgctcagtagcacagcaagcagggagacattgcaagccctccacgatcgtggcctgctccgattgaatctgctggaggaagcactggtgccaggggagtatgaggagccttactgctctgtcgcctgtgccggaccatctcctacagaagccaggcttcgtttactgggcctgtgtcagggtctgggtattgatggccctagctacccggtggcccactttttgtcacacttcaagtag

SEQ ID NO: 217113 - DNA, 2775 bp, synthetic construct
  misc_feature 1..2775: note = Description of Artificial Sequence: Synthetic coding sequence
  source 1..2775: mol_type = other DNA
atgctgagcctggatcccagcgggccagaatgggattgtccgctgggcagcaaagacctggaggaggagggtccctggggcggaggaagcggactcccccctacaggctgttttcccggtagctggcgccaggatgtcggcttagattgtaaggggagccccgaaggggctgaggcacgcgcatggactgtctactattacagcctcctgcagagttgcctgcaacaggcaggcctccctgagacccaagaccgtggccaggtgcctcgcaccggctgccctggggctgaggtcacgttgtgtgtacttgggtcgccttccacctttcttccggtgttactggaaggaggcgtgcagtctcctggcaatatgctgctttgcctctctcccgcttggctcatgaaggttccagctccaggccagccaggggaggcagcccttttggtgagtaaagctgtgtccttccaccccggtggactcacgtttttagatgactttgtgccccctaggagggctacgtacttcctcgcaggattaggccttggaccagggcgaggtcgtgaggcagccgagctggctcgagatctgacctgtcccacaggcgcaagcgctgagctggcacgcctcctcgaggacagacttctgactcgacagttattagcacaacaggggggagtggctgtgccagccactttggccttcacgtacaaacccccaggcctcctgcggggaggcgatgccagcttgggcctaagacttgtggagctgtccggcaaggagggacaagaaactctggtcaaggaggaggtggaagctttcctacgaagtgaggctctgggcgacatccttcaggtggctgtcaagctgtccggatggcgctggcggggtcgccaggcctggagactccacccgagggccgaactgggcgctgtggtggatactgtgctggcgctgttagaaaaacttgaggaagaagagagcgtgctcgtggaagctgtgtatccccctgctcagcttccatgcagcgatggaccctccccgggacctggcctcgccgtgagaatatgcgcagtggtatgtcgaacacagggtgacaggccactgttgtcaaaagtggtgtgcggtgtcggacgaggtgaccggcctctcagacatcataactcactgccgagaaccctcgaggcggctctggccgctgtgctggctcttgaagccggtctttctgccgaacagaggggaggacgacgcgctcacacggacttcttaggcgtggacttcgccctgacagcagcaggtggagtgttaacccctgtcgcgctcgaactcaatggaggcctgtgtctcgaggcatgtggcgcacttgaagggctgtgggccgcaccacgacttgggcctgctgcggacgaggccgtggcagctcccctcgttgaaactatgctgagacggtccgcccgttgtctgatggagggcaaacaactgctggtcgtgggcgctggaggagtgagcaaaaagtttgtgtgggaggccgcaagagattacgggctgcagttacacctggtggagtctgatcccaatcatttcgccagccaactcgtacagacttttatccacttcgacatgacagaacacaggagagacgaggagaatgccaggctgctggcggaactcgttcgggctagagggctcaagctggatggatgcttctcatactgggacgattgtttagtgctgaccgcgctcttgtgccaggagctcggtctgccctgttcctccccagctgccatgagactggcaaagcaaaaaagcctgacccagcttcacctccttcatcaccatgggcctccttggccggcaccgagcctccacgccgtcccctgctgcccgcttgaaagtgaggcagatgttgagagggccgtacaccaggtgcctctccctggtgttatgaaattggagtttggtgctggagcagtgggcgtccgtctggtggaagatgcccctcagtgccacgaacatttcagccggattaccagggatctgcagggggaggcagatcacccaggtattgggttgggctgggggaatgcaatgttgctcatggaatttgtggaagggaccgagcacgatgtggacctggtactctttggcggacggttactggctgcttttgtctcagacaatggtccaactcgcctgcccggttttacagaaacagccgcatgcatgcctactggcctcgccccagagcaggaggcacagatggtgcaagccgctttcaggtgctgtctgggctgtggattacttgacggagtgttcaatgtggagctcaaactcacaggggcaggcccacggctcattgaaataaacccaagaatgggaggattctacctgagggattggattttggaattgtatggcgtggacctgctgttggccgcagtaatggttgcctgcggactgcggccagccctgcccaccaggcctcgcgcaagaggacacctggtgggcgtgatgtgtctggtaagtcagcatttacaagccctgtccagcaccgcgtccagagagactttgcaggctctgcacgaccgcggactccttaggttgaatcttctggaggaagcactggtgcccggagagtacgaagagccctattgctccgtcgcatgtgctggtccatcccctacagaagccaggctccggctactcgggctctgtcaaggcctgggaatcgatggaccgagctacccagtagcccacttcctgagccacttcaagtag

SEQ ID NO: 217114 - DNA, 903 bp, synthetic construct
  misc_feature 1..903: note = Description of Artificial Sequence: Synthetic coding sequence
  source 1..903: mol_type = other DNA
atgtgtccactggcccatccagcacaggatttgcctctgctgccgagccagctgagtctcgatccctctggtcccgagtgggactgccccctcgggtccaaggaccttgaggaggaagggccttgggggggtgggagtggactcccgcctacaggttgctttccaggcagctggcggcaagacgtgggattggactgcaaaggtagtccagaaggcgctgaggctagggcctggactgtctactactattcattactccagtcttgtcttcagcaggctggactgcctgagacccaggataggggacaggttccacgaacaggatgcccgggagccgaagtcacgttgtgtgtgctaggatccccaagcacttttctgcctgtactcctggaaggcggagtgcaaagccccggaaacatgctgctatgcttatctcccgcttggctgatgaaagttcctgcacctgggcagccgggtgaggccgctctgctcgtctctaaggcagtatctttccaccccggagggctgaccttcctcgatgatttcgtgcctcccagacgcgcaacatactttcttgccggactcgggctggggcctggtaggggacgtgaagctgcagagttggcgcgtgatcttacctgtcctacaggcgcatcagctgaactagcaagacttcttgaagatcgactgctgactcgacagctgctggcccagcaagggggagtcgcagtgccagcaactcttgctttcacatacaaacctcccggattgctgagagggggagacgcatcactcggcctgcgcttagtggagctttccgggaaggagggccaggagacactcgttaaggaagagcgcacttggctcggtccaaaaccctggaccaacccagggaagacctag

SEQ ID NO: 217115 - DNA, 2775 bp, synthetic construct
  misc_feature 1..2775: note = Description of Artificial Sequence: Synthetic coding sequence
  source 1..2775: mol_type = other DNA
atgttgtcgctcgacccatccgggcctgaatgggactgtcctctggggagcaaggacctggaggaggagggtccctggggtggcggatcaggtctgcccccaacaggctgttttcctggatcatggcggcaagacgtaggacttgattgtaaggggtccccagaaggcgctgaagcgagagcctggacagtgtactactacagcttgcttcaatcatgtctgcagcaggccggtcttccagagactcaagatcgcggtcaggtgccaaggaccggttgccccggagcagaggttacactgtgcgtgttaggctcaccctctacatttcttcctgtactgctcgaggggggagtccagagcccaggaaatatgctgttgtgcctctctcctgcatggctgatgaaggtcccagctccgggtcagcccggagaggcagccctcttggtttctaaagctgtgtcctttcatcctggagggctgaccttcctggatgatttcgtgcctccacgcagggctacgtactttctggcaggcctgggcctgggccctggtcgtgggcgagaggcagctgagctggcacgcgacctgacctgccccactggcgcttcagccgaactggcaaggttactcgaggatcgtttgctgacgcgccagctgttagcccaacaggggggtgtcgccgtcccggcaaccctagccttcacctacaaaccccctggtctcttgagagggggtgacgcttcccttggcctccggctggtagaactgtcaggaaaagaaggacaggagaccttggtaaaggaggaagtcgaggcctttctgagatccgaggcactgggggatattttgcaagtggcggtgaagctcagcggatggcgctggcgcggtcgtcaggcatggaggctgcaccctcgggcagagctcggggctgtggttgacacagtgctggcactcctggagaagcttgaagaggaggagtctgtgctagtcgaggccgtgtacccccctgcacagctgccgtgctcagacgggccatcacctgggccagggctggcagtgcggatatgcgcggtggtatgtcgcacccagggagatcgccctttattgtcgaaagtcgtttgcggggtcgggcgaggagatcggccactacggcaccataacagcctgccgagaacccttgaggtggccctcgccgcagtgctcgccctcgaggcgggattaagcgctgagcagaggggcggacgtagggctcataccgacttcctgggggtggatttcgcactcactgccgcaggtggggtcttgacaccagtggccctggagctgaacggcggattgtgtctggaggcctgtggggcattagagggactctgggccgctccacgccttggaccagccgctgatgaggcagtggccgcaccgcttgtggagacgatgttacggaggagtgcgcgttgtctcatggaaggcaaacagctcctggttgtgggcgcaggtggtgtgtccaaaaaattcgtgtgggaagccgctagagactacggtctgcagttacacttggtggaatcagacccaaaccacttcgcgagccagctagtacagaccttcatccacttcgatatgacagagcatcggagggatgaagaaaatgctcgactgctcgctgaattggtccgggcaaggggtctgaagctggatggatgcttcagctattgggacgattgtctggttttaaccgccttgctgtgccaggaactcggtctgccatgctctagccccgctgcaatgcggttagcaaagcagaaatccctgacccagctgcatctactccaccatcatggcccaccatggccagctccaagcttacacgcagtgccatgctgcccattggagtcagaggccgatgtggagcgcgctgtgcatcaggttcccttgccgggagtaatgaaactcgaatttggtgcaggggcagttggcgtgcggctggtggaggatgcccctcagtgccacgaacacttctcccgcattacacgggatctgcagggggaggctgaccatccaggcattggccttggctggggtaatgccatgctccttatggagtttgtcgaagggactgaacatgacgtcgacctggtcctgttcgggggacggttgttagctgcctttgtaagtgataatggaccaacaaggctgcctggattcaccgaaacagctgcatgcatgcctacaggacttgcacccgaacaggaagcacagatggtgcaggctgcttttcgctgctgtctgggatgcggcctactcgacggcgtgttcaacgtggaactgaaactcacaggcgcaggccctcgccttattgaaatcaatcccaggatgggcggattctacctccgtgactggatacttgagctgtacggtgtggatcttttactggcggcagtgatggtggcctgtggcctgcgcccagcgctgcctacacgacctcgcgctcggggacatcttgttggtgtcatgtgccttgtgtcccagcaccttcaggccctatcttctacagcctccagggagactcttcaggccctgcatgacaggggactgctgcgtctcaacttattggaagaagctctcgtcccaggggagtacgaggagccttactgttcagtcgcctgcgccggaccgagccctacagaagcccgtttaagactcctgggactatgccagggtttgggcatagatggcccatcctaccccgtcgcacacttcttaagtcactttaaatag

SEQ ID NO: 217116 - DNA, 1206 bp, synthetic construct
  misc_feature 1..1206: note = Description of Artificial Sequence: Synthetic coding sequence
  source 1..1206: mol_type = other DNA
atggaaccagggcgaagaggggcagcggcattgctagctctgctgtgtgtggcttgcgctcttcgagccggaagggcccagtatgaaagatattccttccgcagctttccacgtgatgagctcatgcctctggagagcgcctaccgtcacgctctggacaaatactctggagagcattgggcagaatctgtaggctacttggaaatttccctaagactccacagactgcttcgggactccgaggcattttgtcacaggaactgcagcgccgctccacagccagagcccgctgctgggctggcatcgtatccagaactccggttgttcggtggcctgctccgacgagcgcattgcttaaagcgatgtaaacagggcctccctgcttttcggcagtcccagccgagtagagaagtgctagcagatttccagagacgtgagccgtacaagttccttcagtttgcatactttaaggcgaacaaccttccaaaggccattgctgcagcacacaccttcttactgaaacaccccgacgacgaaatgatgaagaggaacatggcctactacaagtcccttccaggtgccgaagattatatcaaagatttggagactaagagctacgagtctctatttatcagagcagtgcgcgcttataatggggagaattggcgcaccagcatcaccgatatggagctggctttacccgacttttttaaagcattctatgaatgcctggctgcatgcgaaggctcgcgcgaaattaaggactttaaggatttttacttgagcattgccgatcactatgtggaggtgcttgagtgcaagatccagtgtgaggagaatctcactcctgtgatcggagggtatcccgttgaaaaattcgtcgctacaatgtatcattatctgcagtttgcttattataaactgaacgacctcaagaacgccgcaccatgtgcagtgtcatacctgttattcgaccagaacgataaggtgatgcagcaaaatctggtatactaccagtatcatcgcgacacttggggcctttccgacgagcactttcagccacggcctgaagccgtacagttttttaacgtgactacattgcagaaggagttgtatgatttcgcgaaggagaacataatggacgatgatgagggagaggtcgtcgagtatgtggacgatctgctcgagctggaggagacctcgtag

SEQ ID NO: 217117 - DNA, 789 bp, synthetic construct
  misc_feature 1..789: note = Description of Artificial Sequence: Synthetic coding sequence
  source 1..789: mol_type = other DNA
atggagcccggtaggcgtggggctgcggctctgcttgcccttctgtgcgtcgcatgcgccctgagagcaggtagagctcagtacgaaaggtacagctttcgctccttccccagggatgaactcatgcctctggaaagtgcctaccggcacgcgttggacaaatatagcggcgaacactgggccgaatcagtgggatacctggagataagtttaaggctgcacaggctactgcgagacagcgaggccttttgtcacaggaactgctccgccgctccccaacctgaaccggctgctggtttggccagctatcccgaacttcgcctgtttggaggactgctccgacgagcgcactgcctgaaacggtgcaaacaggggctcccagcttttcgacagagccagccatctcgagaggtccttgctgactttcaacgcagggaaccctataaatttctacagtttgcttattttaaagcaaataacctaccgaaggcaattgctgccgctcacacatttctgctgaaacatcctgatgatgaaatgatgaaaagaaatatggcctactataagagtcttcccggagccgaagactacttgaagacctggaagccaagccatatgaaggcttgctcgtctgagcagtgcggacacacaaccgttaggacaggcgagcatccctctcagacatggagctggccctttcctacatcgtccaaacccttcacctcagtgtcacagcctgctagagtgcctggaaggtcacgcacatcccgcatatcaactttcccgtag

SEQ ID NO: 217118 - DNA, 789 bp, synthetic construct
  misc_feature 1..789: note = Description of Artificial Sequence: Synthetic coding sequence
  source 1..789: mol_type = other DNA
atggaaccagggagaagaggggctgctgcactgctggcgctgttgtgtgtagcctgtgcactgagagccggtagagctcagtacgagcggtattcatttcgttcctttccaagggatgagctgatgccactcgaaagcgcttatagacatgccctcgacaagtatagcggcgagcattgggcagagtccgtggggtatctggagataagtctccggctccacagattgctccgagatagcgaagctttctgtcaccgcaactgctctgcggcacctcagccagagcccgcagccggtttagcttcataccccgagctgcggctgtttggtgggctgctgcgcagggcacactgcctgaagaggtgtaaacaagggctgcccgctttccgccagtcacagcccagtcgcgaagttttggcagattttcagaggagagaaccatataagtttctgcagtttgcttatttcaaagccaacaatctgccaaaggctattgctgctgctcacacttttctgctgaagcaccctgatgatgagatgatgaagcgtaatatggcgtactacaagagcctcccgggagccgaagattacatcaaagacctggaaacgaagtcctacgagagtctgttcatcgaacagtgcggacacacaactgttaggactggcgaacatccttcccaaacttggtcttggccctttccgaccagttctaagccctttacatccgtatcacagccagctcgggtacctgggcgtagtcggaccagccgtattagtacttttccatag

SEQ ID NO: 217119 - DNA, 1167 bp, synthetic construct
  misc_feature 1..1167: note = Description of Artificial Sequence: Synthetic coding sequence
  source 1..1167: mol_type = other DNA
atggagccaggcagaagaggagcagccgctctcttggccctgctgtgcgtcgcgtgcgctcttagggccggtcgcgcacagtacgaacgttattcttttcgtagcttcccccgtgacgaattaatgcccctggaaagcgcctaccggcacgctctggacaaatactccggtgagcactgggcagaatcggttcgcgactcagaggcattctgccataggaactgctctgccgcaccacagcccgaacctgccgctggcttggcctcctaccccgaactgagattgttcggcggactccttaggcgcgctcactgtcttaagcgttgcaagcagggattgcccgcatttaggcagtcccaaccatcaagagaagtccttgcagacttccagagacgggagccatacaagttcctgcagtttgcatactttaaagcaaacaatcttccaaaagccatcgctgccgcacacacattcttgctgaaacaccctgatgatgagatgatgaaaaggaacatggcctattataagagcctgccaggtgcagaagactacattaaagatttggagacaaagtcctacgagtcgcttttcatcagggctgtccgagcatacaatggcgagaactggcgaacatccatcacagacatggaacttgctcttcccgattttttcaaagccttctacgaatgtctggctgcgtgtgaaggctcacgggagattaaagacttcaaggatttctacctgagcattgctgaccattatgtagaagtcttggaatgtaaaatccagtgtgaggaaaacctgacccccgtgatcggcggatatcccgtggagaagttcgtggccacaatgtatcactatctacagttcgcgtattataagttaaatgatctgaagaatgcagcaccctgcgcagtctcgtatttgctgttcgatcagaatgacaaggtgatgcagcagaatctcgtgtattaccagtaccatcgtgatacttggggcctgtctgacgaacactttcagcccaggccagaggccgtgcagttcttcaatgtaacaactctccaaaaagaactgtatgatttcgccaaggaaaatatcatggacgacgacgagggcgaggtggtggagtacgtcgacgacctgctagaattggaagaaacgtcttag

SEQ ID NO: 217120 - DNA, 3471 bp, synthetic construct
  misc_feature 1..3471: note = Description of Artificial Sequence: Synthetic coding sequence
  source 1..3471: mol_type = other DNA
atggcgtcgctgctaccactcctatgtctgtgcgtggtcgctgcacacttggctggcgcacgagatgcgacacccactgaagaaccaatggccaccgccttggggctcgagcgcagatctgtgtacaccggccagccatcccccgctctggaggattgggaggaggccagcgagtggaccagttggtttaatgtggatcatccaggcggtgacggcgattttgaatcactcgctgccatccggttttactacgggccagccagggtctgcccacggccactggcacttgaagcccgaacaacggattgggctctgccttctgccgtgggggaaagagtgcatctaaaccctacacggggattttggtgtctgaatcgcgagcagcctcgtggcaggaggtgttccaactaccatgttaggttccgttgccctctagaggcatcttggggagcctggggtccttggggtccttgcagtgggtcttgtggaccagggagacgactgagaaggaggcactgtccttcgccggctggggacgcctgcccaggccgacccctggaagcgcagaagtgtgtgagacccaggtgcccaggatgctctttggatacatgcgagtgccctgaccatattctgctcggatctgtggttactccttctggccagccgctgctcggcgcacgtgtctccttgcgtgatcaacccggaacagtagccaccagcgacgcacacgggacgtttcgggttcctggcgtgtgtgctgattctcgggcaaacatccgcgcacagatggatggtttctcagccggagaggctcaggctcaggccaacggctccatctcagtggtcaccataatcctcgataaactggaaaagccttatcttgtgaaacatccagaaagtcgtgtgagagaagctggtcagaatgtgactttttgttgcaaagcctctggcactccaatgcccaagaaatatagctggttccataatggcactctactcgatcggagggcgcacggttacggggctcacctggagctccgcggactgcgccctgaccaggccggaatatatcactgtaaagcatggaatgaggcaggggcagtgcgctccggcaccgctagactaaccgtgctggcgccaggccagccagcttgcgatccaagacctagagagtacctgatcaaacttccagaagattgcggtcagcccggatcagggccagcctatttagatgtgggcctttgccccgatacacggtgtccatctctggccggttcaagcccgaggtgcggcgacgccagttcacgatgctgttctgtccgaagattggagcggagagagattcattgccccggatatgtgcttcccgtcaaggttgtggccgagtgtggctgtcagaagtgccttccgccaaggggacttgtgcggggtcgcgtggtcgccgctgattcaggagaaccactgaggttcgctcggattcttctggggcaagagcccattggcttcaccgcttaccagggcgactttacgatcgaggtcccaccctcaactcagcgtctcgtcgtcacctttgtggatcctagtggcgagttcatggatgcggtccgggtgctgccattcgaccccaggggggcaggggtttatcatgaagtgaaggccatgcgcaaaaaggctcctgttattctgcacacatcccagtccaacacaattccactcggggagctggaagacgaagcccctttgggagagctggtcctgcccagcggcgcattcagaagagcagacggcaagccatactcaggtcccgtggaggctcgcgtgactttcgtggatccacgtgacctgacctctgcagccagcgctccatcagatttgcggttcgttgactcagacggcgagctagctcctctgcggacatacggcatgttcagcgtggatctgcgagcccctggcagcgcagagcagctgcaagtgggtcctgtcgccgttcgcgtggccgctagtcaaatccatatgcccggacacgttgaggctcttaagctttggtccctcaatcctgagaccggactgtgggaggaagaatctgggttccggagagaaggctcaagcggcccaagagtgaggcgagaggagcgtgtctttctggtggggaatgtggagataagggagcgcagactgtttaatttggatgtacctgagcgtaggaggtgttttgtaaaagttcgcgcttatgcaaatgataaattcacacctagcgagcaggttgaaggcgtcgttgtcaccctggtgaacctcgagcccgctcccggtttttcggccaatccaagagcctggggcagattcgatagcgcagtgaccggaccaaacggagcatgcttacctgcattttgcgacgctgatcgtccagatgcatacaccgccttggtgaccgccacattgggcggagaagagctggagccagccccatccctaccacggcctcttccagccaccgtgggtgtcactcagccttatctggaccggctgggatatcgacggaccgaccacgatgaccccgcttttaagagaaacggcttccggattaatttggcgaagccaagacccggagatcccgctgaagcgaatgggccagtttacccctggcgatcactccgtgagtgccaaggtgctcccgtcaccgctagccattttagattcgctcgcgtggaggccgacaaatacgagtacaacgtcgtccctttccgggaggggactccggcatcatggacaggcgatctcttagcatggtggcccaatcctcaggagtttcgcgcatgcttcctgaaagtgaaaatccaggggccacaggaatacatggtgcgttcccataatgccggagggtcgcatccaagaaccaggggtcagctgtacggactgagagacgctagaagcgtgcgggatccggaaaggcctgggaccagcgccgcttgcgtcgagttcaagtgttctgggatgctgttcgaccaacggcaagtggacagaacgttagtgaccattatgcctcagggatcatgtaggagagtcgccgtaaacggcttgttgcgagactatcttacccgtcatccccctcctgtgcctgctgaagatcctgccgctttctctatgttagctcccttggatccattgggtcacaactatggcgtctacaccgttactgaccagagccctagactggccaaggagattgctattggacgatgcttcgatggatcatccgatgggtttagtagggagatgaaagcggatgccggaacagctgtgactttccagtgtagagaaccacctgctggtcgccctagtctcttccagagactgctggagagccccgcaacagctctgggtgatattaggagagaaatgagcgaggcagctcaggcacaggcgcgtgcgtctgggcctttgcggaccagaagagggagggttcggcagtag

SEQ ID NO: 217121 - DNA, 3555 bp, synthetic construct
  misc_feature 1..3555: note = Description of Artificial Sequence: Synthetic coding sequence
  source 1..3555: mol_type = other DNA
atggtcggaacaaaagcgtgggttttttcattcttagtgttggaagtgacaagcgtgctcggcaggcaaactatgctaacccaatcagtgagacgggtgcagccgggtaaaaagaaccccagcatcttcgcgaagcctgccgacacattggagagccccggagagtggacgacgtggttcaatatcgactatcccggaggcaagggagactacgagcgactggacgcgataagattttactacggcgacagggtatgcgctagacccctgcggctggaggcacggactactgactggacaccagccggtagtaccggccaggttgtacatgggtctccacgtgaaggcttctggtgtctgaatcgggaacagagacctggtcagaactgttccaattacacagtcaggttcctgtgccctccaggctcactcaggcgtgacacggagaggatttggtctccatggagcccatggagtaaatgttccgctgcctgtggacagacaggggtgcagactcgtaccagaatttgcctggctgaaatggtctctctgtgttctgaggcgtccgaagaagggcagcactgcatgggccaggattgtactgcctgcgacctcacatgcccgatggggcaggttaacgctgattgtgatgcatgcatgtgccaggacttcatgttacacggagcagtcagtctacccggaggggctccagcctccggggctgcgatttaccttctgacaaagactccaaagctactgacgcagacagacagcgacggccgttttcgaatcccaggtctgtgcccagacggcaaatccattctgaaaattacgaaggtcaaattcgcgcctattgtcctgactatgcccaagacctccttgaaagccgcaacaatcaaggccgagtttgtgagggctgagactccatacatggtcatgaaccccgaaacgaaagccagacgcgcaggccaatccgtgagcctatgctgtaaggccaccggaaaacccagacctgataagtacttctggtatcacaacgatactctgctggacccgtctctgtataaacacgagtcaaagcttgtcctgcggaaattacagcagcatcaggcgggtgagtacttctgcaaagcacagagtgatgctggagcagtaaagagcaaagtggcccaacttatagtgatagctagcgacgagacaccatgtaacccagtgcctgagtcttatcttatccgtctccctcatgattgttttcagaacgcgaccaatagcttctactatgacgtaggccgatgccctgtcaaaacctgcgccggacaacaggataatgggattagatgtcgtgacgcagtccagaactgctgcggcatatcaaagacagaagaaagggagattcaatgcagcggatatacactgcctacgaaagtggcaaaggagtgttcatgccaacggtgtactgaaacacgctccatcgtgagaggccgtgtctccgcagctgacaatggagagccaatgaggtttggccatgtgtacatgggaaacagcagagtttcaatgaccggttacaaggggacgttcaccctgcacgtgccacaggacaccgaaaggctggtattaaccttcgtcgacagattgcagaagttcgtgaatactactaaggtactgcctttcaataagaagggatccgccgtgttccatgagataaagatgctccggaggaagaagccgatcacacttgaggctatggagacaaatataatacccctcggggaggttgtgggggaagatcccatggccgagcttgaaatccctagtaggagcttttaccggcaaaacggggagccctacatcggaaaggtgaaggctagcgtcacatttcttgatcctagaaacatctcaaccgcaaccgctgcccagaccgacttgaatttcattaatgatgagggggatacgttccctctgaggacctatggcatgttcagcgtagatttccgggatgaggttaccagcgaaccattgaatgccggaaaggttaaggtgcacctggattcgacccaggtcaaaatgcctgaacacatttctaccgtgaagctttggtctttgaaccccgatactgggctgtgggaagaggagggcgactttaaattcgaaaaccagaggcgcaacaagagagaggataggactttcctcgtcgggaatttggagataagggaacggagactctttaacctggatgtcccagaatcacgaaggtgttttgtgaaagtcagagcatacaggagcgagcgctttctgccatctgagcaaatacaaggcgtcgttataagcgtgattaacttggaacccagaaccgggtttcttagcaaccctagagcttggggtaggttcgattctgtcatcactggccctaacggggcatgtgtacccgcattttgcgacgaccagagtcctgacgcctattctgcctacgtcttggcatccttagcaggcgaggaactccaggctgttgaaagcagtcccaaattcaatcccaacgcgatcggcgtcccacagccttacctgaacaaattgaactaccgtagaacagaccatgaagatcctcgcgtcaaaaagaccgcattccaaatcagcatggccaagccgaggcccaattccgccgaagaatcaaacggccctatttacgctttcgagaacctgcgggcatgtgaagaggctcctcccagcgcggctcacttccgcttctatcagattgagggtgaccgatacgattacaataccgtcccatttaatgaagacgaccctatgagctggaccgaggattatctcgcctggtggcccaaacctatggaattccgcgcatgctacatcaaggtcaagattgttggcccactagaagttaacgtccgatctcgcaacatgggaggcactcatcgacaaaccgttggcaaactgtacggcatacgcgacgtgcggagcacgagggatagagaccagcccaatgtttcagctgcatgcctggaatttaagtgctctggaatgctctacgatcaagacagagtggatcgaactctggtgaaagtaatcccccagggatcttgcaggcgagcaagcgtgaatcccatgttgcatgagtacctcgttaaccacctgcccctggcggtcaacaacgatactagcgagtacacaatgctggcgccactcgatcccttaggacacaattacggtatatatactgtgactgatcaggacccgaggacagcaaaggagattgccctgggtagatgctttgatggcaccagcgacggatcctcacgcattatgaagtccaacgtgggggtcgctcttacttttaactgcgtggagaggcaagtggggcgacagtcagcattccagtacctgcagtcaacacctgctcaaagccccgctgcgggaactgtccagggacgggtccctagtaggcgacaacagagggccagtcgtggtgggcaaagacagggaggcgtggtggccagcttgcgatttcccagagtggcccaacaacctttgatcaattag

SEQ ID NO: 217122 - DNA, 8148 bp, synthetic construct
  misc_feature 1..8148: note = Description of Artificial Sequence: Synthetic coding sequence
  source 1..8148: mol_type = other DNA
atggccgctgcagcaggcggtggctcatgtccgggaccaggtagtgcccgaggaaggttcccaggccgaccacgtggagcaggagggggaggaggtcgagggggaaggggcaacggagcggaacgcgtgagagtagctctgcggagaggcggtggcgcaacgggtcctggcggagcggagccaggagaagatacagcacttctccggctcctcggcctgagacggggacttaggagactgcgccgtctgtgggccggtccacgagtccagagaggccgaggccgtggtcgcggacgaggctggggccctagcagggggtgtgtccccgaggaggagagttccgacggggaatccgatgaagaggaatttcagggattccattccgacgaggatgtcgccccttcaagcttacggagcgcactgaggagccaaaggggtcgtgcccctagagggagagggcgaaaacacaaaacaaccccactgccacctccgagactcgccgatgtggctcctactccacccaaaaccccagccagaaagcgtggcgaggaaggcacagaacggatggttcaggctctgactgaactgctccggagagctcaggctccacaggcgccaaggagccgagcttgcgaaccttcaacccctaggaggagtcggggaagacccccagggagaccagccggaccctgccggaggaaacagcaggccgtggtggtagccgaagccgctgtgacaatacccaaaccagagccaccccctccagtagtccccgtaaaacaccaaacaggctcttggaagtgtaaagagggtcctggccctggaccagggacaccgcgtaggggaggtcagagttcacgcggtgggcgaggcggacgcggacgagggcgaggaggcggacttccctttgtgatcaaatttgtaagtagggctaaaaaggttaagatgggccagctcagccttggtcttgaatccggccaggggcagggtcaacatgaggaatcctggcaggacgtgccccaacggagagtgggcagcgggcaagggggatctccttgttggaagaaacaggagcagaaactcgatgatgaggaagaagaaaaaaaagaggaggaagagaaagacaaagagggagaggagaaagaggagagggcggtcgccgaagagatgatgcccgcagctgagaaggaggaggcaaagctgcctcccccacccttaactccccctgctccctcccctccccctccgcttcctcctccttcgacatcccctcccccaccattgtgcccgccaccacccccacccgtgagcccccctccactgccttcccctcctcccccacccgcacaggaagagcaggaagagtcccctccacccgtggtacccgcaacctgtagccgcaagagaggcaggcctccactcacccctagccagcgcgcagaacgcgaagctgccagggcaggccctgagggaacctcaccacccacgcctactccgagcactgccactggcggaccacccgaggactccccgactgtcgcccctaagtcaacgacctttctgaagaacatccgacagtttatcatgcctgtcgtgtccgccaggtctagtcgcgtgattaagacaccacggaggtttatggatgaagatcctcctaagcccccaaaagtcgaggtgtcacctgttctccgtccgcctatcactacgtctcctcctgtccctcaggagcccgcacccgtgccaagcccacctagggcccctactccaccctccacacccgtgcccctgccggaaaagaggcgctcgatcctgcgtgaacccacgttcagatggacctctctgactagagaacttccaccaccaccacccgcacctccacctccacccgcaccgtctcccccacccgctcccgcaacgagctcaaggcggcctttgctgctgcgggcaccccagttcacacctagcgaagcccacctcaagatctacgagagtgtgctgacgcccccaccactgggagctcctgaggctccagaacctgagcccccacccgcagatgactctcctgccgaaccagagcctcgagccgtggggagaacaaatcatctgtcactgcccagattcgcacctgtcgtgaccacacccgtgaaggcagaggtgtccccccacggggctcccgctctctctaatggaccacagacacaggcgcagctgcttcagcccctgcaagcgctccagacccagctgttgccacaggcactacccccaccacagcctcagctgcagcctccaccctccccacaacagatgccacctctggagaaggctcgtatagccggagttgggtccctgcccctaagcggtgtggaggagaagatgtttagtctgctgaagcgagctaaagtgcaacttttcaaaattgaccagcagcagcaacagaaagtggcagccagtatgcccctaagtcccggagggcagatggaagaggttgccggagctgtcaagcagatcagtgacagaggcccagtaaggagcgaggatgaatcagtcgaggccaaaagagaaaggccgtccggtcccgaatcccctgttcagggcccaagaattaagcatgtgtgcagacacgccgcagtggctctcggtcaggctcgggctatggttccggaggacgtcccccgtctaagtgcgctgccgctgcgcgatcgccaagacctggcaacggaagatacttctagtgccagcgagaccgagtccgttccctctcggagtaggcggggtaaagtggaggcggctggcccaggcggagagagcgagcccacaggaagtggcggtacattggcgcacacgcctaggcgatctctaccaagccatcacggcaagaagatgcgtatggcacgctgtgggcactgtcgaggatgcctcagggtgcaggattgcgggtcctgtgtcaattgtcttgacaagccaaaattcggagggcctaacactaaaaagcagtgttgcgtgtatagaaagtgcgataaaattgaggcccgaaagatggagagactggccaaaaaaggcaggacaatagttaaaaccctcttgccttgggactcagatgagtctcccgaggctagccccggtcctcctggcccacggagaggagctggtgccggagggcctcgagaggaggtggtggctcaccccggtcctgaggagcaagactccctgctgcaacgcaaatcggcccgtaggtgtgtgaaacaacggccaagctatgatattttcgaagacagcgacgactcggaaccagggggtccacctgcccctcgccgtagaaccccacgcgagaatgagttacccctgcctgagccagaggagcaatcaagaccacggaagcccacacttcagccggtgttgcagctgaaagcccgaaggcgacttgataaggacgccctggcccctggccctttcgcatccttccctaatggctggaccggtaaacaaaaatctccggacggcgtacacagagtcagggtagatttcaaggaagattgcgatctggagaacgtttggctgatgggcggactctctgtgctcacctctgtgccgggtggtccacccatggtgtgcctcctgtgcgctagcaagggactacacgaactggtgttctgccaggtttgttgcgacccatttcatcccttctgcctcgaggaggccgaaaggcccctcccacagcaccacgacacctggtgttgccgacgatgtaagttttgccacgtgtgtggcaggaagggtcgtggctctaagcacctgctcgagtgtgagagatgtagacacgcttaccatcctgcctgcctgggtccctcctaccccacccgtgcaactcgtaaacgtcgccattggatttgcagcgcctgcgtgagatgcaaatcttgcggtgcgacaccgggaaagaactgggacgtggagtggtctggagattatagcctctgcccacgctgtacccagctgtatgagaagggtaactattgtcccatctgcacgcgctgctacgaggacaatgactatgaatcaaagatgatgcaatgcgcccagtgtgatcattgggtgcacgcgaagtgcgagggtctgagcgacgaggactatgaaatccttagtggtctcccagacagtgtactctacacctgcggaccctgcgctggagcagcacagccaaggtggcgggaagcactgtccggcgctctacaagggggtctgaggcaggtcctgcagggactgctgagcagcaaagtggtgggccctctgctgctctgcactcagtgcggccctgacggtaaacaattgcatcctggtccctgcggcttacaagccgtcagtcagcgatttgaagacgggcactacaagagcgtgcattcgttcatggaagatatggttggaatcttaatgcgccattccgaggagggggaaacccctgatagaagagcgggaggccagatgaaagggctgctgctcaaactgctcgagagcgccttcggttggtttgacgcccatgaccctaagtattggcgcagatcaactaggctcccgaacggggtgctacctaacgctgttttaccccctagtcttgatcacgtctatgcccagtggcggcagcaggagccagagacaccagaatcaggccaacccccaggtgaccccagcgcagccttccaagggaaagacccggctgccttcagccacctggaagatcctcgacagtgcgccctctgcttgaaatatggtgatgccgactctaaggaagccggtaggttgctgtatattggccaaaatgaatggacgcatgtgaactgcgctatctggagcgccgaggtgtttgaagagaatgatggctccctcaagaatgtacacgccgcagtggcgagaggacgtcaaatgcgctgtgaactttgcctaaagcccggagcaactgtaggctgctgcttgtcctcctgtctgtccaacttccactttatgtgtgccagagcaagctattgcatttttcaggacgacaaaaaggttttttgccagaagcacaccgacctactggatggcaaggagattgtgaatccggacggtttcgacgttctcaggagagtctacgtggattttgaaggcatcaatttcaagcgcaagttcctgaccgggctggagcccgacgccatcaacgtgttaatcggaagcatcaggatcgatagcctaggcaccctgagcgatttatctgactgtgaagggcgattgttcccaattgggtatcagtgcagtcgtctgtactggtccactgtcgatgccagaagacgatgttggtaccgctgccgcatcctcgaatatcgcccatggggacccagagaggagccagcccatcttgaggccgcagaggaaaaccagacaatcgttcactcaccagccccatcctcagaaccccctggcggagaggacccaccgctcgataccgatgttctcgtgcctggagcccctgaacgtcactctcctattcagaatctggaccctcccctacgacctgactcaggcagcgcacctccaccggctcctcggagtttcagtggagcaaggatcaaagtgccaaactattctcccagccgcaggccactcggcggtgtctccttcggccctctgcccagccccggttcaccatcatcactaacccatcatatccccactgttggcgatcccgattttcctgcaccccctaggagatcccgtcgacccagtcctctggctccgagaccccctccaagccgatgggccagccccccactgaagacctctccccagcttcgtgtgcccccacccacaagcgttgtgacagccctgacacccacctccggcgaacttgcacccccaggccctgccccaagtcccccacccccagaagatctgggtcccgacttcgaagacatggaagttgtgtccgggttatctgctgcagatttggatttcgccgctagcctgctggggacagagccatttcaagaggaaatcgtggctgcaggggctatggggtcatcacacggaggaccgggtgattcatccgaagaggaaagcagcccaacctcccggtacattcattttcccgtcaccgtggtttctgcccctggtctggccccatctgccacccccggtgcaccccgtatcgaacaacttgatggggtggacgatggcacagacagcgaggccgaggcggtccagcagccacgcggacagggcaccccaccctcagggcctggtgttgtgagagcgggagtgttaggggctgccggagatcgggctcgaccgccagaggacttgccatctgaaatcgtggacttcgttctcaagaatttgggtggaccgggagatgggggtgcgggtccaagagaagaatcgttgcctcctgctcctcccctcgccaatgggagccagcctagccagggtttaaccgcctcaccagccgaccccacccggaccttcgcatggctgcccggtgctcccggtgtgcgtgtcctttctctgggcccagcccctgaacctcctaagcctgctaccagcaaaattattctggttaacaaactgggccaggtgttcgtcaaaatggccggagagggagagcctgtccccccacccgtcaagcagccgccactgcctccaactattagccccacagctccaacatcgtggaccctgccaccagggcctctcctgggtgtccttccggtggttggcgttgtgaggcctgctcctcctcccccacccccaccactgaccctggtcctcagctcaggccctgcatcaccccctaggcaggctatacgggtcaagcgtgtgtctaccttctccggacgtagtccacccgcaccacccccatacaaagctccacgcctggacgaagatggagaggcttcagaggacacacctcaagtgcccggattgggctctgggggttttagccgagtgcgtatgaaaaccccaacagtccgtggtgtgctggatttagatcgacctggggagccggctggagaagaatcacccggaccactgcaggagaggagcccactgctacccctcccggaggatggaccgcctcaggtgcccgacggcccaccggatctccttctggagagtcagtggcaccattactccggtgaggcaagttcctcggaggaagagcccccttcccccgatgataaggagaaccaagcccctaagagaacaggacctcacttaagattcgagattagcagcgaagatggtttcagcgtggaagccgaaagtttggagggagcttggagaacgctgattgagaaagtccaggaggctcggggtcacgctcgcctaagacatctttctttttcaggtatgagcggagctcgcctacttggaattcatcacgacgcagttatcttcctggctgaacagctaccaggtgctcagaggtgccagcattacaaatttagataccaccagcagggcgagggccaggaagaacctcctctgaaccctcatggtgcggctagagcagaggtttatcttcgtaaatgcaccttcgatatgttcaacttcctcgcgtctcagcatcgtgtgctcccagaaggagccacgtgcgacgaggaagaagatgaggtgcagctcagatctaccaggagagccactagcctggaactccccatggctatgagattccggcaccttaagaagactagcaaggaagcggttggtgtctatcgatcagcgatccacggtaggggactattttgtaaaagaaatatcgatgccggtgaaatggtgatagagtatagcggaatcgttattcggtctgtgctgacagacaagagagaaaaattctatgatggtaaaggtattgggtgctacatgtttcgcatggatgattttgacgtggttgacgccaccatgcacggaaatgccgctcgctttattaaccactcatgcgagccaaactgtttctcccgcgtgatccatgtcgagggacaaaaacatatcgtgatatttgctcttcgcaggattttgcggggtgaagaactcacatatgattataaatttcctatcgaagacgccagcaacaagctgccgtgcaactgcggagccaagcggtgtcggaggtttttaaattac

SEQ ID NO: 217123 - DNA, 2115 bp, synthetic construct
  misc_feature 1..2115: note = Description of Artificial Sequence: Synthetic coding sequence
  source 1..2115: mol_type = other DNA
atggtgcctgacactgcatgcgttttgctgttaaccctcgccgctctcggagcttctggacagggtcagagccctctgggatcagacctggggcctcagatgctgcgggaactgcaggaaaccaatgccgctctgcaggatgtcagagagctgctgcgccagcaggtacgggagatcacttttcttaagaataccgtcatggagtgcgatgcatgcggcatgcagcagagtgtaaggactggcctgcccagcgtgcggccactccttcactgtgcaccaggattttgttttccaggagtggcatgcatccaaaccgagtccggggcaaggtgtggcccttgtccggcagggtttactggaaacggatcacactgtacagacgtgaacgaatgcgagacagggcagcacaattgcgttcctaactcggtttgcatcaacactagaggatcatttcagtgcggtccttgtcaacccggttttgtgggggatcaagcctctggctgccaaagaagagctcagcgcttttgtccagatggtagtccaagtgaatgccatgagcacgccgactgcgttcttgagagggatggatctcgcagctgcgtgtgcgccgtggggtgggctggcaatggcattctctgcggtcgcgatactgaccttgacggatttccggatgagaaattgagatgcccggaaaggcagtgtcgtaaggacaactgtgttaccgtgcccaattcaggacaggaggacgtcgaccgtgatggcattggagatgcctgcgacccagacgcagacggcgacggcgtccctaacgagaaggacaactgccctttagttaggaaccctgaccaacgtaacacggacgaggataagtggggcgacgcctgtgacaattgcagatcacagaaaaacgacgaccaaaaggacactgatcaggatggtaggggagacgcctgtgacgacgacatcgacggggataggatccgcaaccaggccgacaattgcccccgtgttcccaacagcgaccagaaggacagtgatggagacggcattggggatgcgtgcgataattgccctcagaagagcaaccccgatcaggctgacgtggaccatgatttcgtgggcgatgcttgcgatagcgaccaggaccaggacggagatggccatcaggactctagggataattgtccaacagtgcctaactcggcgcaagaggatagcgaccatgacgggcagggcgatgcttgcgacgatgatgatgacaacgatggtgttcccgactctcgtgataactgcaggcttgtgcccaaccccggacaagaggatgccgatagggatggcgttggcgacgtgtgtcaggacgattttgatgccgacaaggtagtggacaaaatcgacgtctgtccggagaatgccgaagtcactctgacggattttagggcctttcagaccgttgtccttgatccagagggcgacgcgcagatcgaccctaattgggtggttctgaatcaggggagagagatcgttcagacgatgaatagcgaccccggattggcggtgggatacaccgctttcaatggcgtagactttgagggcacattccacgtcaataccgtgaccgatgacgattatgctgggttcatcttcggctatcaagactctagctcgttctatgtggtgatgtggaaacagatggagcagacttactggcaggccaatcccttccgagcagtagccgaaccgggtattcagctgaaggctgtgaagtcatccactggtcccggagagcagttacgtaacgctctttggcacactggcgataccgaaagtcaggtccgtctgctgtggaaagatccaaggaacgtcggctggaaagataagaagtcctaccggtggtttctgcagcacagacctcaggtgggatatatccgagttcgcttttacgagggcccagagctcgtggccgactcaaatgtcgtcttggacacaacaatgcgcggagggcgactgggggtcttttgtttttcacaggaaaacatcatatgggctaatctgcgttatcggtgcaacgacactatccctgaggactatgagacacatcagctccgccaggcatag

SEQ ID NO: 217124 - DNA, 2235 bp, synthetic construct
  misc_feature 1..2235: note = Description of Artificial Sequence: Synthetic coding sequence
  source 1..2235: mol_type = other DNA
atggtaccagatacagcctgcgtgcttctcttaactctggccgcattgggcgcaagcggccagggacaaagccccctcggatccgatctgggtcctcagatgctgagagagctgcaggagaccaacgctgccctgcaagacgttagagaactgctgcgccaacaggttagagagatcacatttctcaagaacactgtgatggagtgtgatgcctgcggtatgcagcaaagtgtccgaactggactgccttccgtacggcctctgttacactgtgcaccagggttttgtttccccggaccttgtcccgcaggcttcactggcaacgggagccattgcacagacgtcaatgagtgtaatgcccacccctgctttcctcgagtaaggtgcattaacacgtctcccggattccgatgcgaggcgtgccctcccggatattcaggaccaacccatcaaggggtagggctcgcattcgcaaaggccaataaacaggtgtgtacggacatcaacgagtgcgaaactggccagcataactgcgtgccgaattcagtgtgtatcaacactaggggttcttttcaatgcggaccgtgccagcccggtttcgtcggggaccaagcatccggatgccagcggagagcccagagattctgtcctgatggctccccctccgagtgtcacgagcacgctgactgtgtgctcgaacgagatggctctcgatcttgtgtgtgcgctgtgggctgggccggaaatgggatactgtgtggcagggacaccgacctcgacgggtttccagatgaaaagctcagatgtccagagcggcagtgccgaaaagataattgtgtcaccgtcccaaactcaggccaggaggatgtggatagagatgggataggagacgcttgtgatccagacgcggacggtgacggagtgcccaatgagaaagacaactgcccactggtccgtaacccagatcagagaaacaccgacgaggacaagtggggcgacgcttgtgacaactgtaggagtcagaagaacgacgaccagaaggataccgatcaggacggacggggtgatgcttgtgatgatgatatagacggcgacaggattcgcaatcaggcggacaactgtcctagggtgccaaactctgatcaaaaagactccgacggagatggaataggagatgcctgtgacaattgtccacagaagagcaatcccgatcaggccgatgtggaccacgacttcgtgggtgacgcatgcgactctgaccaggatcaagatggggatggacatcaggactcccgggacaattgtccaacagtgccaaatagtgcccaggaagactctgaccatgatggacagggcgatgcctgcgacgacgacgatgataacgatggcgtgcccgactcccgggacaactgtcgactcgttcccaaccctgggcaggaggacgcggaccgcgacggggtgggtgatgtgtgtcaagacgatttcgacgcagacaaagtggtggacaagatcgatgtctgtccagaaaatgctgaagtgactctcaccgatttcagagcgttccagaccgttgtgctagaccccgaaggggacgcgcaaatcgatccaaattgggtcgtcctaaaccaaggcagagagatagtccagacaatgaacagcgatccaggactggctgtgggttatacagctttcaatggagtggattttgaaggcacatttcatgttaacaccgttacagatgatgattacgcagggtttattttcggctaccaggatagctctagcttctatgtggtgatgtggaaacaaatggagcagacttactggcaggctaacccattccgagctgtggccgagccaggcatccaacttaaggccgtaaaaagtagtaccgggcctggggagcaactgaggaacgccttatggcacacaggcgacaccgaaagtcaggtaaggctgctgtggaaagacccacgaaatgttgggtggaaagataaaaaaagctatcgctggtttctgcagcatcggccacaggtaggatatattagagtaagattctacgaaggacctgaactggtggcagacagtaatgtcgtcctcgatactaccatgcggggtggcagactgggcgtcttttgctttagtcaggaaaatattatctgggctaacttgaggtacaggtgcaacgacaccattcccgaggattatgagactcaccagctgagacaggcttag

SEQ ID NO: 217125 - DNA, 2394 bp, synthetic construct
  misc_feature 1..2394: note = Description of Artificial Sequence: Synthetic coding sequence
  source 1..2394: mol_type = other DNA
atggctgcgcttgcgtacaatctaggaaaacgcgagattaaccattacttttccgtccgcagcgcaaaggtattagccctggtggccgtgctgctcctagccgcatgtcatcttgccagccgtcgatatcgcggtaatgattcctgcgagtatctcctgtcatccggcaggtttctcggagaaaaggtgtggcagccccactcttgcatgatgcataaatataagatttcagaagcaaaaaattgcctagtcgacaagcacatcgcctttattggggattcgaggatcagacagttgttttactctttcgtaaagatcatcaatccgcaattcaaggaggagggaaataaacatgaaaacattcccttcgaggataagaccgcatcggtcaaggtcgactttctgtggcaccccgaggtcaatggctctatgaagcagtgcatcaaagtctggaccgaggactcaattgctaagcctcacgtaattgtggctggggctgccacttggtcaattaaaattcataacgggagctcggaagcactgtcccagtacaaaatgaacatcaccagcatcgctccccttcttgagaagcttgctaagacttctgatgtgtattgggtccttcaggaccccgtgtatgaagacctactgtcagaaaataggaaaatgattaccaatgagaagattgacgcctataatgaggctgctgtgagcattctgaatagctccactcgaaactctaagagtaatgtcaagatgttcagcgtaagcaagctcattgcccaggaaaccattatggaatctcttgacgggctccatctacctgaatccagtagggagactaccgccatgattctgatgaacgtgtattgcaataagatcctgaagcctgttgatggatcatgctgtcagcctcggcctcccgtgacacttatccagaagctagcagcctgcttttttactttaagcataattggttacctcatcttctatatcatccatcgcaatgctcatcgtaagaacaaaccctgcacagatctggaatccggtgaagagaagaagaacattatcaacacccctgttagcagcctggaaattttgctgcaatccttctgtaagttaggtctgatcatggcatacttttacatgtgtgatagagccaatctgttcatgaaggagaacaaattttacacacattcttcttttttcatcccaatcatctatatacttgtactcggcgtgttctacaatgaaaataccaaggaaactaaagtgctcaacagggagcagactgacgaatggaaaggatggatgcagctggtgatccttatttatcatatctccggggcttcaactttccttcctgtgtacatgcacattcgcgttctcgtcgcagcctacctctttcaaactggttatggccatttctcctatttctggattaagggggactttggtatctacagagtgtgccaagtgctgttcagactgaacttcttggtggtggtgctgtgtattgttatggatcggccttatcagttttactatttcgtgcccctggtcaccgtctggttcatggtgatctatgtaaccctcgccctgtggccccaaatcatccagaagaaagcaaatggtaactgtttctggcatttcggccttctgctaaaactgggcttccttctgctgttcatttgtttccttgcttacagtcagggcgcttttgaaaaaatatttagtttgtggccactgtcaaagtgtttcgaacttaagggcaatgtttacgagtggtggtttcggtggaggctggatcgctatgtggtgtttcatggaatgttatttgcctttatttatcttgctctgcagaaaaggcagattctgtccgaagggaaaggtgagccgctgttttccaataagatcagtaacttcctactgtttatcagcgtcgtgtcgttcctcacctactcaatttgggcaagctcttgtaaaaataaggctgaatgcaatgagttgcacccgagcgtcagcgtagtccagattctagctttcatcctgatccgcaacatccccggatatgcaaggagcgtttattcctcattcttcgcctggttcgggaagatcagcctggaactttttatctgtcagtaccacatttggttagccgcagacactcgtggtatcctggtgttaatccccggtaatcccatgttgaacatcatcgtctctacttttatttttgtgtgtgtggctcatgaaattagccagatcaccaatgatctagcacagattatcatccccaaggacaacagcagcttactcaagaggttggcctgtattgccgcattcttctgtgggctgctcattctctcctctatacaagataaatccaaacactag

SEQ ID NO: 217126 - DNA, 2721 bp, synthetic construct
  misc_feature 1..2721: note = Description of Artificial Sequence: Synthetic coding sequence
  source 1..2721: mol_type = other DNA
atggccggtaacgtgaagaaaagctcaggagccggagggggttctggcagcggcggaagcggctcagggggtttgatcggactaatgaaggatgcctttcagcctcatcaccatcaccaccaccatctaagcccacaccctcccggaaccgtagataagaagatggtggagaaatgctggaagttgatggataaggtggtgcgcctatgtcagaaccccaaactcgcccttaaaaactcgccaccttacatcctagacctcctgcccgacacttaccagcatttacggactatactgagtaggtatgaaggtaaaatggaaaccttgggtgagaacgaatacttccgggtgttcatggaaaacctgatgaaaaagacgaaacaaacaatctcactattcaaggaaggaaaggagcgaatgtacgaggagaactcccaacccaggaggaacttaactaagctgtctttgatctttagccacatgctggccgagctgaagggcatcttcccctccggactgtttcagggcgatacctttcggattactaaagcagacgccgctgaattttggaggaaggcatttggagaaaagaccatcgtgccatggaagtctttcagacaggccctgcacgaagtccaccctatctcatccgggctggaagcgatggctcttaaatccacgatcgatcttacctgtaacgactatatttccgtgtttgaattcgatatcttcaccaggcttttccagccgtggtcttcactgctgcggaactggaacagtctggctgtgacccacccaggatatatggcattcctgacctacgacgaagtaaaagctaggctgcagaagtttattcataaacccggtagttacatttttcgccttagctgcacgagactgggtcaatgggccattggatatgtaactgcagatggcaatatactccaaaccatcccacacaataagccactcttccaggcactgattgacggctttcgcgaggggttttatctcttcccggatggcagaaaccagaatcccgaccttactggactctgcgagcccacgcctcaagaccatatcaaggtcacacaggaacagtacgagctgtactgtgagatgggctcgactttccagctttgcaagatatgcgctgagaatgataaggacgtgaaaatcgagccctgtggccatctgatgtgtacgtcttgtctgacttcgtggcaggaaagcgaaggccagggctgtcccttttgccggtgtgagattaaagggacagagcccatagtggttgacccttttgaccccaggggctctggatccttgctgcgccaaggtgcggaaggcgcacccagcccgaactacgatgatgatgatgacgagcgcgctgatgacactctgttcatgatgaaggaactcgcaggggctaaagtggaacgccctccatcccctttctccatggcaccccaggcatccctgcctcctgtgcctccacgcttggatcttcttccacagcgagtgtgtgttccctcttcggcctctgctctgggcaccgcctctaaagcggcttccggcagcctgcacaaggacaaacctcttcccgtcccgcctactttgagagatctgcccccaccaccacctcccgatcgcccttactccgtgggtgctgaatcgaggcctcagaggagaccgttgccctgcacgcctggtgactgcccatcccgcgacaagctgcccccagtccccagctccaggctgggcgatagctggctacctagaccgattcccaaggtgcccgtgagtgcccctagcagctcagacccctggacaggcagagagcttaccaaccgccactcattgccatttagcctgccgtcccaaatggaaccccgacccgacgtacctaggcttggttccacattctctttggacacatccatgtctatgaattcttctccgttggtgggtcccgaatgcgaccatcctaaaattaagccatcatccagtgccaacgcaatctatagcctagcggctcggccactgcctgtcccaaaattgcccccaggggaacagtgcgagggcgaggaagatacagaatacatgaccccgagctctcggccactgcgtccgttagatactagccagtcttccagggcgtgtgattgcgaccaacagatcgactcctgcacatacgaggctatgtataatattcagtctcaagctccaagtattaccgaatcatctactttcggagaagggaatctggccgctgcacacgccaataccggccctgaggagagcgagaacgaggatgacggatacgacgtccctaagccgcctgtccccgctgtcctcgccagacgcaccttatctgacatcagcaacgcatcctcatcctttggctggctgtcactggacggggacccaacaacaaacgtgacagaaggctcgcaggtacctgagcggccacccaagcctttcccgagacgcataaattccgaaaggaaagccggttcttgccagcagggcagtggccctgcagcctcggccgcaactgcatctccccaattgtcgagcgagatcgaaaaccttatgtcccagggatatagctatcaggacattcagaaggcactcgtgatagcccagaacaatatcgagatggccaaaaatatcctgcgcgagtttgtctctatatccagcccagcccacgtggcaacatag

SEQ ID NO: 217127 - DNA, 2949 bp, synthetic construct
  misc_feature 1..2949: note = Description of Artificial Sequence: Synthetic coding sequence
  source 1..2949: mol_type = other DNA
atggccaactcaatgaatgggcgaaatccaggtggtcggggtggcaacccgagaaaaggccgaattctcggcattatcgacgctatccaagacgcagttggcccacccaagcaggcagccgctgacaggcgaacagtcgagaagacatggaagctcatggacaaggtagtacggctgtgccagaacccaaaactccagctgaagaactcccccccatacattcttgatatcctgcctgacacctaccaacacctgaggctgatcctttccaaatacgatgataatcaaaagctagcgcagttgagtgaaaatgagtattttaagatctatattgattcgcttatgaaaaagtccaagcgagccattcgactgttcaaggagggaaaagaacggatgtacgaggaacagtcgcaagataggcgcaacctgactaagttgtcactgatcttctcgcacatgctcgccgaaatcaaagcaattttccccaatggtcaatttcagggtgacaacttcaggatcacaaaagcagacgccgcagagttttggaggaagtttttcggagacaagacaattgtgccttggaaagtttttcggcaatgtctccacgaagtccaccagatatcctcaggtttggaagccatggctctcaagtctacaatagacttaacgtgtaacgattacatcagcgtgttcgagttcgacatcttcactagactcttccagccgtggggctccatattgaggaattggaacttcttagctgttacacatccagggtacatggccttcctcacttacgacgaggtcaaagcccgactccagaaatacagtaccaaacccggaagttacatctttcggctttcgtgtactaggctaggacagtgggctatcgggtatgtgacgggcgacggcaatatcttacagacaattccccacaataagcccctttttcaagctctgattgacgggtctcgagaaggcttctacctttatccggacggacggtcatacaaccccgatttgaccggactgtgcgagccaacaccacatgaccacattaaggttactcaagaacagtatgaactgtactgtgagatggggagcaccttccagttatgtaaaatttgcgctgagaacgataaggatgtcaagatcgaaccatgcggacacctgatgtgcacctcatgtttgacagcttggcaggagtccgacggacagggctgtcccttctgtcggtgtgagattaaaggcactgagccgatcattgtggacccttttgatcccagggacgaggggtctcggtgttgctccattattgacccttttggcatgccgatgcttgatcttgacgacgatgacgatcgcgaggagagcctaatgatgaacagacttgccaatgtgaggaaatgtaccgataggcagaattctcctgtgacttcacctggatcctcaccgctcgctcagcgacggaaacctcagccagaccctctgcagattccacacctgagtctgccccctgtaccccctagactcgatttaatccaaaaaggcatagtgaggtctccatgcggaagcccgactgggtcccccaagagctctccttgcatggtccgcaaacaggacaaacctctccctgcgcctccaccgcctttgagggacccacccccaccaccacccgaacgtccaccaccgatccccccagacaatcgtctcagccggcatatccaccatgttgagagcgttccatccagagaccctccgatgcctctggaagcctggtgccctcgagacgtgttcggcacgaaccaattggttggatgtaggctgctcggagaggggtcacccaaaccagggatcaccgcctcctcgaacgtgaatggccgacactctagggtgggcagcgacccggtactaatgcggaagcatcgccgtcacgatctaccactcgaaggcgctaaagtgttcagcaatgggcatctggggtccgaggaatacgatgtgccgccaagactgagtcctcctcctccggtgaccactctgctgcctagcatcaaatgcacgggacctcttgcaaactcccttagcgaaaaaacaagggatcctgttgaagaggacgatgatgaatacaagattccgtcttcccatcccgtgtccctgaactcccaaccctctcactgtcacaacgtaaaacctcccgtgaggtcttgcgacaatggtcactgcatgcttaatggcacccacggcccttcaagcgaaaaaaagagcaacatacccgacttgtctatttacctgaagggcgatgtttttgactctgctagtgacccagtacccctgcctcccgctagaccaccaacgcgcgataaccccaagcacggctcgtcattgaaccgcacacccagtgactacgacctgctgattccacccttgggggaagacgcgtttgatgccctccctccgtccctcccacccccacccccaccagcacgccattccctgatcgagcattcaaagccaccaggcagcagttccagaccttcctctggtcaggatttattcctgctgcccagtgacccctttgtcgacctggcctccgggcaggtacctctcccacccgctcgtaggcttcctggagagaacgtgaaaacaaatcgcacgtcccaggactacgaccagttgccctcgtgctccgatggatcccaagcgcctgcccgtcccccaaaaccacgtccaaggcgcaccgcccctgagatccatcacagaaaaccccatgggcctgaagccgctctagagaacgtagacgccaagattgctaagttgatgggcgaaggctacgctttcgaagaggtgaagagagccttggagattgcccaaaacaacgtggaggtcgcaaggtccatcctgcgagagttcgcgttcccccctccagtgagtccgaggctgaatttgtag

SEQ ID NO: 217128 - DNA, 2883 bp, synthetic construct
  misc_feature 1..2883: note = Description of Artificial Sequence: Synthetic coding sequence
  source 1..2883: mol_type = other DNA
atggctctcgctcccggaccagacgcacatgcacatctgccaccactaattgagttaaagttccagatggccaattcaatgaacgggaggaatccagggggtcgcggaggcaatccacgcaaaggacggatcctcggaatcatcgacgctattcaggacgccgtcggtccacctaaacaggccgcagcagatcgcagaacagtggagaaaacttggaaactgatggacaaagtcgtcaggctctgtcagaatccaaaactgcagttaaaaaactcacctccatatattctagacattttacccgacacgtaccagcaccttaggcttatcctctccaaatatgatgacaatcagaaactggcacaactctctgagaatgaatactttaagatttacatcgatagccttatgaagaaaagtaagcgcgcaattagattattcaaagaaggtaaggagcgaatgtacgaggaacagtctcaagaccgtcgtaatctgaccaaactctcccttatctttagccacatgttagcagagattaaggccatcttccccaacggtcaatttcagggggataatttcaggatcacaaaggcagacgcggcagaattctggcgtaaattcttcggggataaaaccattgtgccctggaaggttttcagacagtgcctgcacgaggttcaccagatcagttccggcctcgaagccatggctctcaaaagcacaattgacctgacttgcaacgattacattagcgtgtttgaatttgacatttttacaagactttttcaaccttgggggagcattttgcgcaattggaattttctcgctgttactcacccaggctatatggccttcctcacttacgacgaagtgaaggcccgactacagaaatatagcaccaaaccaggttcatatattttccgcttgtcttgtactcggcttggccagtgggctattggttatgtaacaggcgatggtaacatactccagacaatccctcacaacaaacctctattccaggccctaatcgacgggagtcgagagggattctacctgtatccggacggaaggtcgtataacccagatctgacaggcctctgcgaacccaccccccatgatcacatcaaggttacgcaggagcagtatgagctgtattgcgaaatgggtagtactttccagctctgcaagatctgcgctgaaaatgataaggatgtgaaaatcgaaccctgcgggcatctgatgtgcacttcctgtctgacagcctggcaggagagcgacgggcaggggtgtcccttttgccgatgcgagatcaaaggaaccgagccaatcatcgtcgacccttttgatccccgagacgaaggatctcgctgctgcagcattatcgatcctttcggaatgccgatgcttgatttagatgacgatgatgaccgcgaagaatccctgatgatgaaccgccttgctaacgtgaggaaatgcaccgacaggcagaatagtcccgttacctcaccgggttcgagtccattagcacagcggagaaaaccccaacccgatcccctgcagataccacacctcagcctgccgcctgtgcctccaaggctggaccttatccagaaaggcattgtccggtccccctgtgggtcccctaccggcagccctaagtctagcccgtgcatggtgcgaaaacaggacaaaccgctgccggcaccaccccctccgctaagagaccctcccccaccaccgcctgagcgaccacccccaattccccctgataaccgcctgagccggcacatccaccacgtggagagcgtaccttcacgcgatcctccaatgcctcttgaggcatggtgtccgagggacgtcttcggaacaaatcagctggtcggctgcaggctgctgggggagggatcacccaaaccagggatcactgcctcttcaaacgtgaacggtagacacagtagagtagggtcggaccccgtgctgatgcgtaagcataggaggcacgatctgcccttggaaggcgctaaagtcttctcaaatggccacctcggatcggaagagtatgatgtccctcccagactcagcccacctccgccagtaactaccctcctgccctccataaaatgtactgggccactcgcaaatagcctatctgagaagaccagagatcctgtcgaggaggacgatgacgaatataaaatcccaagctcacaccccgtgtccttgaactcccagccctcacactgccacaatgtcaaaccccctgttaggtcctgtgacaacggtcactgtatgcttaatggtacacacggtccttcctctgagaagaaaagtaacataccagatctctcaatctatttgaaaggcgaggatgcttttgatgccctgcctccaagtttgcctccgccaccgcctccagcacgtcacagcctgatagagcactccaaacccccagggagctcaagtcggccatctagcggccaagacctcttcctactgccctcggatccctttgtcgatcttgccagtggccaggtgcccctgccacctgccaggcgactgccgggagaaaatgtcaaaacgaaccgcacctcccaggactatgatcagcttcctagttgctctgacggaagtcaagcacccgctcgcccacctaaaccacggccaaggcgtaccgcacccgagattcaccaccggaagccccatggacctgaggctgctctggagaatgttgacgccaaaattgcgaagttgatgggcgaagggtacgcctttgaggaagtcaaacgcgcactcgaaattgcccaaaataacgtggaggtcgctcgctcgatcctcagggaatttgcatttcctcctccagtatcccccagactcaatctctag

SEQ ID NO: 217129 - DNA, 2313 bp, synthetic construct
  misc_feature 1..2313: note = Description of Artificial Sequence: Synthetic coding sequence
  source 1..2313: mol_type = other DNA
atggccaatagtatgaacggaaggaaccctggcggaagaggcggaaatccacgcaaggggagaatccttggaataatcgacgctatccaggacgcggtgggcccacccaagcaggcagccgctgatcggagaacagtggagaagacctggaaattgatggacaaagtggtccgactctgtcagaaccctaaactccaactgaagaattcacctccttatattctggacatcctgcctgacacatatcaacatctgcgtctgatcctgagtaaatatgacgacaaccagaagcttgcccagctgagtgaaaatgagtactttaaaatttatatcgactccctgatgaagaaaagcaaacgggctatccgtctgtttaaagagggcaaagaaagaatgtatgaggagcaatcccaggaccgtaggaatctcacaaaactaagccttatcttctcccatatgttggccgagattaaagccattttccccaacggtcagttccagggcgacaatttcaggattaccaaggcggatgctgctgagttttggcggaagttttttggtgataagaccatagtcccctggaaagtttttaggcagtgccttcacgaggtccaccaaatttcttctggcctggaggcaatggccctgaaaagtactatcgatctcacttgcaacgattatatctctgtattcgaattcgacattttcacacgtctttttcagccctggggaagcattctcaggaattggaattttctggcagtgactcaccccggttatatggctttcctaacctacgatgaggttaaggcacgcctgcagaaatacagtaccaaaccaggtagctacatatttcgcctctcatgtacacgcctcggccaatgggctattggctatgtgactggagatggtaacatactgcagacgatccctcataataaacctctgttccaggcactgatcgatggttcccgcgagggcttttacctttaccccgacgggaggtcgtacaacccggacctgaccgggctctgtgagccaaccccacacgatcacattaaggtgacccaggagcagtacgagctttactgcgagatgggcagcactttccagctgtgcaaaatttgcgccgagaatgacaaggacgtcaagatcgagccttgcggacacctaatgtgtacaagctgtttgaccgcatggcaggaaagcgacggccagggatgccctttctgtagatgtgaaattaaaggcacagaacctatcatcgtggacccgtttgaccctcgggacgaagggtctcgatgttgcagcataattgatcccttcggaatgcccatgctggatttggacgatgacgatgatcgtgaagagtcactgatgatgaatcggcttgcgaatgttcgcaagtgtacagatagacagaatagcccggtcacatctccaggatcatctccgttggcccagaggaggaaacctcagcctgatccgctccagatcccccacttgtcactgccacccgtgccaccacggctggacttgatccaaaagggaatcgtgcgcagtccatgcggaagcccgacaggttccccaaagtcatctccctgcatggtgcgcaagcaggataaaccacttcccgctcctccaccgcctctcagggaccccccacctcccccacctgaacgacctcctcccataccgcctgacaaccgtctatctcgccatatccatcatgtggagtccgtgcccagcagagatcccccaatgccattggaggcttggtgccccagagatgtatttgggacgaatcaactagtgggatgtcgactgcttggtgaagggtcaccaaagcccggtatcaccgcttccagcaacgtaaacggaagacacagtcgtgttggctctgatcccgtgctgatgaggaagcatcgaagacacgatcttcccctggaaggggcaaaagtgttcagtaatggtcatcttggctcggaggagtacgacgtcccccctagactgtctcctccgcctccggtgacgacactcctgccttcaataaaatgcacgggaccacttgccaattcattgtcagagaaaaccagagaccctgtcgaagaggacgatgacgaatataagatcccttccagccaccctgtttcgttgaactcgcagccatcccactgtcataatgtgaagccaccagttagaagttgtgacaacggtcactgtatgctcaacggaacgcacgggcctagttctgagaagaaaagcaacattcccgatctgtctatttacttgaagggtacttacagaatctag

SEQ ID NO: 217130 - DNA, 2433 bp, synthetic construct
  misc_feature 1..2433: note = Description of Artificial Sequence: Synthetic coding sequence
  source 1..2433: mol_type = other DNA
atggcaaactcaatgaatggccgtaaccctgggggtcgcggtggtaatcctcggaaaggtagaattctcggtattatcgatgcaattcaggatgccgtcggtcctcccaagcaggccgctgcggaccgcagaacagttgaaaagacctggaagctgatggataaggtggtgaggctgtgccagaacccaaagctgcagctgaaaaactctccaccatatattcttgacatccttcccgatacctatcagcacctgcggttgattctatccaagtacgacgataaccagaagcttgcacaactttcagaaaatgaatatttcaagatttatatcgattcactgatgaaaaaaagcaaacgggcaattcggctgttcaaagagggaaaggaacgcatgtatgaagagcaatcacaggaccgcagaaacttaactaaattgtctttaatcttcagtcacatgctggccgaaatcaaagccatcttccccaatggtcaatttcagggagataattttcggataaccaaagcagatgctgctgagttctggagaaaattcttcggtgataagacaatagtgccttggaaggtgtttcggcagtgtttgcatgaggttcaccagatctctagtggattagaagccatggcattaaaatccaccatcgacttgacttgcaatgactatatttctgttttcgagtttgacatctttactcgactgtttcagccttggggcagcatcctacgcaactggaactttctcgctgtcacgcacccaggttacatggctttcttgacttacgatgaggtgaaagcaaggctgcagaaatactcaactaagccaggctcatacatatttcgcttaagctgtacccgcctggggcagtgggcaatcggatacgtcacaggggatgggaatatcctccagactatcccccataataaacctttatttcaagccctgatagatgggagtcgcgagggattttatctgtatcctgatgggcgatcctacaatcccgatctgaccggactgtgcgagcccactcctcatgaccacataaaagtcacccaggaacagtacgaattgtattgtgagatgggttctacattccagctgtgcaagatttgcgccgagaatgacaaagatgttaaaatcgaaccctgcggccatctgatgtgtactagctgccttaccgcctggcaggagagtgacggtcagggctgtccattttgcagatgcgagatcaaagggaccgaaccgattatcgtggatccatttgacccgagggacgaaggatctaggtgttgcagcattatcgatccattcggcatgcccatgctggatctggatgatgacgatgatcgagaggagagtctcatgatgaatcgactcgccaacgttagaaagtgcacggatagacagaactcaccagtgacatctcctggatccagtcctctcgcacaacgccgtaaaccacaacctgatcccctccagatccctcatctttccctgccaccggtgccaccaagacttgacctgattcaaaaagggattgtgcggagcccatgcgggtccccgacaggcagtccaaagagcagcccctgcatggtgcgcaaacaggataaaccacttccagctccgcctccgcctctcagagacccccctcccccaccgccagagagacctcccccaatacctcccgataaccgcctatcccgccatattcatcatgtggagtctgtcccatcccgggatcctcctatgccattagaggcatggtgcccccgagatgtgtttggaacgaaccagctcgtgggctgtcgcctgctcggtgaaggatcgccaaaacctggcattactgctagttctaatgttaatggtcgccactcaagggttgggtccgaccctgtactgatgcgcaagcataggcgtcacgaccttcctttggagggagccaaagtgttctcaaatggacacctaggaagcgaagagtacgacgtcccaccaagacttagccctcctcccccagtgactaccctgctgcccagcattaagtgtactggtccccttgctaacagtttgtccgaaaagacacgcgaccccgtggaggaggatgacgatgagtacaagattccgagctcccatcccgtttccctcaattcccagccctcacactgccataatgtgaagcctcccgttagatcctgtgacaacggacactgcatgctgaatggcacacacggccctagttccgagaagaagagcaacatcccagacctgtcaatctacctgaagggagacgtcttcgatagcgcttctgatccagttcctctcccacccgcacgccctcccacaagagataatcccaagcatgggtcttccctgaatcgcactccatccgactacgatctgctcatcccccctcttggatag

SEQ ID NO: 217131 - DNA, 420 bp, synthetic construct
  misc_feature 1..420: note = Description of Artificial Sequence: Synthetic coding sequence
  source 1..420: mol_type = other DNA
atggctaattccatgaatggacgcaacccaggagggaggggcggaaacccgcgaaagggaagaattctgggcattatagacgccatacaggacgctgtcggaccacctaagcaggccgctgctgataggagaactgtcgagaagacctggaagctgatggacaaggtggtcaggctgtgtcaaaacccgaagctgcagctgaagaatagccctccatacattctagatattctgcccgacacctatcagcatttgagattaatattgagtaaatatgatgacaatcagaaactggcacagctgtccgagaatgagtattttaagatctatattgacagtttgatgaaaaagagtaagagagctatccggttgtttaaagaaggaaaagagcggatgtacgaggaacagagtcaggattag

SEQ ID NO: 217132 - DNA, 684 bp, synthetic construct
  misc_feature 1..684: note = Description of Artificial Sequence: Synthetic coding sequence
  source 1..684: mol_type = other DNA
atggccctggcgccagggccagacgcgcacgcgcatttaccgccactgatcgaacttaagttccagatggcaaactcaatgaacggaagaaaccccggaggacgaggcggaaatcctagaaagggaaggatactgggaatcatagacgccattcaagacgcagtgggcccacctaagcaggcggcagcagataggagaacagtggagaaaacttggaagctcatggataaggtcgttcgtctatgccaaaatcccaagttgcagcttaagaactcccctccttatatcctggatatccttccggacacctatcaacacctgagactaattttgtccaaatacgatgataaccaaaagctggcccagctgtcagaaaatgaatatttcaagatttacatcgatagtctaatgaagaaatctaaaagggctattcggctgttcaaggaaggtaaagagaggatgtatgaggaacagagccaggatcgcactatcgtgccttggaaggtgtttagacaatgccttcatgaggttcatcagatcagctctggattggaagctatggcccttaagagcacgattgatctcacctgtaatgactatatttctgtttttgaatttgacatcttcactagattgttccaagtgtccgataatttcaccgagtatttgatttacttgacttag

SEQ ID NO: 217133 - DNA, 1425 bp, synthetic construct
  misc_feature 1..1425: note = Description of Artificial Sequence: Synthetic coding sequence
  source 1..1425: mol_type = other DNA
atggctctcgcagttgctccctggggcagacagtgggaagaggcccgagccctcggccgagctgtgaggatgctgcagcgtctggaagaacagtgtgtcgacccacgactgagtgtctctcccccaagcttgcgcgacctcctccccaggacagcccagctcctgagagaggtggcgcactctagaagggccgcagggggtggtggcccaggtggacctggtggatccggggacttcctgttaatttacttggccaacttggaggctaagtctcgacaggtggcggctctgcttccacccagaggcagaagatccgcaaatgacgaactcttcagggccggaagccggctgagacgacagctcgccaagctcgccatcatcttcagccatatgcacgccgagctccatgcactcttccccggaggcaaatactgtggacacatgtatcagctgacaaaggctcccgcacacacattttggagagagagttgcggcgctcggtgcgttctcccctgggctgagttcgagtcattgctcggcacttgccaccccgttgagccaggatgcaccgcattggctcttcggaccaccatagacctgacttgctctggccatgttagcatttttgagttcgatgtcttcacaagattgttccagccctggcctacccttctcaagaattggcagctcctggccgtgaaccatcccggatacatggcattcctcacatatgatgaggttcaggaaaggttgcaagcctgcagagataaacctggctcgtacatctttagaccctcttgcactcgactgggccaatgggcaattggctacgtgtcgagcgatggatcaattctgcagactatccccgcaaataaaccattgtctcaggtgctgctggaagggcagaaggacggcttctatctttatccagatggtaaaactcacaaccctgatctaaccgagctggggcaagcagagcctcaacagagaatccatgtgagcgaggagcagctccagctgtattgggctatggactctacgttcgagctctgcaaaatatgcgctgaaagtaacaaggatgtcaaaatcgagccatgtggacacttgctctgttcttgttgcctggccgcttggcaacatagcgattcacagacatgtcctttctgtcgctgtgaaatcaagggatgggaggcagtctccatctaccaatttcacggtcaggccactgcagaagactcggggaactcctccgaccaggaggggcgtgagttggagctgggtcaggttcccctatccgccccaccgctgccccctaggcccgatctgccaccacgaaaacccaggaatgcgcaacccaaggtgcgcttactaaagggcaattcaccaccagctgcattggggccacaggaccctgctccggcatag

SEQ ID NO: 217134 - DNA, 1287 bp, synthetic construct
  misc_feature 1..1287: note = Description of Artificial Sequence: Synthetic coding sequence
  source 1..1287: mol_type = other DNA
atggctctcgcagtagccccttggggacggcaatgggaagaagccagagccctgggtcgcgcagtcagaatgctccagagacttgaagaacagtgcgtcgaccccaggctgtcagtatcaccccctagcctccgcgacctgttacctcggactgcccaattactcagggaggtcgcccattcacgaagggcggctggtggaggcggaccaggaggacctggcggaagtggggactttctgctgatctacttggcaaacttggaagccaagtcccgccaggtggccgctctgttgcctcccagagggcgtaggagcgctaatgacgaactcttccgcgctggttcccggctgaggcgccagctcgcgaaactagcgatcattttcagtcatatgcatgctgaactgcatgccctgtttcctgggggaaaatattgtgggcacatgtaccagttaactaaagctcctgcacatacgttctggcgcgaatcatgtggagcacgctgcgtgctgccgtgggcagaattcgaatctctgctggggacatgccatcctgttgagcctggctgtacagcccttgcgctccgtacgactatcgatctgacatgctccggccatgtgagcatttttgagtttgacgtgtttacgagactattccaaccctggccaaccctactcaaaaactggcagctcttggccgtgaatcatcctggatacatggcttttttaacgtatgatgaggtacaggagcgactacaggcctgtagggacaagcccggttcttacctgtaccctgacggcaagactcataaccccgacctgacggaattggggcaggccgagccccaacagaggattcacgtatcagaggaacagctgcaactttactgggccatggattcaacctttgagctctgtaagatctgcgccgagtctaataaagacgttaagattgaaccatgcgggcacttgctgtgcagctgttgtcttgcggcttggcagcattcggactcccagacctgccccttttgtaggtgcgagatcaaggggtgggaagctgtatcaatttaccagttccatggccaggcaaccgccgaagacagtggcaattcatccgaccaggaaggcagagagctggagctaggtcaggtacccctgtcggctcccccactgccacctcgacctgacctgccacctagaaagccacgcaacgcacagcctaaggtccgcctgctgaaggggaattcaccccctgccgcattggggccacaggaccccgcacctgcttag

SEQ ID NO: 217135 - DNA, 2355 bp, synthetic construct
  misc_feature 1..2355: note = Description of Artificial Sequence: Synthetic coding sequence
  source 1..2355: mol_type = other DNA
atgtcggaccaaaagaaagaggaagaagaggaagcggctgcagccgctgccatggcaaccgaaggaggaaagacatcagagcctgagaacaataataagaagcctaaaacctcaggttcacaggattcacaaccctcccccctagccctgctggccgcaacttgctctaaaatcggaacacctggcgaaaaccaagcaaccggccagcagcagataatcattgacccatcccagggcctagtccaactacaaaaccagcctcaacagctggagctggttactacacagttggccggtaacgcatggcagctggtggcctctactcccccagcaagcaaagagaacaacgtttctcaacctgcctcgtccagttcttccagcagttcgtctaacaacgggtctgccagtccaactaaaacgaagtcaggcaactcctcaacacctggacagtttcaggtaatccaagtccagaacccttcgggctcagtccagtaccaggtaattccacaactgcagacagtggaaggacaacagatccagatcaatcccaccagctcatccagtttacaggatcttcagggacagatacaattgatctccgcgggtaacaaccaagccatattaaccgcggcaaacaggactgctagcggaaacatcctagctcagaatctggcaaaccagaccgtcccggtgcagattcgtccaggcgtgtccattcccctgcagctccagacactcccaggcacccaagcccaggttgtcacgacactgcccattaatattggaggggttacgttagctctgcctgtgatcaacaacgtggcagccggtggaggtaccgggcaggtcggtcagcctgccgctactgcggactcaggaaccagcaacgggaatcagcttgtgtctactccaacaaacacgactacgagtgccagtacaatgccggagtcacccagctcaagcacaacttgtaccacaacagcctcaacctctctcacgtccagcgacacactcgtaagttccgccgatactggccagtatgcaagcactagtgccagctcttctgaaaggaccatagaggaaagccagacaccagctgcaaccgaaagcgaggcccagtcctctagccagctccaacccaacggaatgcagaacgctcaggaccagtctaactccctacagcaggtgcaaattgtggggcaaccgatcttgcagcaaatccagatccagcaaccgcaacagcagattattcaggctatccctccacaatcgttccaactgcagtcgggccagacaatccaaaccattcagcagcagcccctgcaaaatgtacagttgcaggccgttaaccccacacaggtgctgattagagcgcctacgctgacaccatctggccagataagttggcagacggtgcaggtacagaatatccagtcactgtccaatctgcaggtacagaacgccggtctgtctcagcagctgactattacaccagtgagttctagcggaggaacgacgttggcccagatcgcgccagtcgcagtggcgggagcgccaatcactcttaatacagcccagctcgccagcgtgccaaatctgcagacagtcagcgtggccaacctgggcgcagcaggagtgcaggtacagggggtacccgtgactatcactagcgttgctggacaacagcagggccaggacggggtgaaggtccaacaggcaaccattgccccagtgaccgtggcggtcggtggaatcgccaatgctaccattggagcggtctctccagaccagctgacacaagtgcacctccagcagggtcaacagaccagtgaccaggaggtacagcccggaaagaggctgcgcagagtagcgtgcagctgccccaattgccgcgaaggagaaggaagaggaagtaacgagcccggaaagaagaaacagcacatttgccatatagagggttgcggcaaagtctacggaaagactagccatttgcgggcacacttacgctggcatactggagagcgccctttcatttgtaattggatgttttgcggtaagagattcacccgatctgacgagctgcaaagacaccggcgaactcatacaggcgaaaaacggtttgagtgcccggagtgttctaaacggtttatgcgtagtgaccacttgtcaaaacacgtcaagacccatcagaataagaagggcggaggtactgccctcgccatcgtgacctcgggggagctcgattcgtcggttaccgaagtgctgggctctcctaggatcgtcactgtcgccgctatcagccaggacagtaaccctgctacccctaatgtctcgacaaatatggaagagttttag

SEQ ID NO: 217136 - DNA, 1476 bp, synthetic construct
  misc_feature 1..1476: note = Description of Artificial Sequence: Synthetic coding sequence
  source 1..1476: mol_type = other DNA
atggaccacaccgacaatgaattacaggggacaaattcgtcaggcagcttagggggattggacgttcgcaggaggatacccatcaaactgattagcaagcaagcaaataaagcgaaaccagcccctcggacgcagcgcaccataaatcgaatgcctgcaaaagctcccccaggtgatgaagaggggtttgactataatgaggaagagcgctatgattgtaagggcggagaattatttgcgaaccaacgcaggtttcccggacacctcttttgggactttcagattaacatcctgggggagaaggacgatacacctgttcatttctgcgacaagtgcgggctgcccattaagatatatgggaggatgattccgtgcaagcacgttttttgctacgactgtgcaattctccacgaaaaaaagggcgataagatgtgtcccggatgcagtgaccccgtgcagaggattgagcagtgcacgagaggctccctgttcatgtgctccatcgtgcaggggtgcaagaggacctatctgagccagagagatctccaggctcatataaaccacagacatatgagagccggaaaaccagtcactcgagcatccctcgagaatgtgcacccccctatagctccaccaccgacagaaattcccgagcggtttattatgccgccagataagcatcatatgagccatattcctcccaagcaacacattatgatgcctccgccacccttgcagcatgtaccacacgaacactataatcagccccacgaagatataagggctcccccagccgaattgtcaatggctcccccaccgccaagaagtgtgtcacaggaaacctttagaatttccacccggaagcactctaacttgatcacagttccgattcaagatgactctaacagcggcgctagggagccccctccacctgctcctgctcccgcacatcaccaccccgaataccagggccagccagtcgtttcgcacccccatcacattatgccacctcagcaacactacgctccacccccaccaccaccgccacctattagccaccccatgcctcaccctcctcaggccgcaggcacaccgcatttggtctacagccaggctcctcctcccccaatgaccagtgcccctccccctatcaccccaccaccagggcatatcatcgcacagatgcctccttatatgaaccatccaccaccaggtcctccccctccccagcacggagggccacccgtcacggcgcctccccctcatcattataaccccaattctttgccccagttcaccgaagatcaggggacactgtctccgccttttacacagcctgggggaatgtcccccggtatctggcctgccccaagaggcccacctcccccacccagactgcagggacctccaagccagaccccccttcctggaccacaccatcctgatcaaactagatatcgaccctactaccaatag

SEQ ID NO: 217137 - DNA, 1113 bp, synthetic construct
  misc_feature 1..1113: note = Description of Artificial Sequence: Synthetic coding sequence
  source 1..1113: mol_type = other DNA
atgattccatgtaaacacgtgttctgctatgactgcgctattttgcacgaaaagaagggcgacaagatgtgcccgggatgtagcgaccccgtgcagagaatcgagcaatgtacaaggggctctttgttcatgtgttccatcgtacaaggctgtaaacgcacttatctgtcacaaagagacctgcaggcccatatcaaccaccggcacatgagagctgggaagccggtcaccagagcgtccctggaaaatgtccatccgccaatcgcccctcctcctacggaaatccccgaacgtttcattatgccccctgataaacaccatatgtcacacattccccctaagcagcacatcatgatgccgccaccgcctctgcagcacgtgccccacgaacactacaatcaaccccatgaagatatacgtgcaccaccggctgagctgtcgatggcccctccacctccaaggagcgtgtctcaggagacatttcgaattagcacacggaaacacagtaacctgatcacagtgcctatccaggacgatagtaattccggcgctagggagcctccaccgccagcgcctgcccctgcccaccatcatccagagtaccagggccagccagtcgtatctcacccacaccacatcatgccccctcagcagcactacgcgcctccccctccccctccacccccaatctcccaccctatgccccatcccccacaggctgctggaacaccgcaccttgtttatagccaagcccctccgccacctatgacctccgcaccccctcccatcacccccccacccggtcatatcatcgcacagatgcccccttacatgaatcatcccccacctggccctccccctccacaacatgggggtccacctgtgaccgctccccctcctcaccattacaatccaaactcactgccacagttcaccgaggatcaggggactctttcccccccattcacccagcccggaggtatgtccccgggtatttggcccgctccgaggggtccaccccctccgcctaggctccaggggcctccaagtcagacccccctacccggacctcaccatccagaccagaccagataccgcccttattaccagtag

SEQ ID NO: 217138 - DNA, 681 bp, synthetic construct
  misc_feature 1..681: note = Description of Artificial Sequence: Synthetic coding sequence
  source 1..681: mol_type = other DNA
atgaaggtactgattctcgcctgcttggtggcactggcactcgctcgggaaacgatcgagtccctatcatccagtgaagagtcaataaccgaatacaagcagaaagtcgagaaagttaaacacgaggatcagcagcagggggaggatgagcaccaggacaaaatataccctagcttccagccacagcccttgatttatcctttcgtagaaccgatcccgtatggttttctgccccaaaacatactaccactagcccagcccgctgtggttctacccgtcccccagcctgagattatggaggtgcccaaagcgaaggataccgtgtatacaaaaggcagagtaatgcctgtgctcaaatcccccaccatacccttctttgatccgcagattccaaagctaacagatctggaaaacttgcatctcccgctaccactgctgcagccactcatgcaacaagtcccgcagcccattccacaaacgctagccctgcccccacaacctctttggtcagtcccgcagccaaaagtcctcccaatcccacaacaggtcgtcccttatcctcagcgtgccgtccctgttcaggccctgctcctcaatcaggagctactcttaaatcctacccaccaaatctatcctgtgacccagcccctggctcctgtccacaaccctatctccgtatag

SEQ ID NO: 217139 - DNA, 549 bp, synthetic construct
  misc_feature 1..549: note = Description of Artificial Sequence: Synthetic coding sequence
  source 1..549: mol_type = other DNA
atgaagtcttttctcctggtagttaacgcgctcgcactgactctcccattcttggccgtggaggtgcagaaccaaaagcaaccggcttgccatgagaacgacgagcgccctttttaccagaaaacggccccatacgtgccaatgtattatgttcccaactcatatccatactatgggactaatctgtaccaacggcgacctgccatcgctattaacaatccctacgtgccgagaacttactacgcaaacccagccgtggtgcggccacacgcgcaaatcccccaaaggcagtatctgcccaattctcacccccctactgtggtcagacgccctaacttacacccctcctttatcgccataccacccaagaagatacaggacaagatcattattccaacaataaataccatcgccaccgttgagccgactccagcccctgctaccgaacccacagtggactccgtggttacccccgaggctttcagtgagtccatcattacctcaactccagagacaactacagttgcagttacacctcctactgcgtag

SEQ ID NO: 217140 - DNA, 978 bp, synthetic construct
  misc_feature 1..978: note = Description of Artificial Sequence: Synthetic coding sequence
  source 1..978: mol_type = other DNA
atggcctcgtccagtgggtctaaagccgaatttatcgtcggaggcaagtataagctggttaggaaaatcggatcgggcagcttcggtgacatttaccttgcaattaacatcaccaatggggaagaggtcgctgtaaagctggagtcgcagaaggcacgccacccccagctcctctatgagtcaaagctgtacaagatccttcaggggggtgttggcatccctcatatcagatggtatggacaagagaaagactataacgttttggtcatggacctgctagggccttcactggaagatctgttcaatttctgcagccggaggtttactatgaaaacagttcttatgctggcagatcagatgattagtagaatagaatatgtccacacgaagaactttattcatcgagacatcaaaccagataatttcctcatggggatcggacggcattgcaacaaactgtttctcatcgacttcgggcttgcaaaaaagtatcgggataataggaccagacaacatattccctacagggaggacaagaacctcaccggtacagcgaggtacgcgtcaattaacgcccatcttggtatcgaacagtcaaggcgtgatgacatggaatccctggggtatgttctgatgtattttaaccggacaagcctgccatggcaaggcctcaaagccgctaccaaaaagcagaaatacgaaaaaataagtgagaagaaaatgagcactccggtggaggtgctgtgcaagggcttccccgctgagttcgccatgtatttaaactactgcagggggctccgcttcgaagaagcccctgactatatgtacctgcgccagctatttcgcattctgttccgcacccttaaccatcagtatgattacaccttcgactggaccatgctgaagcagaaggcagcacaacaagctgcctcttcctcaggacaggggcagcaggctcagaccccgacgggattctag

SEQ ID NO: 217141 - DNA, 978 bp, synthetic construct
  misc_feature 1..978: note = Description of Artificial Sequence: Synthetic coding sequence
  source 1..978: mol_type = other DNA
atggccagcagtagcgggagtaaggctgaattcatcgtgggaggcaagtataagctggtgcggaagatcggctcaggaagttttggggatatttacctggctatcaacattacaaacggagaggaggtggccgtcaagttggagtcacagaaagccaggcacccgcagctgttgtatgagagcaaactgtataagatcctgcagggaggagtgggcataccacatattagatggtatggccaggaaaaagactacaacgtgttggtaatggatctgctgggtcctagtctcgaagatctcttcaacttctgctctaggcgattcacaatgaagacagtcctcatgctggccgaccagatgatctccaggatcgagtatgtccacacaaaaaacttcatccacagggatattaaacccgataatttcttgatgggtatcggcagacactgcaataaattattcctcatagacttcggccttgccaagaagtacagggacaaccgcactcggcagcatatcccatatagagaggataaaaacctgacaggcaccgctcggtatgcctccattaatgcacacttaggtatcgagcagtcccgcagggacgacatggaatctcttgggtatgtcctgatgtatttcaaccgtaccagccttccctggcaggggctaaaggctgccacaaagaagcaaaaatacgagaagatcagcgagaaaaagatgtctaccccggtggaggtgctttgtaagggctttcctgccgagttcgccatgtacctgaattactgcagaggcctgaggttcgaggaggcacctgactacatgtacctccgacagctgttccgtattctgttccggacgctgaatcatcagtacgattatacgtttgactggacaatgctgaaacagaaagcagcacagcaagctgccagcagtagcggtcaggggcagcaggcacaaacacccactgggttttag

SEQ ID NO: 217142 - DNA, 1014 bp, synthetic construct
  misc_feature 1..1014: note = Description of Artificial Sequence: Synthetic coding sequence
  source 1..1014: mol_type = other DNA
atggcgagcagctccgggagtaaagctgagtttattgttggaggtaagtacaagcttgtgcgaaagattggaagtgggtctttcggcgacatctaccttgcaatcaacataactaacggggaggaggtcgctgttaagctggagtcccagaaagcacgccatcctcagctgctgtacgaaagcaagctttataaaatcctacaaggaggcgttggtatccctcatattcgttggtacggacaagaaaaggactacaatgtgctggttatggacttgctcggtccatcccttgaggatctgttcaatttttgtagccgaagattcaccatgaagaccgttctgatgctcgctgaccagatgatttcccgaatcgagtacgttcatactaagaatttcatccaccgcgacatcaagcctgacaattttctgatgggcattggtagacattgcaacaaattattcctaattgactttgggctcgctaaaaagtatagggacaaccgcacccggcaacatatcccttaccgcgaggataaaaatctgacaggcaccgcacgatacgcctccattaacgcacatctgggaatcgagcagtcccgtagagacgacatggagtctctgggctacgtgctcatgtatttcaacagaacctcactgccgtggcaaggtctgaaagctgcaaccaaaaagcaaaagtatgaaaagatctcagaaaaaaaaatgtcgacaccggtcgaggtcctgtgcaaggggtttccagctgaatttgccatgtatcttaactactgcaggggactaagatttgaagaggctcctgattatatgtatctgcgccagctgttccggattttgttccgcaccctgaatcaccagtatgattatacatttgattggacgatgctgaagcagaaagccgcacaacaagctgctagctctagcggccagggccaacaggctcagactcctaccggcaaacaaaccgacaagacgaagagcaacatgaagggattctag

SEQ ID NO: 217143 - DNA, 1098 bp, synthetic construct
  misc_feature 1..1098: note = Description of Artificial Sequence: Synthetic coding sequence
  source 1..1098: mol_type = other DNA
atggccagcagctcaggctctaaagctgaattcatcgtgggcggtaagtacaagctagttcgcaaaataggcagcggaagctttggcgacatttacctggccattaacattacaaatggcgaagaggtggctgtcaaactcgagtcacagaaagccaggcaccctcagcttctgtacgagagcaaactatataagattctgcaaggaggggtgggaattccgcacattaggtggtatggccaagagaaggactacaacgtcctagtcatggacctgctcggaccctcactcgaggatcttttcaatttttgtagccggaggttcactatgaagaccgtgctaatgctggctgaccagatgattagtcgaatcgagtatgtccacaccaaaaattttatccatcgcgatattaagcccgataattttctgatgggcatcggcaggcattgcaacaagtgcctggagagccccgtcggtaaacgcaagcggtcaatgacagtttctacctcacaggatccctccttctcaggacttaatcagctctttctcatcgacttcggactcgcaaagaagtatagagacaataggacacgacagcacatcccttatcgggaagacaaaaatctcactgggactgccaggtatgcatcaatcaacgcccacctgggcatcgagcagagcagacgggatgatatggaaagccttggctacgtgctaatgtactttaaccgcaccagcctcccatggcaggggctgaaggccgctactaaaaagcagaaatacgagaaaatcagcgagaagaagatgagcacacccgttgaagtactgtgcaagggatttcctgcagagtttgccatgtacttaaattattgcaggggactgaggttcgaagaggcccctgactacatgtatctgcgtcaattatttcgcatccttttccgtacgctgaatcaccagtatgattatacattcgactggacaatgctgaagcaaaaagccgctcagcaggccgctagcagctcaggccagggtcagcaggcccagacacccacaggaaaacaaaccgataagaccaagagcaatatgaaaggattttag

SEQ ID NO: 217144 - DNA, 1029 bp, synthetic construct
  misc_feature 1..1029: note = Description of Artificial Sequence: Synthetic coding sequence
  source 1..1029: mol_type = other DNA
tgccgggaggaaatatctagaattgaatacattcattcaaaaaacttcattcatagggatgtgaaacctgacaactttctgatgggcttgggcaagaaaggtaacctggtgtatattatagactttggcctggccaagaaataccgggatgctcgtacccaccagcacattccctaccgggaaaataagaatctaacaggcactgcgaggtacgcctcaatcaatacccacctcggtatcgaacaatccaggcgtgacgacctggagtcgctggggtatgtgctcatgtatttcaacctgggctcactcccatggcaaggactaaaggcagcaacaaagagacagaaatacgagcgaataagcgaaaagaagatgagcacccccatcgaggtcttatgcaaagggtatccaagtgaattcgcaacctacctgaacttttgccggagtctgcgcttcgacgacaagcccgactacagctatctgcggcaattgttcagaaatttgtttcatagacagggctttagctacgattatgtcttcgactggaacatgctcaaatttggcgcttcccgcgctgccgacgatgctgaaagagagcgtcgagaccgcgaggagcgactacgccattccaggaaccctgctacccgcggactgccgagcacagcgtccgggaggctgcgcggaacccaagaggtagctccccctaccccgttgactcccacaagccacacagctaatacctccccgaggcccgtcagtgggatggagcgggaacggaaagtgtccatgagactgcacagaggtgcgccagtgaacatcagctcaagcgatctgactggcaggcaagacacttcccgtatgagtacctctcaggttggggctgaacttccaggaggtaggtgggctagcggataccctgtgcgagttaagagcggcctgtggttcctacaaggcttcttcttccctttcttccctccatttctcagggtctttaatctcgctagggtctggcggcttgggtgtcgctag

SEQ ID NO: 217145 - DNA, 1248 bp, synthetic construct
  misc_feature 1..1248: note = Description of Artificial Sequence: Synthetic coding sequence
  source 1..1248: mol_type = other DNA
atggaactcagagtcggcaatagatatcgactgggcagaaagatcggatctggcagcttcggagatatttatctcggcacggacatagccgctggcgaggaagtcgctatcaaactcgagtgcgtgaaaacgaagcatccccagctccatatcgaaagcaagatctataagatgatgcagggcggtgtcggcattccaaccattcgatggtgcggagccgaaggggattataatgtgatggttatggaactactgggccctagtttagaggatctgttcaacttctgttcgcggaagttctccctcaagactgtattgctcttggccgatcagatgatttccagaatcgagtatatccactctaaaaattttattcaccgggatgtcaagccggataatttcctgatgggcttgggcaagaagggcaatcttgtgtacatcatcgactttggtctggccaagaaatacagggacgctcgtacccatcagcatattccatatagagagaataaaaatttgaccggcaccgcgagatatgcctccattaatacacacttgggcattgagcagagcaggcgggatgatctcgagtcgctggggtatgtgttaatgtacttcaacttgggctcactgccctggcaagggttgaaggctgcaactaagcggcaaaagtacgagagaatcagtgagaaaaagatgtcaacacctattgaggtcctttgtaagggatatccctccgaatttgcaacgtacttgaacttctgtagatcattgcgttttgacgataagccagactacagctatctgagacagctatttcggaatttgtttcatcggcagggattcagctacgactacgtgttcgactggaacatgcttaagttcggcgcatcgagagctgccgatgacgctgaaagagagagaagggatcgcgaggaacggctccggcattcccgtaatccagccactagagggctgccttctacagcatcaggcaggctgagggggactcaagaggtggcccctcccactccgttaacacctacctcacataccgccaacaccagccctcggcctgtaagcggcatggagagagaacgaaaggtgtctatgcgcctgcacagaggcgctcccgtgaatataagtagtagcgatctgacaggaaggcaggatactagcagaatgtcaacctcccaaatccccggtagagtcgccagctccgggttacagtccgtagttcataggtag

SEQ ID NO: 217146 - DNA, 1230 bp, synthetic construct
  misc_feature 1..1230: note = Description of Artificial Sequence: Synthetic coding sequence
  source 1..1230: mol_type = other DNA
atggagttgcgtgtcggcaatcgctaccggcttggcaggaaaattgggtcagggtctttcggcgatatttatcttggcaccgacattgctgcaggcgaagaggtggccattaaattagagtgcgtaaagacaaaacaccctcagctgcacattgagagtaaaatatacaagatgatgcagggcggagtgggcatccccaccatccggtggtgcggtgccgagggtgactataatgtgatggtcatggagctgctgggaccctcccttgaagatctcttcaacttctgttcaagaaaattcagcctcaaaacagtgcttcttttggctgatcagatgatttcccgtatagagtatatccactccaagaactttattcatagagatgtaaagccagacaatttcctgatgggcctgggtaagaaaggcaacctcgtttacataatcgatttcgggctggccaaaaaatatagagatgctagaacccatcagcatatcccttaccgggaaaacaaaaacctgacaggaacagcccgatatgcctcgatcaacactcatctgggcatagaacagagtcgccgtgacgacctggagagccttggctacgttcttatgtactttaatctcggtagcctgccgtggcagggccttaaagcggcaaccaagagacaaaagtatgaaagaatctctgagaaaaaaatgagcaccccaatagaggtgctgtgtaagggatatcctagcgaatttgccacttatcttaatttttgcagaagcctgaggtttgatgacaaacccgattactcctacctgagacagctattccgcaacctgttccatcggcagggcttctcttatgactacgtctttgactggaatatgctgaagtttggcgcaagtcgggctgcagacgacgccgaacgggaaagaagagaccgagaggaacgtctgcgccattcacgtaacccagcaactcggggtcttccttcaaccgctagtggcagactgagaggtacccaagaggtggccccaccaacccccctgacaccgacgtcccatactgccaacacctcaccgagacccgtgtcaggtatggagagggaacgaaaagtcagtatgcgattacaccggggagctcccgttaacatctcatctagcgatctgacaggtcgtcaggatacgagcagaatgtcgacatcccagaattccattccctttgagcaccacggcaaatag

SEQ ID NO: 217147 - DNA, 1077 bp, synthetic construct
  misc_feature 1..1077: note = Description of Artificial Sequence: Synthetic coding sequence
  source 1..1077: mol_type = other DNA
atgatgcagggcggtgtcgggattcctactattcgatggtgcggtgccgaaggggactacaacgtgatggtgatggaactgctcggtccctccctcgaggaccttttcaacttttgctcaagaaaattttctctgaaaaccgtgctgttgctggccgatcagatgatcagccgcatcgaatatattcatagtaaaaacttcatccaccgggacgttaaacccgacaatttcctgatgggcctgggcaagaaggggaacttagtatacataatcgatttcggactcgctaagaagtaccgagatgctaggacccaccaacacattccttaccgggagaacaaaaatttgaccggtaccgctagatatgcttctatcaatacccatctaggtattgaacagagtcggcgagacgatctggaatccctgggctacgtgctgatgtactttaatcttggatctttgccatggcagggtcttaaagccgcaacgaaacgccaaaagtatgagagaatctctgagaaaaaaatgagtactcccattgaggtactctgcaaagggtaccccagcgagttcgcaacctacctgaacttttgtagaagtttacggtttgatgataagcctgactactcttacttgcgccagctttttcggaacctattccaccggcagggattcagctacgactacgttttcgactggaatatgctcaagtttggggcttcccgggctgctgatgacgctgagcgagagcgtcgcgatcgtgaagagcgtttacgccatagtagaaaccccgctacaaggggcctaccctccactgcaagcggcaggctccgaggcacacaggaagtagcgccaccaacccccttgacccccacgagccacaccgctaatacctctccacgcccagtctctggcatggaacgagaaaggaaagtgagcatgcgtttgcatcgcggagccccagtgaatatctcaagctccgatcttactgggaggcaagacacgtcaagaatgtcaacatcccagatccctggaagagttgcatcatctggactccaaagtgtggtgcaccggtag

SEQ ID NO: 217148 - DNA, 381 bp, synthetic construct
  misc_feature 1..381: note = Description of Artificial Sequence: Synthetic coding sequence
  source 1..381: mol_type = other DNA
atggagctgagggtaggcaacaggtaccgcttgggccgaaaaatcgggtccggttcctttggggatatatacctcggtaccgatattgcagccggtgaagaagtggccattaaactcgaatgcgtcaaaactaaacatccccagctccatattgagtccaaaatatacaagatgatgcaaggcggtgtgggaataccaactatccgttggtgcggcgctgaaggagattacaatgtcatggtcatggaactcctaggcccttccctcgaagatctatttaatttttgcagcaggaaattcagcctgaagactgtgcttcttctcgctgatcagatgaataatcccgaggaaatgacgtggtccctgtgggcgacatgctag

SEQ ID NO: 217149 - DNA, 1251 bp, synthetic construct
  misc_feature 1..1251: note = Description of Artificial Sequence: Synthetic coding sequence
  source 1..1251: mol_type = other DNA
atggagctacgcgtgggcaacaagtacaggcttggccgtaaaatcgggagtggctcctttggggatatctatcttggggcaaacatcgcctctggtgaggaggtagccatcaaactggaatgcgtgaagactaaacatcctcagctccacatcgaatctaagttctacaaaatgatgcaagggggtgtaggtatcccgtccattaaatggtgtggcgcagaaggtgattacaacgtgatggtcatggaactactgggaccctcccttgaagacttgtttaacttctgcagccgcaagtttagcctaaagactgtactgctgctcgcagatcagatgatctcacggattgagtacatccacagtaaaaattttatccatcgcgacgtgaagcctgataatttccttatggggctgggaaagaaaggtaatttggtatacattattgatttcgggctcgcaaagaaatacagggacgccagaactcaccaacacattccatacagggagaacaagaacctgaccggcacagcacgttacgcttcaatcaatacgcacctgggaattgagcagtcaaggcgagatgacctagaatccctcggttatgtcctaatgtactttaacctgggttcattaccctggcaggggctgaaggctgctaccaagcgacaaaagtatgaaagaatcagtgaaaagaaaatgagcactccaatcgaggtgctgtgcaagggatacccgtccgaattctctacctatcttaatttctgcagatctttgcgcttcgacgacaagcccgattacagttatctaagacaactgtttaggaatttgtttcacagacagggtttctcttacgactacgtgtttgactggaacatgctgaagttcggagccgctcggaacccagaagacgtcgatcgggagcgcagagagcatgaaagggaagaaagaatgggccagcttagaggcagcgcaacaagggctttacccccaggccctcctacaggcgctacagccaacaggcttcgcagcgccgctgagccagtcgcatcgacacccgcaagtcgaatacaacctgctggtaatacctctcctcgtgctatatccagggtagacagagaacggaaggtcagcatgcggttgcatagaggtgcccctgccaatgtgtcttcctctgatctgacaggacgccaggaggtctctcgaatcccggcatcccagacaagcgtgccatttgaccacctcgggaagtag

SEQ ID NO: 217150 - DNA, 360 bp, synthetic construct
  misc_feature 1..360: note = Description of Artificial Sequence: Synthetic coding sequence
  source 1..360: mol_type = other DNA
tgacgaaatcccgaggacgttgacagagaaagacgtgagcacgagcgcgaggagaggatgggccagttgagaggatctgccaccagagctttacctcctggccctcctactggcgcaacagcaaatcggctgaggtcagctgccgagcccgtggcttcaaccccggcttcacgcattcaacccgcaggaaatactagcccacgcgcaataagtcgcgtagatagagagaggaaggtgtcgatgcgcctacaccgaggcgctcctgcaaacgtgtcctccagcgatttgaccgggagacaggaggtcagcaggatccccgcttcccagaccagcgtaccatttgaccacctcggtaagtag

SEQ ID NO: 217151 - DNA, 1251 bp, synthetic construct
  misc_feature 1..1251: note = Description of Artificial Sequence: Synthetic coding sequence
  source 1..1251: mol_type = other DNA
atggaactcagagtgggcaataaatataggttaggccgtaagattggctccggctcttttggtgacatttatctgggcgcaaatatagcctccggcgaagaggtcgcaattaagcttgagtgcgtaaagactaagcacccccagctgcatattgagagtaagttttacaagatgatgcagggcggagttggaattcccagcattaagtggtgcggcgctgagggggactacaatgtgatggtgatggagctcctcggcccatctctggaagacctcttcaacttttgctctcgcaagtttagcctcaagactgtcctcctcctcgctgaccagatgatatctcgaattgagtatattcactcaaaaaacttcattcatcgagacgtaaaaccggacaattttttgatgggcctcggcaagaaggggaatctcgtatatatcatcgacttcggactggcaaaaaagtaccgcgacgccagaacccaccagcacattccgtacagggagaacaagaacctaactggaacagcccgatacgcctctattaatacacacctagggatagagcagagccggcgagacgacctggagtctcttggctacgtattaatgtactttaatctgggctcactgccttggcaggggttgaaagcagcaacaaagcggcaaaagtatgagaggatcagcgagaagaaaatgagcacacctatcgaagttctatgcaagggatacccttccgagttttccacgtacttgaacttttgcaggtcgcttcggtttgacgataagccagactattcctacttgcgccagctcttcaggaacctgttccaccgacagggattttcttacgactatgtattcgactggaacatgctgaagtttggcgctgcaaggaatccagaggacgtggacagggagaggcgggagcacgagagagaagagagaatgggtcaactccgtggcagcgccacgcgcgctttgcccccaggcccacccacaggagctacagctaatcgcctcaggagcgctgcggaacccgtggcatccacgcctgcatctcggatccagcctgcagggaacacttctccacgcgctataagccgggtagacagggaaagaaaagtgtctatgcggcttcaccgaggtgccccagcaaatgtttctagttctgatcttactggaaggcaggaagtgtccaggatcccagcttcccaaacctctgtgccctttgatcatctggggaagtag

SEQ ID NO: 217152 - DNA, 1251 bp, synthetic construct
  misc_feature 1..1251: note = Description of Artificial Sequence: Synthetic coding sequence
  source 1..1251: mol_type = other DNA
atggagttgcgggtaggcaataaataccgactgggccgaaagattgggtctggctcttttggagatatctaccttggcgctaacatagcgagtggcgaggaggtggctatcaaactggaatgtgtaaagacgaagcacccacaacttcacatagagtccaaattctataaaatgatgcagggaggcgtcggcataccatcgataaaatggtgcggcgcagagggcgattacaacgtgatggtaatggaactgctaggtccgtctcttgaggatcttttcaatttttgctccaggaaattctccttgaaaaccgtgctcctgctggctgaccagatgatctctcgcattgagtacatacacagcaaaaacttcatacaccgagatgtgaagcccgacaactttctcatgggcctgggcaagaaggggaatctcgtgtacattatcgacttcgggttggcaaaaaaataccgcgatgcacgtacccatcagcacataccctatcgggaaaacaaaaacctgactggaactgctaggtacgccagcattaacactcacctggggattgagcagagcaggagagacgacctggagtcccttggctacgtcctgatgtactttaacctgggctcattgccttggcagggtctgaaagccgctactaagcgccagaagtacgaaagaattagcgagaagaagatgtctacaccaattgaggtgctgtgtaaagggtatcccagtgaattttcaacttacctgaacttctgtcgaagtctccggtttgacgacaagcccgattacagctatctgcgacagctttttaggaacctgttccataggcaggggtttagttacgactacgtgttcgactggaatatgctgaaatttggcgctgccaggaaccccgaagatgtggacagggagcggagggagcacgagcgtgaagaaaggatgggccagctccggggatccgcaacaagagccttacctcctggaccccctactggagctacggccaatagactcaggagcgcagccgaacctgtggcgtctacgccagcgtcgcgtatccaacctgcaggaaacacgtctcctcgagcaatctcccgcgtggatcgggagagaaaggtgtccatgcgcctccaccggggtgcaccagccaacgtgtctagttcggatcttactggccgtcaggaagtaagtagaatcccggcttcgcagaccagcgtgcccttcgatcaccttggcaagtag

SEQ ID NO: 217153 - DNA, 1251 bp, synthetic construct
  misc_feature 1..1251: note = Description of Artificial Sequence: Synthetic coding sequence
  source 1..1251: mol_type = other DNA
atggaactgcgcgtcggaaacaagtataggctgggcagaaagattgggtctggatccttcggggatatttacctgggcgcaaatattgccagtggtgaggaagttgcaatcaagctcgaatgcgtcaaaacaaaacaccctcagctgcacattgagtccaaattttacaaaatgatgcaaggaggtgtgggaatcccttccatcaagtggtgcggagccgagggtgactataatgtgatggtgatggagcttctcggacccagcttagaagacctgttcaacttttgctcccgcaagtttagtctaaagacagtgctgctcctggctgatcagatgatcagtaggattgagtacattcactccaaaaatttcatccaccgggatgtcaagccagacaacttcctgatggggttgggaaagaaaggcaacctggtttatatcatcgatttcggactggctaagaaatatagggatgctcgaacacatcagcacataccatatagggaaaataaaaatttaaccggtacagctcgctacgcatctattaatacacatctagggattgaacagagtcgcagagacgacctcgaatcactgggctacgtgctcatgtacttcaatctgggcagtcttccctggcaaggactgaaggcggctactaaaaggcagaagtatgaacggatctctgagaaaaagatgagcacacccatagaggttctatgtaaaggctatccaagtgagtttagtacgtacctgaatttttgcaggtcactgaggtttgatgataagcctgactattcctatcttcggcaactttttcgaaacctgtttcaccgccaagggtttagttacgattatgttttcgactggaatatgctcaagttcggggctgctcgcaaccccgaggacgtggatagggagaggagggagcacgagagagaagaaagaatgggccagctgcgcggatcagccacccgagcactaccccctgggcctccgaccggagcaaccgccaatcggctacggagcgccgcagagcccgttgcctctacgcccgcttcacgtatccaaccggctgggaacacttctcccagagccataagcagagtggatagagaacgaaaggtgagtatgcgcctgcaccgaggagcacctgcaaatgtttcgtcttccgaccttaccggtagacaggaggtgtcccgtataccagcgagtcaaacaagcgtacccttcgaccacctgggaaagtag

SEQ ID NO: 217154 - DNA, 1251 bp, synthetic construct
  misc_feature 1..1251: note = Description of Artificial Sequence: Synthetic coding sequence
  source 1..1251: mol_type = other DNA
atggagttacgggttggcaacaaatatcggctagggaggaagatcggctcaggaagctttggggatatatacttgggagccaatatagccagtggtgaggaggtggccatcaagcttgagtgcgtgaagacgaagcacccgcagctgcacattgagtctaaattttataaaatgatgcagggcggagtcggcattcccagcatcaagtggtgcggcgctgagggagactacaacgtgatggtgatggagctgctcggaccgtccttagaagatttgtttaacttttgctcacggaagttctccctcaagaccgtactccttctagctgatcagatgatctcaaggattgagtacatacacagcaagaatttcatccatagagacgtgaaacccgacaatttcctgatggggcttggaaagaaagggaacttagtgtatatcatcgacttcggtctcgcgaagaaatacagagatgcacggacccaccaacacataccatatcgcgaaaacaagaaccttactggtaccgccagatacgctagcataaacacacatctggggattgaacagagccggcgagacgatctggagagcctcggatatgtcctaatgtattttaaccttgggtcactgccgtggcagggtctgaaggccgcaacaaaaaggcagaaatatgagcgcatctctgaaaaaaaaatgagcactcctatagaagtcttgtgcaaagggtacccatccgaattctccacctacctcaatttttgcaggagtctgagatttgacgataaacccgactattcttacttaaggcagctgttcagaaatttgtttcaccggcaaggattctcatatgactacgtgttcgattggaacatgttgaagtttggtgccgctcgaaaccccgaagacgtggacagagagcgcagagagcacgagcgcgaggagaggatgggccagctccgtggcagcgccaccagggctctacctcccggtcccccaactggagccaccgcgaacaggctgaggtctgccgctgagccagtcgcctctactcccgcttcgcgtattcaaccagccggaaatacaagcccgcgagctattagccgtgttgatcgcgagagaaaggtcagcatgcgcctgcatagaggggcacccgctaacgtgagctctagtgaccttacaggccgacaagaggtgtcacggatcccagcgtctcagaccagcgtcccgttcgaccacttggggaagtag

SEQ ID NO: 217155 - DNA, 678 bp, synthetic construct
  misc_feature 1..678: note = Description of Artificial Sequence: Synthetic coding sequence
  source 1..678: mol_type = other DNA
atggaattgcgagtaggcaacaaataccggctcgggaggaaaatcggatcgggatctttcggcgacatctaccttggcgcaaacatagcctccggagaggaggtcgccattaaactggaatgtgtgaagacaaaacacccccaactccacattgagagtaagttctacaagatgatgcagggcggagtgggtattccctctattaagtggtgtggagccgagggagattataacgtgatggtgatggagctgctgggcccttcccttgaggacctgttcaacttttgtagccgaaagttctccctgaaaacagtgctcttgctggctgatcagatgatcagccggatagagtacatacacagcaagaatttcatccacagagatgtcaagcctgataacttccttatgggactagggaagaagggcaacctggtgtacattatcgacttcggactggccaaaaaatatcgggatgcgagaacccatcaacatattccgtacagggagaacaagaacctgacaggaactgcaagatacgcaagcataaacacccacttagggattgagcagagtaggagagacgatctagagtcattggggtacgtgttaatgtattttaacctggggagtctgccatggcagggactaaaagctgcaactaagaggcagaagtattag

SEQ ID NO: 217156 - DNA, 435 bp, synthetic construct
  misc_feature 1..435: note = Description of Artificial Sequence: Synthetic coding sequence
  source 1..435: mol_type = other DNA
tgacgtaacctctttcaccgacaaggattttcctacgattacgtgttcgattggaacatgctgaagttcggcgctgctaggaaccccgaggacgtcgaccgtgagcgaagggagcatgaaagagaggagaggatgggccagctaagagggagcgctactcgcgcactgcctccagggcctcctaccggggctacagccaaccggttacgaagtgccgctgagccagtggcatctacccccgcatcacgaattcaacccgcaggaaacacaagccctagggctatcagcagagtggaccgggagcggaaagtgtcaatgaggctacatagaggtgctccagcaaatgtgagctcatccgatcttacaggcaggcaagaagtgtcacggataccagctagccaaacctccgtcccttttgaccatttaggaaagtag

SEQ ID NO: 217157 - DNA, 1182 bp, synthetic construct
  misc_feature 1..1182: note = Description of Artificial Sequence: Synthetic coding sequence
  source 1..1182: mol_type = other DNA
atggaccaccctagtcgggaaaaggacgagaggcagaggaccaccaagccaatggctcagcgaagcgcccactgctcccgaccgtcaggctcatctagctccagtggtgtgcttatggtcggtcccaactttcgggtcggtaaaaagatcggatgtggaaattttggtgaattaaggctcggcaagaacctctacactaacgagtacgttgctataaagctggagccaatcaaaagccgtgcccctcagctccacctggaatatagattttacaaacaactgggatccgccggagaagggcttccccaggtgtattactttggaccctgtggcaaatacaatgccatggtccttgaactgcttggcccaagcctcgaggatctctttgatttatgcgaccggacattcaccctcaaaacagtgctaatgatagccatccagctgctatcaagaatggagtacgtgcactcaaaaaacctcatctacagggacgtcaagcccgaaaactttctgatagggcgtcagggcaacaaaaaggagcacgttatacacatcatcgacttcgggctcgccaaggagtacattgacccagagactaaaaagcatatcccctacagggagcataagtcattaacaggcacagctcgatatatgtccataaatacccacctgggtaaggagcaatcacgtcgggacgatctggaagctctgggccacatgttcatgtactttctgcggggatctctgccctggcagggactcaaagccgacactctgaaagaacggtatcagaagatcggagatacaaaaagaaatacgcccattgaggcactctgcgaaaatttccctgaggagatggcaacttacttaagatacgtccgacgcctggacttctttgagaaaccagattacgaatacctgcggacccttttcacagacctcttcgagaagaaggggtatacatttgactatgcgtacgattgggtaggaagaccgatcccaacaccagttgggtctgtccacgtggactccggggcttccgctataacgcgggaatcacacactcacagagaccggccatcgcaacagcagccgctccggaatcagtctctgcggacagtaactgcggagcactacgacgtaaataacagcgcaatatggcaccgcggaaggggaacttag

SEQ ID NO: 217158 - DNA, 1269 bp, synthetic construct
  misc_feature 1..1269: note = Description of Artificial Sequence: Synthetic coding sequence
  source 1..1269: mol_type = other DNA
atggatcatccaagccgcgagaaagacgagaggcaacgaacaactaagcccatggcacagcgttccgcccactgttcaaggccttctggcagtagttcgtcaagtggcgtattgatggtgggacccaacttccgagtgggtaaaaaaattggatgcggcaattttggagaactgcggctggggaaaaacctttatacaaatgagtatgtggctatcaagctcgagcctataaagagtcgggcaccacagcttcatctcgagtaccggttttacaagcagctgggctctgctggtgaagggcttcctcaggtgtactattttgggccatgcgggaaatacaatgcgatggttctcgagctactcggcccaagcctggaagatctgttcgacttatgtgacaggacttttacactgaagacagttctgatgatcgctattcagttgctgtctagaatggaatatgtccattccaagaacctcatctatcgtgatgtgaaacccgaaaacttccttataggacgccaagggaataagaaggagcatgtgatccacatcatcgattttggcctagccaaagagtatatcgatcctgaaacaaagaagcatattccttatagggaacataaatctctgaccggaacagcaaggtacatgtctattaatactcacctgggcaaggagcaatccagacgagatgatctcgaggctctggggcatatgtttatgtactttctcagaggtagcctgccctggcagggcctgaaagctgatactctgaaagagaggtaccaaaagatcggggatacgaagcggaatactccaatcgaggccctgtgcgagaacttcccggaggagatggcaacttatctcagatacgttcggaggctggatttctttgagaaacctgactacgaatacttacgcacccttttcactgatcttttcgaaaaaaagggatacaccttcgactatgcatatgattgggtcgggagaccaatccctaccccagttggctctgtccacgtggattcgggggctagcgccattacccgggagtcccacacacatagagataggccttcacagcaacagccgttgcggaaccaggtggtctcatcgacaaatggagaactgaacgtggacgaccccacaggcgctcactccaacgcgccaattaccgcccatgctgaagtggaagttgtggaggaagccaagtgttgctgcttctttaagcggaagcgtaaaaagacagcccaaaggcacaaatag

SEQ ID NO: 217159 - DNA, 1137 bp, synthetic construct
  misc_feature 1..1137: note = Description of Artificial Sequence: Synthetic coding sequence
  source 1..1137: mol_type = other DNA
atggatcatccttccagggagaaagatgaacgtcagaggacaacaaaacctatggcacaacgaagtgcccactgctccaggcccagcggcagttcctcgagctctggcgtgttgatggtcggcccaaatttcagagtgggcaagaagataggctgcggcaacttcggtgaactgcggcttggtaaaaatctctatactaacgagtacgttgcaatcaaactggaactgctgggccctagtctggaagacctgtttgacttatgcgaccggacattcacgctgaagaccgtcttgatgatagccattcagctgcttagccgcatggagtacgtgcatagtaaaaacctaatctatcgggacgtcaagcccgagaattttttgattggaagacagggcaacaaaaaagagcacgttatacacataatcgactttggcctcgcgaaggaatatattgacccagagaccaagaaacacattccatatcgggagcacaagtcactgacaggcactgctcgctacatgagcattaatacacacctggggaaagaacaatctagacgggacgacttggaagctctcggccacatgtttatgtattttcttagaggctccttaccctggcagggtcttaaagccgataccctaaaagagaggtaccagaaaattggagacaccaaacgcaacactcccatcgaggccttatgtgaaaattttcccgaagagatggcaacttatctgcggtacgtgaggagattagacttcttcgagaaacctgactacgagtatctgcgtacacttttcacagacctgttcgagaagaagggctatactttcgattacgcttatgactgggtcggccgacctattccaacaccagtcgggagtgtccatgtggactccggagccagtgccataacccgcgagagccacactcacagggaccgaccctcccagcagcaacccctgagaaatcaggtagtgagctccacgaacggcgagctgaatgttgatgacccaactggggcacactctaacgctccaatcaccgcccacgcggaggtggaggtcgtggaagaggcaaagtgctgctgtttcttcaagaggaaacgaaagaaaacagctcagcgccacaaatag

SEQ ID NO: 217160 - DNA, 1248 bp, synthetic construct
  misc_feature 1..1248: note = Description of Artificial Sequence: Synthetic coding sequence
  source 1..1248: mol_type = other DNA
atggattttgacaagaaaggcggtaagggagaaacagaggagggccgtcggatgtcaaaggctggcggtggaaggagtagccacggtatccggtcatcaggaacatccagtggagtgttgatggtcggaccaaatttccgagtaggcaagaagatcgggtgtgggaattttggggaacttagactggggaaaaacctgtataccaatgagtacgtagctatcaaacttgagccaattaaaagtagggcccctcagttacatttggagtacaggttttacaaacagctctctgcaaccgaaggtgtcccccaggtttattactttgggccttgcggcaaatacaatgccatggtcttagaactactgggcccttccttggaggacctgtttgacctctgcgatagaacatttactctgaagactgtgttaatgattgccattcagctcatcactaggatggaatatgtccacacaaagtccctcatttatcgcgatgtgaagccggaaaatttcctggtggggagacccggaaccaagagacaacatgcgattcatatcatcgattttggattagcaaaggaatacatcgatccagaaacgaaaaaacacattccgtatagagagcacaagagcctgacaggcaccgcgagatatatgtcaattaatacccatctgggcaaggaacagagtcggagggatgacctggaggccctggggcacatgttcatgtattttctgcgcggaagccttccgtggcaagggttgaaagccgatacgcttaaggagcggtaccagaaaatcggggacacaaagagggcgactccgatcgaggtgctctgcgagaatttcccagaggaaatggcaacttatttacggtacgtaaggagactcgacttctttgaaaagcccgactacgattacctgcggaagttgtttaccgacctgtttgatcggtccgggtttgtcttcgactatgaatatgactgggctgggaagccattaccaactcctatcgggacagtgcacaccgatctgcctagtcagcctcagctgagggacaagactcaaccgcacagtaagaaccaggcactcaattctactaatggagagttgaacgctgatgaccccacagcaggccattcaaatgctccaatcactgcgccagccgaggtggaagtggcggatgagacaaaatgttgttgcttctttaaacgcagaaaaaggaagagcctccagagacataaatag

SEQ ID NO: 217161 - DNA, 645 bp, synthetic construct
  misc_feature 1..645: note = Description of Artificial Sequence: Synthetic coding sequence
  source 1..645: mol_type = other DNA
atgtcaatcaatacacatcttggcaaagagcagtcccggagggacgacctcgaagctctcggccacatgttcatgtactttctgaggggaagcctcccatggcaagggctgaaggccgacacacttaaggaacgctaccagaagattggggacactaaacgggcaacccctatcgaagtcttgtgcgagaattttcccgaggagatggctacatacctccgatatgttaggcgcctggacttcttcgaaaagcccgattatgattatctcaggaagctgttcaccgatctgttcgaccgcagcggctttgtgttcgactatgaatacgattgggcaggtaagcccctgcctacacccattggtacggttcacactgacctgccatctcaacctcaacttcgggataagacgcagcctcccgaaagcagcccatgcagccctctggggagagatttggtgagaggcccacgtggccctcctaccgccgctcaaggtcagacattagccggtagccagaacgccgactgcagggggagagcatggctacgtaggccacacccaagagacgtgggttctctcccttcctgtaagacccttgctgagatctctacacccgtgtcttccccacccttgcaagaacactag

SEQ ID NO: 217162 - DNA, 1272 bp, synthetic construct
  misc_feature 1..1272: note = Description of Artificial Sequence: Synthetic coding sequence
  source 1..1272: mol_type = other DNA
atggagaataaaaagaaggataaggataagagcgacgacaggatggctcgaccgtcaggaaggagcggccataacactcgcggtactggctcttcatcgtctggcgtgctgatggtgggccctaactttagggtcgggaaaaaaattgggtgtgggaattttggcgaattgaggcttgggaagaacctgtacacaaacgaatacgtggcaatcaaactggagcccatgaagagccgcgcaccccagctccacctagaatatagattttacaaacagctgggaagtggggatgggataccacaggtctactattttggcccttgtggaaaatataacgccatggtactggagcttctgggaccttctctcgaagacctgtttgatctgtgtgatcggaccttcagtctgaagactgttcttatgattgccattcagctcatttcgcggatggaatatgtgcacagcaagaatctgatttacagagatgtgaaaccagaaaactttttaattggcaggcccggaaataagacgcagcaggtgatccatattatcgactttggactcgctaaggagtacattgaccctgaaacgaaaaagcacataccctaccgggagcacaaaagccttactggcactgccagatacatgtctatcaatacacacttgggaaaggaacaaagcaggagggacgatcttgaggccctcggacatatgttcatgtactttctccgtggtagtttgccctggcagggtttgaaagctgacacactgaaggagcggtatcaaaaaattggagatactaagcgggctacacccatcgaggtcctttgtgaaaatttccctgagatggccacttatctgcggtacgtgcgtaggctggattttttcgaaaagccggactacgattacctaagaaaattgtttacagatctgttcgatcggaagggatatatgtttgactatgagtatgattggattgggaagcagctgcccacccccgtgggcgctgtgcagcaagatccagctctctcatctaaccgcgaggcacatcagcatcgcgacaaaatgcagcagagcaagaaccaggtggttagtagtactaacggcgaacttaatacagatgaccccacagccggacgtagtaatgctcccataacagcgcctactgaggtggaggttatggatgaaacaaattgccagaaagttctgaacatgtggtgctgttgctttttcaagaggcgtaagcggaaaacaattcagcggcataagtag

SEQ ID NO: 217163 - DNA, 1368 bp, synthetic construct
  misc_feature 1..1368: note = Description of Artificial Sequence: Synthetic coding sequence
  source 1..1368: mol_type = other DNA
atggagaacaaaaagaaagacaaagacaaaagcgatgatcggatggctagacccagcggtaggtctggccacaacacccggggaaccggcagtagcagcagcggcgtgttgatggttggccctaactttcgagttggcaaaaagatcggctgtgggaactttggcgagcttcgtttaggaaagaacctttataccaacgaatacgtggctataaaactggaacctatgaaaagccgcgctcctcagctgcaccttgagtacagattttacaagcagctgggcagcggggatggcattcctcaggtctattacttcgggccttgtgggaaatacaacgcaatggtgttggagctgctaggtccttctctcgaggatctgtttgatctctgcgataggacttttagcttgaaaacagtcctgatgatcgcaatacagcttatcagccgtatggaatacgtccacagtaagaatctgatctaccgggacgtgaaacccgagaacttcctgatcggaagaccagggaataagacccagcaagtaattcatattatcgatttcggcttagctaaagagtatatagaccctgaaaccaaaaagcacatcccctaccgtgagcataagagtctgaccggcactgcaaggtatatgagcatcaacactcacctgggaaaggaacagtctcggagagacgatctggaggccctggggcacatgtttatgtactttttgagaggatcattgccatggcagggtctgaaagcggatacactaaaggagcgctatcagaagattggggatacaaaacgggcaacaccaatcgaagtgctctgtgagaatttccccgagatggcaacctatctgagatatgtgagacggcttgacttcttcgagaaaccagactatgattatcttcggaagcttttcaccgatctgttcgatcgcaaagggtacatgttcgactacgagtatgattggattgggaagcaactccccacgcccgtgggagccgtccaacaggatcctgccctgtcctcaaatcgggaggcacatcagcaccgggataaaatgcagcagagtaagaatcagagcgcggaccaccgggcagcctgggactcccagcaggccaacccacatcacctcagagcccacttggcagctgatcgccatgggggttcagttcaggttgtttcaagcactaatggtgaactcaatacagatgacccaacagccggtaggtctaacgcgcctattacagcaccaaccgaagtggaggtcatggacgagaccaattgccagaaggtactgaacatgtggtgttgctgcttctttaaacggaggaagcgcaagacgatccagcggcacaagtag

SEQ ID NO: 217164 - DNA, 1344 bp, synthetic construct
  misc_feature 1..1344: note = Description of Artificial Sequence: Synthetic coding sequence
  source 1..1344: mol_type = other DNA
atggagaacaaaaaaaaagacaaagacaagtccgacgatcgtatggccagaccgtctgggcgatcaggccataacacccgcggaacaggtagttcctcttctggcgttcttatggtgggtcctaactttcgtgtagggaaaaagatcgggtgtgggaattttggagagctgagattagggaagaacctatataccaatgagtatgtagctattaaattagagcccatgaaaagccgcgcaccccaacttcatctggaatacaggttttacaagcaactaggcagtggcgatggaattccacaggtgtactacttcggcccatgtgggaagtacaacgccatggtgcttgaactgctggggccaagcttagaggacctgtttgacctatgcgacaggacttttagcctgaagaccgtgctgatgatcgcaattcaacttatctcacggatggagtacgtgcacagcaaaaacttaatctacagggatgtcaaaccagagaactttcttataggacgtccgggaaataagacacagcaggttattcatattattgacttcgggctggctaaagaatacattgatccagaaaccaagaaacatattccctatcgggagcataagtccctgaccggcacagccagatacatgtcaattaacacacacttgggcaaagagcaatcacggagagacgatctggaggctttagggcatatgttcatgtattttctgaggggatctctgccgtggcagggccttaaagccgacaccctgaaggagcggtatcagaaaatcggggacacaaaacgggcaaccccaattgaggtgctgtgcgagaacttcccagagatggcaacatacctcagatatgtaagacggctggattttttcgaaaagccagattatgattacctcagaaaactgttcacggatttattcgatcggaaggggtacatgttcgactacgaatatgattggattggtaagcagctgcctactccagtgggagcagtgcagcaggaccccgcactgtcctctaatcgagaagctcaccagcatcgggacaagatgcaacaaagcaaaaatcaatccgcagaccaccgcgcagcatgggattcccagcaagccaatccacaccatcttagggcccacctcgcagcagatcgacatgggggtagcgttcaggttgtgtctagtacgaatggcgagttaaataccgatgatccaaccgctggtaggtcgaatgctccgatcacagccccaaccgaagtggaagtgatggacgagacaaagtgctgttgctttttcaagcgtaggaagagaaaaactatccagaggcacaaatag

SEQ ID NO: 217165 - DNA, 1344 bp, synthetic construct
  misc_feature 1..1344: note = Description of Artificial Sequence: Synthetic coding sequence
  source 1..1344: mol_type = other DNA
atggaaaataaaaaaaaggacaaggataaatctgacgacagaatggccaggccctcaggaaggagtggacataatactcgtggcacaggctcgagctcctcaggcgtattgatggtgggccctaacttccgagtgggaaagaaaatcggatgtggtaacttcggggagctacgtctcggaaagaacctgtataccaatgagtacgtcgcgatcaagctcgagcctatgaagagccgggctcctcagttgcatctggaatatcgcttctataagcagctcggtagcggagacggcataccgcaggtgtattacttcggaccttgcggaaaatacaatgctatggtgttggaattactgggtccctcactcgaggacctgttcgatctgtgcgataggacattctcccttaaaactgtgcttatgatcgccattcagctcataagcaggatggaatatgtgcacagcaaaaatctaatctatagggatgtcaagcctgaaaattttctgatcggcaggccaggtaacaagactcaacaggttatccacattattgactttggtctggctaaggagtacatcgaccccgagaccaagaagcacattccgtatagggagcataaatccctaacaggcactgctagatacatgtctattaacactcacttaggaaaggagcaaagtcggagagacgacctggaggctctgggacacatgtttatgtactttttgcgtgggtccctgccttggcagggattaaaggcagacacactaaaagagagatatcagaagatcggggacacaaagcgagcaacaccaattgaggtactgtgcgagaactttccagagatggccacctatctacggtacgtgagacggctggatttttttgaaaagcccgattacgactacctgagaaagctgtttactgatctcttcgatagaaaagggtacatgttcgactatgagtatgattggatagggaaacagctgccaaccccagttggggcagtgcagcaagatcctgcactgagctctaatcgtgaggcgcaccagcacagagataagatgcaacagtccaagaatcaaagcgccgaccatagggcggcttgggactctcagcaagcaaatcctcatcatttacgcgctcatctagccgcagacaggcacggcggtagcgtgcaggtggtgagcagcacaaacggcgagttaaacaccgacgacccaactgctgggaggagcaatgcccctatcaccgcgccaacagaagtggaggttatggatgaaaccaaatgctgctgcttctttaagcggagaaaacgcaaaaccattcaacgacataaatag

SEQ ID NO: 217166 - DNA, 1368 bp, synthetic construct
  misc_feature 1..1368: note = Description of Artificial Sequence: Synthetic coding sequence
  source 1..1368: mol_type = other DNA
atggaaaataaaaagaaagacaaggataaatctgatgatcgtatggcacgaccctcaggtcgctctggacacaacacaagagggactggatcttccagcagtggggtgcttatggtgggaccaaacttccgagtagggaaaaagattggctgtgggaatttcggcgagctacggctgggaaagaacctttatactaacgagtacgtggcaatcaaactggagcctatgaaatcacgcgcaccccagctgcacctggaatatcgtttttataagcagcttggctcaggcgacggcatccctcaagtgtactacttcggcccttgcggaaagtataatgccatggttttggagctgctcggccctagcctggaagatttatttgatctgtgcgacaggacattctcactcaagaccgtgcttatgatcgcgatccagttgatcagcagaatggagtatgtacacagtaagaacctgatataccgtgatgttaagccagagaattttttgatcggacggccagggaacaaaacccagcaagtaatacatattatcgactttgggctggccaaggaatatatagaccccgaaaccaagaagcacataccatatcgggagcacaaaagtctcacgggaaccgcaagatacatgagcatcaacacacaccttggtaaggaacagtctagaagagacgacctggaagccctgggccacatgtttatgtattttctgcgtggcagtcttccatggcaaggcctgaaggccgataccttgaaagagcgctatcaaaagattggagacacaaagcgcgctacccccatcgaagtgctgtgcgagaatttcccggagatggctacttacctcagatacgtgcggagactcgacttttttgagaagcccgactacgactacttgcggaaactgtttacagacctcttcgatagaaaaggctacatgtttgattacgagtatgactggatcggtaaacagctcccaacaccagtaggagccgttcagcaggaccctgccctgagcagtaatagagaggcccaccagcatcgggataagatgcaacagtcaaaaaaccagtcggcagaccatcgagctgcatgggactctcaacaggcaaacccccaccacctccgcgcacatctggccgctgacagacacggcggaagcgttcaggtggtgtcgtccaccaatggcgaactgaatactgacgatccaactgccggaaggtccaatgcgccaatcacagcacccaccgaagtggaagttatggacgagactaactgccagaaagtcctaaatatgtggtgctgttgcttctttaaacgacgtaaaaggaagacaatccagagacacaaatag

SEQ ID NO: 217167 - DNA, 1275 bp, synthetic construct
  misc_feature 1..1275: note = Description of Artificial Sequence: Synthetic coding sequence
  source 1..1275: mol_type = other DNA
atggagaacaaaaaaaaagataaagataaaagtgatgatcggatggcccgaccatccggtcgatctgggcacaacacccgcggaactggatcttcctcaagtggagtgctgatggtaggccctaactttcgagtgggcaaaaagatcggatgtggcaactttggggagctgaggctcggaaagaatttgtacaccaatgagtatgtagcaattaagctcgaacccatgaaaagtcgcgcaccgcagctgcaccttgagtatcggttttacaagcagctgggctcaggcgatggcattcctcaggtctactatttcggaccatgtggtaaatacaatgcaatggtgctggaattactcggcccatccctggaggatctgtttgatctgtgtgaccggactttttccctgaaaacagttctgatgattgccatccagctcatcagccgcatggaatacgtgcacagtaaaaacctgatctatcgggacgtgaagcccgaaaactttctcatcgggagacccggaaataagacacagcaagtgattcacattatcgacttcggactagcgaaagagtacatcgaccccgaaaccaagaaacatattccttatcgggagcacaaatccctgacagggactgctcgatacatgagtatcaacacacaccttggaaaggagcaatcccgacgtgatgatttggaagccctgggccatatgttcatgtactttcttcgaggcagtctgccatggcaagggcttaaggccgacacgttaaaggagcggtatcagaaaatcggcgataccaagcgcgcaacccctatcgaggtcctatgcgaaaatttcccggaagagatggctacttatctacgatatgtccggagacttgacttcttcgaaaaacctgactacgactatctgcgaaagctgttcactgatcttttcgatagaaagggctacatgttcgactatgaatacgattggatcgggaagcagctccctacccccgtgggggctgtgcaacaggaccccgcactctcaagcaaccgggaggcccaccaacaccgggataaaatgcagcaatctaaaaaccaagtggtgagctctacaaatggggagctcaacacagacgaccccactgccggtcggtccaatgcacccatcaccgctccaacagaggttgaagtgatggatgaaactaattgtcagaaggtcttaaacatgtggtgctgctgcttcttcaaacgacgtaagcgcaagacaatccagcgtcataaatag

SEQ ID NO: 217168 - DNA, 1272 bp, synthetic construct
  misc_feature 1..1272: note = Description of Artificial Sequence: Synthetic coding sequence
  source 1..1272: mol_type = other DNA
atggaaaataagaagaaagataaggataaatcggacgaccgtatggctcgtccgagcgggcgttccgggcacaataccagggggacaggtagttccagtagcggagtcttgatggtgggcccaaattttcgggtgggtaagaagatcgggtgcgggaatttcggggagcttcgccttggtaagaacctgtataccaatgagtacgtggctattaagctggaacccatgaaatcccgggcacctcagttacatctggaatatcgcttctataaacagctgggcagtggcgatggaatcccacaggtgtactactttggaccatgcggcaaatacaacgccatggtacttgaactcttagggccatcactcgaagacctgttcgatttatgcgacagaaccttttccctgaaaacagttcttatgattgctatccaactgatttcccggatggagtacgtgcacagcaaaaacctaatctaccgcgacgtgaagcctgagaattttttaataggacgaccgggaaataaaacgcagcaggtcatacatatcatcgatttcggcctagccaaggagtacattgatccagaaacaaaaaaacacatcccttacagagaacataaaagcctcaccgggactgccaggtatatgagcattaatacccatctgggcaaggaacagtctagacgcgacgatttggaggccttgggacacatgttcatgtattttcttagaggttctctcccgtggcaggggctgaaagccgacactctgaaggagaggtaccagaaaattggggatactaagagggctacaccaatcgaggtgttgtgtgagaatttcccagagatggctacttaccttaggtatgtgcggcgactggatttcttcgaaaagccggattacgattatctgcgcaaattatttacagatctctttgatcgcaaagggtacatgtttgattatgaatatgattggatcggaaagcaactcccaacaccagtaggtgcagtacaacaagacccagctctctccagtaatagggaagcccatcaacatagagacaagatgcagcagagcaaaaatcaagttgtaagttctaccaatggggaattgaacacggacgacccaaccgcaggaagatcgaacgcgccaatcacggcccctacggaggtagaggtgatggatgagaccaattgccaaaaggtgctgaacatgtggtgctgttgcttttttaagaggaggaagcggaagaccatccagcgacataagtag

SEQ ID NO: 217169 - DNA, 648 bp, synthetic construct
  misc_feature 1..648: note = Description of Artificial Sequence: Synthetic coding sequence
  source 1..648: mol_type = other DNA
atgagtagctctgaggaggtcagttggatttcctggttttgtgggctcagaggaaacgaatttttttgcgaggtggatgaagactacattcaggacaaattcaaccttacgggccttaatgagcaggtcccacactacagacaggcactggacatgatcctcgaccttgagcccgacgaggaactggaagacaaccctaatcagtctgatcttattgagcaggccgcagagatgctctacggtctaatccacgccagatacatcctgacaaatcggggtatcgctcagatgctggaaaagtaccagcagggggacttcggatattgccctcgggtttattgtgagaaccagcctatgctgccaattggcttgtccgacataccaggggaggcgatggtgaagctgtactgtcccaagtgtatggacgtgtatacccccaagtcatcacgccaccaccacacagacggcgcatactttggaaccggatttccacatatgctgtttatggttcatccagaatacagacccaagcgcccagccaatcagttcgtgcctcgcctgtacggattcaagatccaccccatggcatatcaactgcaactgcaggccgcttccaattttaaaagcccagtcaagaccataaggtag

SEQ ID NO: 217170 - DNA, 648 bp, synthetic construct
  misc_feature 1..648: note = Description of Artificial Sequence: Synthetic coding sequence
  source 1..648: mol_type = other DNA
atgagcagtagcgaggaagtttcctggatcagctggttctgcggcctgcgcggaaatgaattcttctgtgaagtggatgaagactacatccaagacaagttcaatctgactggactaaatgagcaggtcccccactatcggcaggccttggacatgattctggacttagaaccagacgaagagttggaggacaatcccaaccaaagcgacttgatcgaacaggcagccgagatgctatatggccttatccacgccagatatattttaactaatcgcggaattgcccagatgcttgaaaagtatcaacagggcgattttggctattgtcccagggtatactgcgagaaccaacctatgttacccatcggcctgagcgatattccgggagaggctatggtaaaactctactgtcctaagtgcatggacgtgtatacacccaagagctcaaggcatcaccacactgacggggcatatttcggaactggctttcctcacatgctgtttatggttcaccctgagtacaggcccaaaaggcccgctaatcaatttgtaccgaggctttacggcttcaagattcaccccatggcttatcaacttcagctgcaggcagcctccaacttcaaatctcccgtaaaaaccattagatag

SEQ ID NO: 217171 - DNA, 648 bp, synthetic construct
  misc_feature 1..648: note = Description of Artificial Sequence: Synthetic coding sequence
  source 1..648: mol_type = other DNA
atgtctagctcagaggaagtgtcctggatctcctggttttgcggattgcgaggcaacgaatttttctgcgaggtggatgaggactatatccaggacaagtttaacctaaccgggctcaatgaacaggtgcctcattatcgacaggcattggatatgattctggatttggagcctgatgaggaacttgaggataatccgaatcagagcgaccttatcgaacaggcagcggaaatgttgtacggccttatacatgcaaggtatattttaaccaaccggggaatcgctcagatgctcgaaaagtaccagcaaggcgacttcggctattgtcctagggtgtactgtgagaatcagcccatgctgcccatcgggcttagcgatattcctggtgaggccatggtgaagttatactgccccaagtgcatggatgtttatacccctaagtcaagcagacaccatcatacggacggagcttattttggtacaggcttcccacatatgttatttatggtgcaccccgaatatcggccaaaaagacctgcgaatcaatttgtccctcggctttacggcttcaagatccatccgatggcgtaccagctacagctacaggctgcaagcaatttcaagtcccctgtcaaaacgatacgctag

SEQ ID NO: 217172 - DNA, 648 bp, synthetic construct
  misc_feature 1..648: note = Description of Artificial Sequence: Synthetic coding sequence
  source 1..648: mol_type = other DNA
atgagcagcagcgaagaagtcagttggatctcctggttctgtgggctgcgaggcaacgagttcttttgtgaggtggatgaggactatatccaagacaagtttaacctcaccggcctgaatgagcaggtcccacattatcgacaggccctcgatatgatactggatctagaacccgatgaggagctcgaggataatcccaatcagtccgatctgatcgaacaggccgctgagatgctctacggacttatccacgctagatacattttgaccaaccgtggaatcgcacaaatgctcgagaagtaccagcagggcgattttgggtactgccccagggtctactgtgaaaaccagccaatgctgcccatcggcctcagcgacatcccaggcgaagcaatggtgaagctgtactgtcctaaatgtatggacgtgtacactcctaagagtagtcgccaccaccatacagacggggcatatttcggcaccggttttccacacatgttatttatggtacatcccgagtatcggccaaagcgcccagccaaccagtttgtgccccgtctgtacggtttcaagatccatccaatggcctatcagctccaactacaggccgctagcaattttaagtccccagtgaagactattcgttag

SEQ ID NO: 217173 - DNA, 687 bp, synthetic construct
  misc_feature 1..687: note = Description of Artificial Sequence: Synthetic coding sequence
  source 1..687: mol_type = other DNA
atgtctagcagtgaagaagtgagctggatctcatggttttgtgggctccgtgggaatgaattcttttgtgaggtggatgaggactatatccaagataaatttaatctcacaggtttgaacgaacaggtgcctcactacagacaggcccttgatatgatcctggacctggagcctgacgaagagttggaggataatccaaaccaaagcgatttgatcgagcaggcagccgagatgctctatggcctgattcacgcacggtatatcttgaccaatcgagggatcgcacagatgttggaaaaataccagcagggcgacttcggttattgtcctagggtgtactgtgaaaaccagccaatgcttcccattgggctgagcgacattcctggagaggccatggtgaaactgtactgtcctaaatgcatggacgtatacactccaaagagttcccgtcaccaccacaccgacggtgcttacttcggcaccgggtttcctcacatgctgttcatggtgcaccctgagtataggcccaagcgtccggcaaatcaatttgtgccgtcttcgtgctcacgacatccggatgttcccctactgcctcgaagacgcccattctgtcgcatgcatttccggctgagagaagtgtaccaccagcaactgattcctgtacatggcgaccatcatctgctctag

SEQ ID NO: 217174 - DNA, 648 bp, synthetic construct
  misc_feature 1..648: note = Description of Artificial Sequence: Synthetic coding sequence
  source 1..648: mol_type = other DNA
atgtcttcttctgaggaggtctcttggatatcatggttctgtggtctaaggggcaacgaattcttctgcgaagtggatgaggattacatccaggacaagtttaatctgactggtctgaacgaacaggtgccacactacagacaggcattggacatgatactcgatctggaaccggatgaagaactggaagataacccaaatcagagcgaccttatcgagcaggccgctgagatgctatatggtctcatccacgcaagatatatcttaactaataggggcatcgcccagatgctcgagaagtatcagcagggagatttcgggtactgtcctcgtgtatactgtgaaaatcagccgatgttacctatcggtttgagtgacattcccggagaggcaatggttaaattgtattgtccaaagtgtatggatgtgtacacacccaaaagctctcggcaccaccacaccgacggagcctatttcggaacaggcttcccacacatgctgtttatggtgcaccctgaatacaggccaaagagacctgccaaccaatttgtcccccgactgtacggttttaaaattcaccctatggcttaccagctgcagcttcaagccgcaagcaacttcaaatcgcctgtgaagactattcgctag

SEQ ID NO: 217175 - DNA, 648 bp, synthetic construct
  misc_feature 1..648: note = Description of Artificial Sequence: Synthetic coding sequence
  source 1..648: mol_type = other DNA
atgagctctagtgaggaggtttcttggatcagctggttttgtggactgcgcggaaacgagtttttttgtgaagtggacgaggactatattcaggacaagtttaacctcacaggactgaatgaacaggtcccgcactaccgccaggcgctggacatgatccttgatctggaacccgatgaagagcttgaggacaaccccaatcaaagtgacctcattgaacaagcagctgagatgctgtatggcttgatccacgcccgttatatcctgacgaatcggggtatcgcccagatgctggaaaaatatcagcagggagacttcgggtactgtcctagagtgtactgcgaaaatcagcccatgctcccaattgggctgtctgacattcccggagaggcgatggtgaagttgtactgccctaagtgcatggatgtatataccccaaaatcctcacggcatcaccataccgatggagcctactttggaacagggttcccacacatgttgttcatggtccatcccgagtacagacccaagcgcccagcaaaccaattcgtaccacggttgtatggctttaagatacacccgatggcctaccagcttcagctccaggccgctagcaattttaagtcaccagtcaaaaccattcgctag

SEQ ID NO: 217176 - DNA, 705 bp, synthetic construct
  misc_feature 1..705: note = Description of Artificial Sequence: Synthetic coding sequence
  source 1..705: mol_type = other DNA
atggaaaaatgcaaagggactagcaggatggcaggaacgacatctgctgacgtaaaaatgtccagctcagaagaggtgtcatggatcagttggttttgcgggctacgcggaaatgagttcttttgcgaagtcgacgaagattacatccaggataagttcaatcttactggcctaaacgagcaggtcccccattataggcaagcactcgacatgatcctagatcttgaacctgatgaagagctcgaggataatcctaaccagtccgacctaattgaacaggccgcagaaatgctttacgggcttatccacgcccgttacattctgaccaaccggggtatcgcccaaatgctggagaagtaccagcagggagattttgggtactgtcccagagtctactgtgagaaccagcccatgctcccaatcgggctgtcagatattccaggtgaagcaatggtaaagctgtactgccccaagtgcatggacgtgtatactccaaagagttcccgccaccaccacactgacggagcctattttggtaccggctttcctcatatgctctttatggtgcaccctgagtatcgtcccaagcgcccagccaaccagttcgtgcctcgcctttatggtttcaagattcacccaatggcctatcagctacaactacaggctgcctctaattttaaatcgcctgtgaaaacgatccggtag

SEQ ID NO: 217177 - DNA, 648 bp, synthetic construct
  misc_feature 1..648: note = Description of Artificial Sequence: Synthetic coding sequence
  source 1..648: mol_type = other DNA
atgtcctcttccgaagaggtctcctggatctcatggttctgcggactgagggggaacgaatttttttgcgaagtggatgaggattatatacaggacaagtttaaccttaccggattgaatgaacaggtcccccactaccgccaggcactggatatgattctggacttggagcccgatgaagagcttgaagataatcctaaccagtctgatctgatcgagcaggctgcagagatgttgtacgggctcattcacgcgcgatatatactgacgaataggggaatcgcccagatgctggagaagtaccaacagggagacttcgggtactgtcctagggtttattgcgagaatcagcctatgttgccaattggtttgtcagatattccaggtgaggccatggttaagctgtattgccctaaatgtatggacgtgtataccccaaagtcatccagacaccaccatacagatggcgcttattttggcaccggatttccacacatgctgttcatggttcatccagaatataggcctaagagaccagcaaaccaattcgtgcctagactgtatggttttaagatacatccgatggcttaccagctccagctgcaagccgcaagcaactttaagagccctgtcaagaccattagatag

SEQ ID NO: 217178 - DNA, 687 bp, synthetic construct
  misc_feature 1..687: note = Description of Artificial Sequence: Synthetic coding sequence
  source 1..687: mol_type = other DNA
atgagtagttctgaggaggtgtcctggatatcctggttttgcggattgaggggtaacgaatttttctgcgaagtggacgaagattacattcaggataaattcaatctgaccggactcaatgaacaagtcccgcattaccgacaggccctagacatgatcctggacctagagcccgatgaggagctggaagataacccaaaccaatccgatctgattgaacaggctgcggaaatgctgtatggcctcattcatgcccgatacattctgacaaatagaggcatcgcccagatgctcgagaaatatcagcagggtgactttgggtactgtccacgtgtttactgcgagaatcagcccatgctgccaataggcctgagcgatattcctggggaagctatggtgaaactctactgccctaaatgcatggacgtgtacacacctaagtcatctcgtcaccaccatactgatggtgcttactttggaaccggcttccctcacatgttgttcatggtgcaccctgagtaccgccctaaacgcccagccaatcagttcgtgccaagcagctgcagccggcatccagacgtacccctcctgcctcgaagaaggcccttttgtcggatgcacttcaggctgcgcgaggtgtaccaccagcagctgattccagtgcatggagaccaccacctcctttag

SEQ ID NO: 217179 - DNA, 687 bp, synthetic construct
  misc_feature 1..687: note = Description of Artificial Sequence: Synthetic coding sequence
  source 1..687: mol_type = other DNA
atgtcgtcaagcgaggaggtttcctggatctcctggttctgcggcttacgcggaaatgagttcttctgcgaggtagatgaggattatatccaagacaaattcaatctaacaggcctcaacgagcaagtgccccattaccgccaggccctggacatgattcttgacctggaacccgatgaggaattggaagataatcctaaccagagtgacttaattgagcaggctgcggaaatgctctatggtctgattcatgccagatatatacttactaaccgagggatcgcccaaatgctcgaaaagtatcagcagggcgatttcgggtattgccccagggtgtattgcgagaaccagccaatgttgccaataggtctgagcgatatccccggtgaggcgatggtgaaactgtactgtcccaaatgtatggatgtgtatacccccaagagctcccgacaccaccatacggatggcgcatactttggaactggatttccacacatgctgtttatggtgcaccccgagtatcgtcctaaaaggcccgcaaaccaatttgttcccagcagctgctccaggcaccctgatgtgcctttgctgccgagacgtcgccctttttgccgcatgcacttcaggctcagagaagtgtatcatcagcaacttattccagtgcacggtgaccaccatctgctctag

SEQ ID NO: 217180 - DNA, 648 bp, synthetic construct
  misc_feature 1..648: note = Description of Artificial Sequence: Synthetic coding sequence
  source 1..648: mol_type = other DNA
atgtcatcaagtgaagaagtgagctggattagttggttttgtggactgagaggaaacgaattcttttgcgaggtagacgaggattatattcaggataagttcaatctgactggactcaatgagcaggtcccacactatagacaggctctagacatgatcttagacctcgaacctgatgaagagttagaggacaatcccaatcagtccgacttaatcgagcaggccgcagaaatgctctacggtctcattcacgcacgctacattctcaccaatcgaggcatcgctcaaatgttggaaaagtatcagcagggcgactttgggtactgccctcgcgtgtattgcgagaatcagcccatgctgcccatcggactgtccgatattcctggagaggccatggtaaaattgtattgcccgaaatgcatggacgtgtataccccgaagagtagcagacaccatcacaccgacggagcatatttcgggactggcttcccacatatgctgttcatggtgcatcctgagtacagacctaaacgcccagccaaccagttcgtcccgaggctctacgggttcaagattcacccaatggcttaccagctccagcttcaggcggctagcaactttaagagcccagtaaagacaatccggtag

SEQ ID NO: 217181 - DNA, 705 bp, synthetic construct
  misc_feature 1..705: note = Description of Artificial Sequence: Synthetic coding sequence
  source 1..705: mol_type = other DNA
atggagaagtgcaagggaacctcacggatggccggaacaactagcgctgacgtgaagatgtccagtagcgaggaggtgtcttggatctcgtggttttgcggacttcggggaaatgaatttttctgcgaggtcgacgaggattatatccaggacaagtttaatctcaccggcctgaatgagcaggtccctcattacaggcaggccctcgacatgattctggatctcgaacctgacgaagagcttgaggacaatccgaaccagagcgacctgatcgaacaggccgctgagatgctgtatggcttaattcatgccagatacatcctaacaaatcgcggaattgcccaaatgctcgaaaagtaccaacagggcgattttggctactgtcctagagtctattgcgagaatcagccaatgttacccatcggcctcagcgatatccctggcgaagctatggtgaaactgtattgtccaaaatgtatggatgtttacacgccgaagtcttcccgccaccaccatacagacggtgcgtacttcgggacaggatttccacacatgctgtttatggttcaccccgagtacaggccgaagcggcctgctaatcagtttgtaccacgactttacggatttaaaatccaccctatggcgtatcaactgcagctgcaggcagcatctaattttaaaagcccggtcaaaactatccggtag

SEQ ID NO: 217182 - DNA, 648 bp, synthetic construct
  misc_feature 1..648: note = Description of Artificial Sequence: Synthetic coding sequence
  source 1..648: mol_type = other DNA
atgtccagttctgaagaagtgagttggatctcatggttctgcggactacgaggaaacgaatttttctgcgaggtggatgaagactacatccaggataaattcaacctcactggtcttaacgaacaggtgcctcactatcggcaagccctggatatgattctggatttggagccagatgaagaactggaggataatcccaatcagtccgacctgatcgaacaggcagctgagatgttatatggactaatacacgccaggtatatcctcaccaatcgcggaattgctcagatgcttgagaaataccaacagggtgacttcgggtattgtccaagggtttactgcgagaatcagccaatgttgccgatcgggctctcagatatccctggggaggcaatggttaagctgtactgcccgaagtgtatggatgtttacactcctaaatcaagtcggcaccatcacaccgatggcgcatattttggtacaggattcccgcatatgctctttatggttcaccctgagtacaggcctaaacgaccagcgaaccaattcgtgcccaggctgtatgggtttaagattcaccctatggcctatcagctgcagctgcaggccgcaagtaatttcaagtcacctgtgaaaaccatccgctag

SEQ ID NO: 217183 - DNA, 705 bp, synthetic construct
  misc_feature 1..705: note = Description of Artificial Sequence: Synthetic coding sequence
  source 1..705: mol_type = other DNA
atggagaagtgtaagggcacaagcagaatggctggcaccacttcggccgacgttaaaatgagtagctcggaagaagtgagctggattagctggttttgcgggctgcgcggtaatgaattcttctgtgaagtcgacgaggattatatccaggataagttcaacctcaccggcctgaatgagcaggtcccgcattataggcaggccctagatatgattcttgatctggaacctgacgaagagcttgaggataaccctaatcaaagcgatctcattgagcaagccgcagaaatgctgtatgggctgatacatgctagatacattttgaccaataggggcatcgctcagatgttagaaaagtaccagcagggcgatttcggctactgcccgagagtatattgtgagaatcaaccaatgctacccatcggcctttctgacataccgggagaggccatggtgaaactgtattgccccaaatgcatggacgtttacactcctaaatcttcaaggcaccaccataccgacggagcatattttggcacaggtttcccccacatgttattcatggtacatccagagtatcgtcctaagagaccggcaaatcagttcgtgccacggctctacggtttcaaaattcatccaatggcttaccaactgcagctgcaggccgcttccaactttaagtcccctgtgaaaacgattcggtag

SEQ ID NO: 217184 - DNA, 705 bp, synthetic construct
  misc_feature 1..705: note = Description of Artificial Sequence: Synthetic coding sequence
  source 1..705: mol_type = other DNA
atggagaagtgcaagggcacctctagaatggcgggaacgacgtccgccgatgtgaaaatgtccagtagtgaggaggtgtcctggatctcttggttctgcggtctgcgaggaaatgagttcttttgcgaagtggacgaggactatattcaggacaagttcaatctcacaggtctcaacgagcaagtgccccactaccggcaggccttggatatgattttagatctcgagcccgacgaagagttggaggacaaccctaatcagtctgacctgatagagcaggccgctgagatgttgtacggcctgattcatgccagatacatcctaacaaatcgcggtatagcgcagatgctggagaaataccagcagggggatttcggttattgtccccgagtctattgtgagaatcagccgatgttacctatcgggctgagcgacatccccggagaggccatggtgaagctgtactgccccaaatgcatggacgtttacacccctaaatccagtaggcaccaccatacggacggtgcttatttcgggacgggatttccgcatatgctctttatggtccaccccgagtacaggcccaagaggcccgctaatcagttcgtccctaggctctacggcttcaaaatccatccgatggcctaccagcttcagctgcaagctgcatctaactttaagtcacctgtgaagacgattcgatag

SEQ ID NO: 217185 - DNA, 648 bp, synthetic construct
  misc_feature 1..648: note = Description of Artificial Sequence: Synthetic coding sequence
  source 1..648: mol_type = other DNA
atgtcgagttcagaggaagtatcctggatttcttggttctgtgggctccggggtaacgagttcttctgcgaagtagacgaggactatattcaagacaagttcaacctcacaggcctgaacgaacaggtgccacactaccggcaggctctggacatgatcctcgatctggagcctgacgaagaactggaagacaatcccaaccagagcgacttaattgagcaggcggctgaaatgctgtatgggcttatccacgcccgatatatcctgacaaatcggggaatcgctcagatgctggaaaagtatcagcagggcgattttgggtattgtccccgagtgtattgcgagaaccagccaatgctacccatcggactatccgatatccctggtgaagctatggtgaaattgtattgtcccaaatgtatggacgtttatacgccgaagagcagccggcatcaccacacagacggagcgtattttgggacgggatttccccatatgctctttatggtgcaccctgagtaccggccaaaacggccagctaaccagttcgtaccaagactgtacggattcaagattcaccctatggcgtatcaactccagctgcaggccgcttcgaactttaaaagccctgtgaaaaccattaggtag

SEQ ID NO: 217186 - DNA, 648 bp, synthetic construct
  misc_feature 1..648: note = Description of Artificial Sequence: Synthetic coding sequence
  source 1..648: mol_type = other DNA
atgtcttccagcgaagaagtgtcctggattagctggttctgtggcctgcggggaaacgaattcttttgtgaagttgatgaagactacatccaggataaattcaatctcacaggactgaatgagcaggtcccgcattaccgtcaagctctcgacatgatcctagacctcgagcctgacgaggagctggaagacaaccctaaccaatctgacctgattgaacaggctgcagagatgctatacggactgatccatgcgaggtatatcctgactaaccggggtattgcgcagatgctggagaagtatcagcagggagatttcggctactgccccagggtgtattgcgagaatcagcccatgctgcctatcgggctgagcgatattcccggagaggcgatggtgaaactgtactgccccaagtgcatggacgtctacactcccaaaagttctcggcaccaccacactgacggggcatatttcggcactggctttccgcacatgctgttcatggtgcacccagaatatcgcccaaaacgcccagctaaccagtttgtcccacgtctttacggttttaaaatccacccgatggcctaccagcttcagctgcaggccgcttctaacttcaaaagtcccgtcaagacaattagatag

SEQ ID NO: 217187 - DNA, 705 bp, synthetic construct
  misc_feature 1..705: note = Description of Artificial Sequence: Synthetic coding sequence
  source 1..705: mol_type = other DNA
atggagaaatgtaagggcacaagcagaatggccggaacgaccagcgctgatgtgaagatgtcgagctctgaggaagtttcctggatctcctggttttgcgggctccgcggaaacgagttcttctgcgaggtggacgaagactacatacaggataaattcaacctgactggattaaacgaacaggtaccacattatcggcaggccttggatatgattctcgacctagaacccgacgaggagctggaggacaaccccaatcaatccgatctgatcgagcaagctgccgaaatgctttatgggttgatacacgccaggtatatcttaaccaatcgtgggattgcccagatgctggagaaataccagcaaggcgactttggctactgcccgagagtgtattgtgagaaccaacctatgctcccgatcggcttgtctgacatccccggagaggctatggtgaaattgtactgccctaagtgcatggatgtgtatacgcctaagtcctcccgccaccaccatacggatggcgcttactttggtacagggtttccgcacatgttattcatggtacaccccgaatacaggcccaagcgtcccgctaaccagttcgtgcccagactttatggcttcaaaattcatcctatggcgtaccagctgcagttgcaggcagctagcaactttaagtccccagtgaagactatcaggtag

SEQ ID NO: 217188 - DNA, 648 bp, synthetic construct
  misc_feature 1..648: note = Description of Artificial Sequence: Synthetic coding sequence
  source 1..648: mol_type = other DNA
atgagtagcagtgaggaagtttcatggatcagttggttttgtggactaagggggaatgagtttttctgtgaggtcgacgaggactatattcaggataagttcaacctgactggcctgaacgagcaagtgccacactataggcaggccctggatatgatcctggatctggaacctgatgaggaattggaagataatcctaatcagagcgaccttatcgaacaggccgctgaaatgttatacggcctgattcacgctaggtatatactgactaacaggggtattgcacaaatgttggagaagtaccaacagggggactttggctattgcccgcgagtctattgtgagaaccagccaatgctgcccattggcctgagcgacattcctggtgaagccatggtgaaactatactgtccgaagtgcatggacgtgtacactcccaaatctagtcgacaccatcacacagacggagcttacttcggcacaggattcccacatatgctgttcatggttcaccccgagtaccgccctaaacggcctgctaatcagttcgtgccacgactgtacggctttaaaatccatccaatggcataccaattgcagctgcaggcagcatctaattttaaaagtccagtcaagaccatccgatag

SEQ ID NO: 217189 - DNA, 687 bp, synthetic construct
  misc_feature 1..687: note = Description of Artificial Sequence: Synthetic coding sequence
  source 1..687: mol_type = other DNA
atgtccagcagtgaggaggttagctggatctcctggttctgcggactgagaggcaatgagtttttctgtgaggtcgacgaagattatatccaggacaaattcaatttgacgggcttgaacgagcaggtgccacactaccgtcaagctctcgatatgattctagacctggagccagacgaagagctcgaggacaatccaaatcagtcagacctgattgagcaagccgctgagatgctctacgggcttattcacgctcgttatatcttaacaaacagagggattgcacaaatgctcgagaagtaccagcaaggggacttcgggtactgtcccagggtgtactgtgagaatcaaccaatgctgccgatcgggctcagtgatatcccaggagaagccatggtgaaattgtactgtccaaaatgcatggacgtctacactcctaaaagctctcgacaccatcataccgacggggcttactttggcacaggatttccacacatgctgtttatggtgcacccagaataccggcctaaaaggcccgctaaccagttcgtcccatctagttgttctaggcaccctgacgttcccttgctgccaagacgcagacctttctgtaggatgcactttcggttaagggaagtgtaccaccagcagctcatccctgtgcacggggaccatcatctgctctag

SEQ ID NO: 217190 - DNA, 705 bp, synthetic construct
  misc_feature 1..705: note = Description of Artificial Sequence: Synthetic coding sequence
  source 1..705: mol_type = other DNA
atggagaaatgcaagggtacctcaagaatggctggaactactagtgccgacgttaaaatgtcgtcctctgaagaagtttcctggatctcctggttctgcggactaagagggaacgaatttttttgcgaggttgatgaagattatatccaagacaaattcaacctaacaggcctcaacgaacaggtgccccactaccggcaagccttggatatgatactggatctggagcccgacgaagaattggaagataatcccaaccaatccgatcttatcgagcaggcggctgaaatgctctacgggctgatccacgcaaggtatattcttactaatagagggatcgcccagatgctcgagaaatatcaacagggcgattttggctattgtcctcgcgtctactgtgagaaccagccgatgttgccaattggactgtccgacatcccaggtgaggcgatggtgaaactgtactgtccaaaatgcatggatgtttacacaccaaagtcgtcaaggcaccatcacaccgacggagcctactttggcaccggcttcccccatatgctcttcatggtccacccagagtatcggcctaagagacctgcgaatcagttcgtgccacgcctatacggctttaaaatccacccaatggcttatcaattgcagctgcaggctgcctccaactttaaatctcccgtgaaaacgataaggtag

SEQ ID NO: 217191 - DNA, 648 bp, synthetic construct
  misc_feature 1..648: note = Description of Artificial Sequence: Synthetic coding sequence
  source 1..648: mol_type = other DNA
atgtcaagtagcgaagaagtctcttggatctcctggttttgtggtctccgagggaacgagtttttctgcgaggtggatgaggactacattcaggacaaatttaacctaaccggtttgaatgagcaggtgcctcattacaggcaggcactggacatgattttggatctggaacctgatgaagagcttgaagataatcccaatcagagcgacctgatcgagcaagcggcagaaatgttgtacggcctgatacacgcacgttacatactgacaaaccgtgggatagctcagatgctcgagaagtaccagcagggtgacttcgggtactgtccacgcgtttactgcgaaaaccagccaatgctgcctataggtttgtctgatataccgggagaggccatggtgaagctctattgcccaaagtgtatggatgtgtatacaccaaagtcttcgaggcaccaccacacagacggggcttattttggcactggattccctcatatgttattcatggtgcacccagagtacaggccaaaacgtcccgcaaatcagtttgttccacggctgtatgggttcaaaatccatcccatggcttatcaactgcagttgcaggctgcttctaatttcaaaagcccagtgaagactattaggtag

SEQ ID NO: 217192 - DNA, 648 bp, synthetic construct
  misc_feature 1..648: note = Description of Artificial Sequence: Synthetic coding sequence
  source 1..648: mol_type = other DNA
atgtcctccagtgaagaggtgtcttggatcagttggttctgcggcctccgcggtaacgagttcttttgtgaagtggacgaggactatatacaggacaagtttaatctgaccggactgaacgaacaggtacctcactaccggcaggctctcgatatgatcctagacttagagcccgacgaagaactggaggataacccaaaccagtctgacctgattgagcaagcggctgaaatgctatatggccttattcacgccagatatatactcactaacaggggtattgcgcagatgctagagaaataccagcagggcgactttggctactgccctagggtgtactgtgagaaccagccaatgctccctattgggttaagcgacatcccaggtgaagctatggtgaagctctattgccctaagtgcatggacgtgtatacacccaaatcttcacgccaccaccacaccgacggggcatactttggcactggcttcccccacatgttgtttatggtgcaccctgagtataggcccaagcgaccagcaaaccagttcgtgcccaggctgtatggtttcaaaatccatccgatggcctatcagctgcagctgcaggcagcaagcaacttcaaatctcccgtaaagacaatccggtag

SEQ ID NO: 217193 - DNA, 648 bp, synthetic construct
  misc_feature 1..648: note = Description of Artificial Sequence: Synthetic coding sequence
  source 1..648: mol_type = other DNA
atgagttcttcagaggaggtcagctggatttcatggttttgcggcctccggggaaatgagttcttctgcgaagttgatgaggactatatccaggacaaatttaacctgactgggctgaatgagcaggttccccattacagacaggctctggacatgattctggacttggagcccgacgaagagttagaggacaaccctaaccagtccgatcttatcgagcaggccgcagagatgctatacggtctcatccacgctagatatatcttgacaaatcggggaatcgcccagatgctggagaagtatcagcagggagattttggatactgccccagagtgtactgcgagaatcaacccatgcttcctatcggtttgagtgacattccgggagaggcaatggtgaaactttactgccctaaatgcatggacgtgtatacgcctaaaagctcccgccatcaccacacagacggcgcttattttggaaccggtttcccacacatgcttttcatggtccaccctgagtaccgaccaaagcgcccagccaaccagttcgtgccgaggctctacgggttcaaaattcaccctatggcctatcagctgcagctgcaagccgctagcaatttcaagtcacctgtcaaaactatccggtag

SEQ ID NO: 217194 - DNA, 648 bp, synthetic construct
  misc_feature 1..648: note = Description of Artificial Sequence: Synthetic coding sequence
  source 1..648: mol_type = other DNA
atgagttcatcagaagaggtcagttggatcagctggttctgcggactgaggggcaacgaatttttttgcgaagttgacgaggactacattcaggataaatttaacttaacgggtcttaatgagcaggttccacattatagacaggccctcgacatgatcctcgacctggagccagacgaggagttggaggataatcccaatcagagcgacctgatcgagcaggctgcagaaatgctctatggcctgatccacgccaggtatatcctcactaaccgtggcattgcccagatgctcgagaaatatcagcagggtgacttcggatactgtccccgagtgtattgtgagaatcagcccatgctgccgatagggctgagcgacattccgggtgaggccatggtgaagctgtattgcccaaagtgcatggacgtttatacacccaagtcttccagacaccaccatacagacggagcttatttcggcactggtttcccccacatgctgttcatggtgcaccctgaatatcggccaaaacggcctgccaaccagttcgtccctcgtctgtatggctttaagattcatcccatggcttaccagctacaactgcaggctgcctccaactttaagagccctgtaaagactatccggtag

SEQ ID NO: 217195 - DNA, 648 bp, synthetic construct
  misc_feature 1..648: note = Description of Artificial Sequence: Synthetic coding sequence
  source 1..648: mol_type = other DNA
atgtccagttccgaagaggtatcctggatctcttggttttgcgggctccgtgggaacgaattcttctgtgaagtggacgaagactacattcaagataaatttaatctcacgggccttaacgaacaggtgcctcactatcggcaggctcttgacatgattctggacctggaaccagatgaagagctggaagataaccctaaccaaagcgacttgatcgaacaggccgctgaaatgctttacggtcttattcacgcacgatatattctgaccaatcgaggcatcgctcagatgttggagaagtatcagcagggggactttggttattgtcccagggtttattgtgagaaccagcctatgctgccgattgggttaagtgacatcccgggtgaagccatggttaagttgtactgcccaaagtgcatggacgtgtatactcccaaaagtagtcgtcaccaccacactgacggagcctattttggcactgggttcccccatatgctctttatggtccacccagaatatcgacctaagaggccggctaaccagttcgtgccccgactttacggctttaaaatccaccctatggcgtaccagctgcagctccaggctgcttccaactttaaatccccagtaaagaccattagatag

SEQ ID NO: 217196 - DNA, 648 bp, synthetic construct
  misc_feature 1..648: note = Description of Artificial Sequence: Synthetic coding sequence
  source 1..648: mol_type = other DNA
atgtcctcttctgaggaagtgagttggatttcttggttctgtgggctgcgtggtaacgagtttttttgcgaggtggatgaggattacattcaggataagttcaacttaacagggctgaatgagcaggtcccccattacagacaggctctggacatgattcttgatctggagcccgacgaggagctggaagacaatcctaaccagagtgacttgatcgagcaggccgcagaaatgctctacggcctgatacacgcacggtatattttgacaaaccgaggaatagctcagatgctggaaaagtatcagcagggagattttggctattgccctcgtgtctattgcgaaaatcagcctatgttgcccatcggtctgagcgatatccccggtgaagccatggttaaactgtattgtccaaagtgcatggacgtgtatacacctaaatcttcacggcatcaccacacagatggcgcttatttcggtactggcttcccccacatgttgtttatggtgcatccggagtatcgcccaaagcgtccggctaaccaattcgtgccaaggctatatggcttcaaaattcacccaatggcctaccagttgcaacttcaggccgcatcaaattttaagtctcccgtcaagactataaggtag

SEQ ID NO: 217197 - DNA, 648 bp, synthetic construct
  misc_feature 1..648: note = Description of Artificial Sequence: Synthetic coding sequence
  source 1..648: mol_type = other DNA
atgagttcatctgaggaagtatcttggattagctggttctgtggattgcgagggaatgagttcttctgcgaagtggacgaggactatatccaggacaagtttaaccttaccggtctgaacgaacaggtgccgcattatcggcaggcactagatatgatcctggatcttgagccagatgaagagcttgaggacaacccaaatcaatctgaccttatcgagcaggccgcagagatgctgtacggcctcatacacgcaaggtatattcttacaaaccggggaattgcccagatgctcgaaaagtatcagcagggagacttcgggtattgtccacgggtgtactgcgagaaccagcccatgctgcctataggattgagcgacatccccggtgaggctatggtaaaactctattgccctaaatgcatggacgtgtacacacctaagtcatcccgtcaccaccataccgacggtgcctattttggaaccggatttcctcatatgctgttcatggtgcacccagagtaccggcctaagagaccggcaaaccagtttgtgccccgactctacggatttaaaatccatccaatggcttaccaactccaactccaggctgcctccaattttaaatcacctgttaaaactatacggtag

SEQ ID NO: 217198 - DNA, 648 bp, synthetic construct
  misc_feature 1..648: note = Description of Artificial Sequence: Synthetic coding sequence
  source 1..648: mol_type = other DNA
atgagttccagcgaggaagtgagttggatctcttggttttgcggtcttcggggaaatgaattcttctgcgaggtggatgaggactacattcaggataagttcaaccttaccggcctgaatgagcaggtgccccactatcgccaagcgctggacatgatcctcgacctggagcctgacgaagaactagaggataacccgaaccagtcagacctgattgaacaggcggctgagatgttgtacggtctgatccacgcacgttacatactaacaaacagaggcattgcccaaatgctggaaaaatatcagcagggagacttcggctattgccctcgcgtgtactgcgaaaatcagccaatgttgccgattgggttatctgacataccgggagaagccatggttaaactatactgcccaaagtgcatggacgtgtacacaccaaagtcaagcaggcaccaccatacagatggagcatactttggtacagggtttccgcacatgctttttatggtacaccctgaatacaggccaaaacggccagctaaccagttcgttccgcgattatatggattcaagatccatcccatggcttatcagctgcagttgcaagcagcatcaaactttaaatccccggttaaaaccatcagatag

SEQ ID NO: 217199 - DNA, 648 bp, synthetic construct
  misc_feature 1..648: note = Description of Artificial Sequence: Synthetic coding sequence
  source 1..648: mol_type = other DNA
atgagctccagcgaggaggtttcctggatttcttggttctgtggacttcggggtaacgaattcttttgtgaggtggacgaggactacattcaggacaagttcaacttaacaggtctcaatgaacaagtgccacactatcgccaggccttggacatgattctggacttagagcccgacgaggaacttgaggataaccctaatcagtcagaccttatcgaacaagcagccgagatgctatacggactgatccatgccaggtacattctgacaaacagagggatcgctcagatgctggaaaagtaccagcagggggatttcggttattgtcctagggtatattgtgagaaccaacctatgctgcctattggactgagtgatattccaggcgaggctatggtaaagctctattgtcctaaatgcatggacgtctacacccccaaaagcagcaggcaccatcatacagacggggcttattttggcaccggattcccccacatgctgtttatggtacatcctgaatatcggccaaagcgaccagccaatcagttcgtaccacggctatacgggtttaagatccatcccatggcctatcagctgcagctccaggctgcgtccaactttaaatccccggttaagacaattcgctag

SEQ ID NO: 217200 - DNA, 4296 bp, synthetic construct
  misc_feature 1..4296: note = Description of Artificial Sequence: Synthetic coding sequence
  source 1..4296: mol_type = other DNA
atgggtaaggagcaggagctggtgcaggctgtcaaggccgaggacgttggcactgcacagcgtctcctgcagcgaccacgaccgggtaaagcgaagttactgggctctactaagaaaataaatgtgaattttcaggaccccgatgggttttcagccctacatcacgccgctctgaacggcaataccgagctgataagtctactgctagaggcccaggccgcagtcgacatcaaagataataagggaatgagaccgcttcattacgccgcatggcagggccgaaaggagccgatgaaacttgtactgaaggcaggatccgccgtaaatatcccttccgacgaagggcatattcctttacatctcgccgctcaacacggacattatgacgtttcagagatgctactccagcatcagtctaatccctgtatggttgataattctggcaaaaccccgcttgacctggcttgcgagttcgggagagtgggtgtggtgcagcttctgctgtcgtctaacatgtgcgcagcccttctggagcctcgccctggcgacgcaaccgacccaaacggtacgtcccctctccatctcgcagctaagaacggtcacatcgacataatcaggcttctacttcaggctggcattgacataaaccggcagaccaaatcaggcaccgcacttcacgaggcagcactgtgtgggaagaccgaggtggtgcgtctgctactggacagcgggatcaacgctcatgtccggaatacctattcccagacagcacttgatattgtgcatcaatttactacgtctcaggcttcgcgcgaaatcaagcagctgctgagagaagcatccgctgcactgcaggttcgcgctaccaaggattactgtaacaattacgacttgacatcactcaacgtgaaggccggtgatatcataaccgtactggaacagcatcctgacggcagatggaagggttgcatccacgataaccgtaccggaaatgacagagtgggatattttccgagcagtctgggggaagcaattgtgaaaagagccggttcaagagcagggaccgaaccaagcctgccccaggggtcaagctctagcggcccttctgccccaccagaggagatatgggtgcttcggaagccctttgctggaggggatcgatctgggtcaatcagtgggatggctgggggacgtgggagcggcggacatgctctccacgccggatccgagggcgttaagctcctggccaccgtcctcagccagaaaagcgtgtcagaatccggtccaggtgattcccccgcaaagcccccagaaggcagcgccggtgtcgcgagatctcagccacctgtcgcccacgcaggccaggtgtatggagaacagccacccaagaagctggaacccgcaagcgaaggcaagtctagcgaagccgtgtcacagtggctgaccgcctttcaactccaactgtatgctcccaacttcatctccgcaggttatgatttgcccactatcagccgcatgacaccggaggacctcactgctatcggcgtgactaagcctggccaccggaaaaagatagcggctgaaatttcaggcctgtctatccccgattggctccctgagcacaagcctgcgaatctggcagtttggttgagtatgatcggtttagcccaatactacaaggtgctggtggataatggatatgaaaatatcgattttatcactgacattacatgggaggatctgcaggagattggcatcactaaattagggcatcagaaaaagctaatgctagcagtccgtaaacttgctgagctacagaaggccgaatatgccaaatacgagggaggccctttgcggagaaaggccccacagagcctggaggtaatggctattgaatcccccccaccaccggagccgacacctgccgattgccagagtcccaagatgaccacatttcaagactccgagctgtccgacgagctgcaggcagcgatgacggggccagccgaagtgggcccaacgaccgagaagccttcctcccatctaccacctaccccacgagccaccactcggcaagattcttctctaggcggaagggctagacacatgagttcatcccaggaactcctgggtgatgggcctcctgggccatcatccccaatgtcaaggagtcaagaatacctccttgatgagggccctgctccaggcactcccccaagagaggcgagacctgggagacacggccactcgattaagcgagcgagtgtgcctcctgttcctggcaagcccaggcaggtcctaccacccggtacctcacattttactcccccacagactcctaccaagaccagacccggatccccccaggccctgggtggaccccacggtcccgctcccgcaacagctaaagtcaagccaacaccccagttgctgcctcctaccgaaagaccaatgagtcctagaagcctgccccagtccccaacgcaccgcggatttgcctacgttttaccacaaccagttgaaggtgaggtggggccagccgcacccggtccagcgccacccccagtgcctacagcagtgccaaccctttgcctgccgcctgaagccgacgctgagccagggagacccaagaagcgtgcgcacagtctaaaccgttatgctgcttccgactcagaaccggaacgggatgaattgctggtacctgccgctgctggtccatatgcgacagtccagaggcgcgtaggcaggagtcattctgttagagccccagcaggtgccgacaaaaatgttaatcgcagccagagctttgctgtgcggccacggaaaaagggtcctccccctccccctccgaagaggagctcgagtgcgcttgcaagtgccaacttggcagacgagcctgttcccgatgcggaacctgaagacggactcctgggagtacgcgctcagtgccggagggcgagtgacctggccggatccgtggatacaggctcagctggatcggtcaaaagtatcgcagctatgctggaactgtcctccatcggtgggggaggcagggcagctaggagacctcccgagggccatccaacacctagacctgcgagcccagaaccaggtcgagttgcaaccgttctcgcttcagtgaaacacaaggaagcaataggaccaggaggtgaagtggtcaataggcgccgaacactgagtgggcctgtgaccggcctgctcgcaactgcgagacgtgggccaggggaatctgctgaccctgggccatttgtggaagatggcacgggcagacagcgccctcgcggtccgagcaagggcgaagcaggcgtggaaggcccacccctggccaaagtggaagcttcagctactctgaagcgacgaattagagcaaaacagaaccagcaggaaaacgtaaaatttatcctcacagagagcgacaccgtgaagaggaggccaaaagctaaagagcgggaagcaggcccagaaccccctccccctctttcagtctatcataacggcacagggacagtacggcgacgccctgcctcagagcaggcaggacccccagagcttccgcctcctccgcctcccgctgagcctccgccaacggatctagcgcatcttccgcctctcccaccacccgagggagaggcgcgaaagccggcaaagccgccagtctccccgaagcccgtgttgactcagcctgtccccaaattacagggcagcccaacaccaacctccaagaaagtgccgctcccaggaccagggagtcccgaggtgaagagggcccacggaactcccccacctgtgtcgcccaagccccctccacccccaacagcccctaagcccgttaaagccgttgccggtttgcccagcgggtctgccggaccttcccccgctccgtcaccagctaggcaaccacccgctgccctggcgaagccacccggaacgcccccttccttaggcgcatcccctgcaaaacccccatctccaggtgctcccgcactgcacgttcctgcaaagcctccccgtgcggctgctgccgcagcagctgccgcagcagcccctcccgcaccacccgagggggctagcccaggggacagcgccaggcaaaagctggaagagacctcagcttgtctggccgctgctttgcaggcggtggaagagaaaatccggcaggaggatgcccagggccctcgggattctgctgcagagaagagtaccgggagcatactcgacgatatcggctcaatgtttgacgacctggcggatcaactggacgcaatgttggagtag

SEQ ID NO: 217201 - DNA, 2115 bp, synthetic construct
  misc_feature 1..2115: note = Description of Artificial Sequence: Synthetic coding sequence
  source 1..2115: mol_type = other DNA
atgtgcgcagcccttctagagccaagacctggggatgctaccgaccccaatggaacttctcccttacatctggccgctaaaaacggtcacatagacattatacgactgcttttgcaagcaggcatcgacattaacaggcagaccaagtcgggtacggccttgcatgaggccgcattatgcggtaaaaccgaagtggtgaggttgctgctcgattccggcattaatgcgcacgtaaggaatacctattcccagactgccctggacattgtgcaccagttcacaacttcccaggcaagtagagaaattaagcagctgctccgagaagcctctgccgctctgcaagtccgagccacgaaggattattgcaacaactacgacctcacatcactgaacgtcaaggctggagacattatcacggtgcttgaacagcacccggacggtcgatggaaagggtgcatacacgataaccgcacggggaatgatagagtcgggtacttcccttcctcgttaggtgaggccatcgtgaagagagcagggtcaagagccggaacggagccatccttgccccaggggtcgagctcaagcggtcccagtgcacccccagaggagatttgggtactcaggaagccttttgccggtggagaccggtccggaagcattagcggaatggctgggggtcggggttccgggggtcatgccttgcatgccggaagcgaaggcgtcaaactcctggcgaccgtactctcccagaagtctgtgtcagagagtgggcctggagattctccagcaaagccaccagagggatccgcgggtgtggcacgaagtcagccccctgtggcacatgcaggccaggtatacggcgaacaacctccgaagaagcttgagcccgcaagcgaggggaagagttccgaagccgtaagtcagtggctaacagccttccagttgcagctttatgcccctaatttcatcagcgccggatacgatctccccactattagccgcatgacccctgaggacttgactgccataggagtcactaagcccggacatcggaaaaagattgctgctgaaattagtggattgtccatccccgattggctgccagagcacaaacccgcaaatctagcagtatggctgagcatgattggtttagcccagtattataaagtgctggtggacaatgggtacgaaaatatcgacttcatcaccgacataacttgggaggatctgcaggagatcggaattactaaactcgggcaccagaaaaaactgatgctggctgtgagaaagctagccgagttacagaaggctgaatacgctaagtatgaaggaggacccttgcggaggaaagcccctcagtcactggaagtcatggccatcgagtcaccccctccgccagagccaactcctgccgactgccagtctcccaaaatgaccaccttccaggacagcgaactgtccgatgagctgcaggccgctatgactgggccagccgaggtgggtccgactacagaaaagccaagttcacacctcccccctactccaagggctaccacacgacaggacagctccctggggggacgcgctcgccacatgtcctccagccaggagctgttgggcgacggccctccagggcctagttcgcccatgagtaggtcacaggagtacttactggatgagggccctgcgcctgggacacccccacgcgaggctaggccaggacgccacggccattcaattaagagagccagcgtcccacccgtcccaggcaagccaaggcaggttctgccacccggtacctctcattttaccccaccccagacccctaccaagacgaggcctggaagtccccaggcactggggggaccacatgggccagcccctgccacagcgaaagtcaagcctacaccacagttgctgcctcctaccgaaagacccatgtcaccccgaagcttgccccagagcccaacccagcgaactggccctggacctgcgcagaactgcccgagcggtagacctgctagcagaagcggagctgcccaaggaaccggcgaccaggggcaggggccaccagcccctcctcacccgcagaacatttcgtaccaggagtactag

SEQ ID NO: 217202 - DNA, 3609 bp, synthetic construct
  misc_feature 1..3609: note = Description of Artificial Sequence: Synthetic coding sequence
  source 1..3609: mol_type = other DNA
atggggagggagcaggacctcatcttagccgtgaaaaatggagatgtcactggtgtgcagaaattggtggccaaggtcaaggccaccaagaccaaactgcttggttctacaaaaagactaaacgtgaactaccaggatgccgacggtttctcagctctccatcacgccgcactggggggaagcctggagcttatcgccctgttgctggaagcgcaggcaacggtggatatcaaagactcaaacgggatgcgacctctgcattacgctgcgtggcaaggccgattggaaccagtgcggcttctgctgcgggcaagtgctgctgtgaatgccgcttccctcgacggccagataccactacacctcgctgcccagtacgggcattacgaggtctccgagatgctgctccagcaccaatccaacccttgccttgtcaacaaagcaaagaagacccccctcgacctggcatgtgagtttgggcgtctcaaggtcgctcagctgctgctcaacagtcatttatgcgtcgccctgctggaaggcgaagctaaggacccatgtgatcccaattacacgactccacttcaccttgcagctaagaacgggcaccgcgaagtaatccggcaattgcttcgggctggcatcgagatcaaccggcaaactaaaactggcactgcattgcatgaagccgctctctatggcaagactgaagtcgtgagactgctcctcgagggcggagtggacgtgaacatcagaaatacatacaaccaaacagcactagatatagtcaatcaattcactactagccaggctagccgtgaaataaaacagctcctacgagaggcaagcggaatcctaaaggttcgtgctctgaaggacttttggaaccttcatgatcctacagccctaaacgtcagggcgggtgacgtgataaccgtgctagaacaacacccggatggcaggtggaaaggacacattcacgagagccaacgtgggactgaccggattggctacttccccccagggatcgtggaggttgtgagtaagcgtgttggcatccccgcagccagactgccatctgccccaacgccactgcgtccaggttttagccggaccccccagcccccagcagaggagccaccacatcccttgacctactcacagcttccccgtgtgggcctcagccctgatagtcccgctggggaccgaaactctgtaggctctgaggggagcgtcggctccatccggtctgctggcagtggccaatcttctgaagggactaatgggcacgggcctgggctgctgattgaaaacgcacagcccttgccctcagcaggagaggaccaggttttgcccggactgcaccctccctcccttgccgacaacctatcacataggcctctcgcaaattgcagatcgggcgagcaaatctttacgcaagatgtcagacccgaacagctgttggagggcaaagacgcccaagctatccataactggctctccgagttccaactggagggttatacagcacacttcctgcaggccggttacgacgtgcccaccatctctaggatgacccccgaggaccttacagcaattggcgtgaccaagcccggacatcgtaagaagatcgcctcagaaatcgctcagctgagcattgcagaatggctgccgagctatattcccaccgacctgctggaatggctgtgtgcgctgggtttgccccagtatcacaagcagttggtttcatcaggctacgattctatgggtctggtggccgacttaacatgggaggaattacaagagataggggtgaataagctgggccaccagaagaagctgatgctgggcgtgaaacggctggcagaattgagacggggtttgctgcagggcgaagctttgtccgaaggtgggagaaggctggcaaagggaccagagctgatggccatcgaagggctcgaaaacggtgaggggcctgctactgctggtcccaggctcttaacattccaggggtcggagctcagtcctgaactgcaggccgctatggctgggggagggcctgagccattaccactcccgcctgcgcgatccccgtcacaggaatctattggcgctaggtctaggggatcaggccattcacaggagcagcctgccccacagccatctggaggggatccgagccccccacaggaaagaaatctgcccgaggggactgaacggccacccaagctttgttcctcgcttcctgggcaagggcctcccccatacgtattcatgtacccccagggttcaccgagctcacctgcgcctggcccaccgccaggagcaccctgggcgtttagctacttagccggtccacctgcaacccctcctgatccccctcgcccaaagcgcaggagccactccttatcccgcccaggccctactgaaggggatgctgaaggcgaagcagaaggcccagtcggcagcacactgggaagctacgccacccttaccaggcgcccaggtaggagtgctttagtgagaactagccccagtgtgactcctacgccagcacgcggtacccctaggtcccaatctttcgctctgcgggcaaggaggaaggggccaccgcctccaccaccgaagagactaagctctgtctcaggccctagccccgagcctccaccactcgacgaatcgcctgggcctaaggaaggcgcaacgggtcctaggcgaagaacgctgtcagagccagccggtccttcagagcctcccggaccccctgcccctgccggtccagcatccgatacagaggaggaggagcccggtcccgagggaacccccccatccagagggagtagtggcgaggggctaccattcgccgaagagggcaatctgaccatcaagcagagacccaaacctgctgggcctcctccaagagagactcccgtcccccctggcctcgactttaatctgaccgaatcagatacagtgaagcgcagacccaaatgcagggaacgagaacctctgcaaactgctctcttggcattcggtgttgcctctgccactccgggacctgccgctccgctaccttcgcccactcccggtgagtcacctcccgctagtagtctcccccagcctgaaccatccagcctgccagctcagggggtgccaacccccctggccccttctcctgctatgcaacctccagttcctccttgtccgggtcccggactagagagcagtgccgcttcgagatggaatggcgaaaccgagccaccagccgcacctgcagcccttctaaaggtgcccggtgccggaactgcccctaaacccgtctcagttgcctgcacacagctggcctttagcggccctaaacttgccccaagactggggcctcggcctgtcccaccaccccgtcccgagagcacaggcaccgtggggccaggacaggcccagcaacggctcgagcagactagttcctctctggctgccgcactacgcgctgcggagaaatccattggtacaaaagagcaagaagggaccccctccgcaagtacaaagcacattctggatgatatctctacaatgttcgatgcactggcagaccagctggatgcaatgttggattag

SEQ ID NO: 217203 - DNA, 3363 bp, synthetic construct
  misc_feature 1..3363: note = Description of Artificial Sequence: Synthetic coding sequence
  source 1..3363: mol_type = other DNA
atgcgtccccttcactacgccgcttggcaaggacgtttggagcctgtccgactgcttcttagagcatctgcggcagtgaacgccgctagcctcgacgggcagattccattgcacctggcagcccagtacggtcattacgaggtgtcggaaatgctattacagcatcaaagcaatccctgtctcgtcaacaaggccaaaaaaaccccccttgacttggcctgtgaattcgggcgtctgaaggtcgcccaactgttactgaactcccatctttgtgtggctctcctagaaggggaagctaaggacccctgtgaccccaattatacaacaccactgcatcttgccgctaagaacgggcacagagaggtgattaggcagctactcagagctggaattgagataaaccggcagactaaaacaggcaccgcactccatgaggccgcactgtacggcaaaaccgaagttgtgcgccttcttctcgagggaggcgtggacgttaacatccgtaacacatacaatcagactgccctggacatcgtgaatcagttcactactagccaggctagtcgcgaaatcaagcagctactgcgggaggcctcaggcatcttgaaagtccgcgctcttaaggatttttggaatctgcacgacccgacagctctgaacgtccgggcaggcgacgtcattaccgtgcttgagcagcaccctgacggcaggtggaagggccacatccacgagagtcaaagaggcacagatcgaatcggttactttccccctgggattgttgaggtggtaagcaaacgtgtgggaattccagccgcaagactgccatcagctcctacccccctgagacctggattctcgaggactccccagcctcccgcagaagagcctcctcatccccttacgtactctcagctcccccgagtgggcttatctcctgatagcccagccggagatcgtaattctgtcggctcagaggggagcgtgggaagcatccgctctgccggatctgggcagagctctgagggaactaatggtcacggccctgggcttctgatcgaaaacgcgcagccattacctagtgccggagaagaccaggttctgcccggactgcaccccccaagtctagccgataacctgagccaccgaccattggctaattgtcgtagtggcgagcaaatttttacacaagacgtgagacccgagcaactgctggagggcaaagacgcacaggcaattcataactggctttctgaattccagctcgaaggctacacggcccatttcctgcaggccggatacgacgtgcccacgatcagccggatgacgcccgaggacttgacagccataggcgtgacaaagcccggtcaccgcaaaaaaatcgcttctgagattgctcagctttcgatagcagaatggcttccttcttatatacctacagacctactggaatggttgtgcgctctgggccttccacaataccacaagcaactggtgtcctcaggatatgattcaatgggcctcgtggccgatttgacctgggaagaattacaggaaatcggggtaaacaaattgggtcatcagaaaaagttgatgctgggtgtcaaaagattggccgagctgcgccgaggtctcctccaaggtgaagcgctttctgagggtggacgccgattggccaagggcccagaactgatggccatcgagggccttgaaaacggcgaagggccagccactgctggtcccaggctgctaacgtttcaagggtccgaactgtctcccgagcttcaggctgcaatggctggaggcggacccgagcccttgccgcttcctccggctaggtccccaagtcaggagagcattggcgcaagatctagaggttcaggccattcccaggagcaaccggctccccaacccagcggcggtgacccgagtccgcctcaggaacgaaacctccccgaagggaccgagcgccctccgaaattgtgctcctcactcccaggccagggtcccccaccctacgtgttcatgtatccacaaggatccccatcttcacctgcgcctggcccaccgccaggagccccatgggccttcagctacctggccggacctcccgcaacgccaccggaccccccaaggcccaagcgacgaagtcactccctgagcagacctggcccaaccgagggggatgccgagggtgaggcagaaggacccgtgggttccacgctcggcagctacgctacccttacccggagaccgggacggtccgcccttgtgcggacttctccttctgtgacacctacccccgcaaggggcacaccgagatcccaaagcttcgcactgagagctaggcgaaagggacccccaccaccaccacccaagcgtttgtcttccgtgagtggtccaagtcctgagccacctccccttgatgagtctcccggtccaaaggaaggagctactggacctagacggagaacattgagcgagcctgccggtccttccgagcctcccggaccccctgccccagcaggtccagcaagcgataccgaagaggaagagcctggccctgaaggtacacctccaagccgcggaagttccggagaaggcttgccatttgcggaagaaggcaatctgactatcaaacagagacctaaacccgctggtccgcctcccagagagacacccgttcccccaggactggattttaacctcactgagtcagataccgtcaagcggaggcctaagtgtcgtgagcgcgaaccattgcagacagccctcttagcgttcggcgtggctagcgccacgccgggacctgcggcaccactaccttccccgacccccggagagtcccccccagcctctagcctgccacagcctgagccgtctagtttgccagcccagggagtccccacccctctggctccaagtcctgcaatgcagcccccagtgcccccatgtccgggacccggtcttgagtcgagtgccgcaagcagatggaacggcgagacggagccacccgctgcccctgcggctctcttgaaggtgccaggagccggtacagcacctaagcccgtcagcgtcgcgtgcacacagcttgctttttcaggacctaagctcgccccacgcctgggcccaaggccagtaccacctccgagacccgaatctaccggcactgttggacctggacaggcccagcaacgcctcgagcagacatcctcatctcttgcggctgccctgcgcgctgctgaaaagtctattggtaccaaagagcaggaagggacccctagcgcatccaccaaacatatcctggacgacattagtacaatgttcgatgctctcgctgaccagcttgacgccatgctcgattag

SEQ ID NO: 217204 - DNA, 1026 bp, synthetic construct
  misc_feature 1..1026: note = Description of Artificial Sequence: Synthetic coding sequence
  source 1..1026: mol_type = other DNA
atggcggacgaaaagcctagcaatggtgtgctggtgcatatggtgaagctgttaatcaagacttttttagatggcatattcgacgatctaatggagaacaacgtgcttaacactgatgagatacacctaattgggaagtgtctgaagtttgtcgtctcaaacgccgagaatctcgttgacgatataacagaaaccgctcagaccgcgggaaaaattttccgcgaacacctctggaacagcaaaaaacagttgagttctgatataagcagcgacggagagagagaagctaacatgccaggtctcaacattcgtaataaggagttcaactatctacacaataggaacggttcagaattggacctcttgggcatgagggacctactggagaacctcggctacagcgtcgtaataaaagaaaaccttaccgcgcaagaaatggagaccgcgctccggcagtttgccgctcacccggaacaccagtcatccgattcaacatttttggtctttatgtcacacagtatactcaacggtatctgcggaactaagcactgggatcaagagcctgatgttctgcatgatgatacaatttttgagattttcaataatagaaattgtcagagtctgaaagataagcctaaggtgataattatgcaggcgtgcaggggcaacggcgctggcatcgtgtggtttaccacagacagtggcaaggcgggagctgacacacatggcaggctgctacagggtaatatttgtaacgatgctgtaacaaaagctcatgtggagaaagattttatcgccttcaaaagttccaccccacacaacgtgtcctggcggcatgagacgaatggcagcgtgtttattagccaaataatctattactttagagaatactcgtggtcacaccatctggaggaaatctttcagaaagtgcaacattcgtttgaaacccctaacattttgacccagttacccacaatcgagcgtctgtcaatgactagatacttttatctattcccgggtaactag

SEQ ID NO: 217205 - DNA, 1026 bp, synthetic construct
  misc_feature 1..1026: note = Description of Artificial Sequence: Synthetic coding sequence
  source 1..1026: mol_type = other DNA
atggccgacgaaaagccatctaacggcgtcctcgtccatatggtcaaactcctgatcaagacatttctggatgggattttcgatgacctaatggagaataacgtcctgaataccgatgagatccacctcattggcaaatgcttgaagttcgtggtgtctaatgctgagaatctggtggatgatatcactgaaacggcccagaccgctggtaagattttccgggaacacctgtggaatagtaaaaaacaactgtccagcgacatcagttctgatggcgagagagaagctaacatgccagggctcaatattaggaacaaggagttcaactacctgcataatcgcaatgggtctgagctggacctgcttggcatgcgggatctgctcgagaaccttggctactcagtcgtcattaaggagaatctgactgctcaggaaatggaaactgctcttcggcaattcgcagcacacccagagcatcagagctctgatagtacatttctcgtgtttatgtctcactctatcctgaacggtatttgtgggacaaagcactgggaccaggagccagacgtgttacacgatgacacaatttttgagatctttaataataggaactgccagagcctcaaagacaagcctaaagtgatcattatgcaagcctgccggggaaacggcgcagggattgtttggtttactactgatagcggaaaggcaggggctgacacccatggcagactgttgcagggaaacatatgtaatgatgcagttactaaagctcacgtcgagaaagattttatcgcctttaagagctccactccccataacgtctcttggagacatgagaccaatggctctgtcttcattagccaaattatttactatttccgggagtatagctggtctcaccatctcgaagagatctttcagaaggttcagcactcattcgagaccccgaatatactgactcaactacccaccatcgaaaggctcagcatgacgcgctacttttacctgttcccgggaaattag

SEQ ID NO: 217206 - DNA, 834 bp, synthetic construct
  misc_feature 1..834: note = Description of Artificial Sequence: Synthetic coding sequence
  source 1..834: mol_type = other DNA
atggagaatacggagaattctgtggacagcaagtcaatcaagaatctagaacctaaaatcatccacggatcagagagcatggattccgggatatctctggataattcatataaaatggattacccagagatgggcctttgtatcatcatcaacaacaaaaatttccataagtccactggtatgacgtcccgctccgggaccgatgttgatgcggctaacctgagggaaacatttcgcaatttaaagtacgaggtacgaaacaaaaacgacctgaccagagaggagatcgtggagttgatgagggacgtatcaaaagaggaccatagcaaaaggagctcattcgtttgcgttttattaagccatggcgaggagggtattatctttggcacgaatggtccagtggacctcaagaaaattactaacttctttcgcggtgacagatgtcgatcactgacaggtaagcctaaactctttatcatccaggcttgccgcggaaccgagttagactgcggaatcgaaacagattccggagttgacgatgatatggcctgtcacaagataccagtggaagcggattttttgtatgcatattcaactgctccagggtattactcttggcgaaacagtaaggacggcagctggtttattcagtctctttgtgcaatgcttaaacagtatgcagacaagctggagtttatgcacatactgacccgcgtgaaccggaaagttgctaccgagttcgagagtttctcattcgacgctacttttcacgctaagaagcaaataccctgcatagtgtccatgttaaccaaagagctatatttttaccactag

SEQ ID NO: 217207 - DNA, 471 bp, synthetic construct
  misc_feature 1..471: note = Description of Artificial Sequence: Synthetic coding sequence
  source 1..471: mol_type = other DNA
atgagtgacgcattgatcaaagtttctatggagaacaccgagaattctgtggactccaagtccatcaagaatctcgagccaaagattatacacggctctgagtctatggactcaggaattagtctggataatagttacaagatggactaccccgaaatgggtctctgtatcattatcaacaataagaacttccataagagcactggcatgacttcgcgatcaggaaccgacgtggatgccgcaaacctgagagaaacatttcgcaacctaaaatacgaggtccgtaacaaaaatgacctgacaagagaggagattgtcgaactgatgagagacgtaagcaaggaagatcacagtaagcggtctagttttgtgtgcgtgctcttaagccatggggaagagggaatcattttcgggaccaacggcccagtagacctcaagaataataaactatttcaacgcggatctttatag

SEQ ID NO: 217208 - DNA, 354 bp, synthetic construct
  misc_feature 1..354: note = Description of Artificial Sequence: Synthetic coding sequence
  source 1..354: mol_type = other DNA
atggaaaacactgagaactccgtcgactcaaaaagtattaagaacctagaaccaaagatcatccatggatctgaaagcatggattctggcatcagcctcgataacagctacaaaatggattacccagagatgggtctctgcatcatcattaacaataaaaattttcataagtcgacaggaatgacaagcagaagcggaactgatgttgacgccgcaaatctgcgtgaaacattcaggaacttgaagtatgaagttaggaacaagaacgatctgaccagggaggagatcgtagagctgatgagggacgtcagtaaggaagatcactccaaaaggtcatcctttgtgtgcgtttag

SEQ ID NO: 217209 - DNA, 834 bp, synthetic construct
  misc_feature 1..834: note = Description of Artificial Sequence: Synthetic coding sequence
  source 1..834: mol_type = other DNA
atggagaataccgagaactctgttgactctaagagcattaagaatttggaacccaagattattcacggctcggagagcatggatagcggaatcagtctcgacaactcctataaaatggattacccagagatggggctgtgcataatcatcaacaacaagaattttcataagtctacaggaatgacatcacggtccgggaccgatgtagacgctgccaatctcagagaaacatttagaaatctgaagtatgaggtgaggaataaaaacgacctgacacgggaggagattgtcgagctgatgagagatgtttccaaggaagaccatagcaaacgtagctcctttgtgtgcgtgctgctgtctcatggcgaggaggggataattttcggaacaaacggtcccgtcgatttgaaaaagatcactaacttttttagaggtgaccgttgccggtccctgacaggcaagccaaaactgttcatcatccaggcttgccgcggaaccgagcttgactgtggtatcgaaacagactctggagtggacgatgatatggcctgccataaaatccctgttgaggccgacttcttatatgcttattccaccgcgccaggttattactcttggcgaaacagcaaagatggcagctggttcatccaatccctgtgtgccatgctcaaacagtatgcggataaactggaattcatgcacatcctgacgcgggtcaatagaaaagtggctaccgagtttgagtcattctcctttgacgctacttttcacgccaagaagcaaattccctgcatcgtctccatgctgaccaaagagctctatttctaccattag

SEQ ID NO: 217210 - DNA, 966 bp, synthetic construct
  misc_feature 1..966: note = Description of Artificial Sequence: Synthetic coding sequence
  source 1..966: mol_type = other DNA
atggcagatagcatgcaagagaaacagagaatggcaggacagatgctactgcaaacctttttcaacatcgaccagatctcccccaacaagaaggctcaccctaacatggaggcaggacctcccgagagcggtgaaagcacagatgccctgaagctgtgtccacacgaagaatttctccgactgtgtaaagaaagagccgaggaaatttatccaattaaagagcggaacaatcgcactaggttggccctgattatctgtaataccgaattcgaccacttgccacccaggaatggcgctgattttgacataacaggtatgaaggagttgttagagggtcttgactattcggtcgatgtggaggagaatctaacggctcgtgatatggaatctgctctgcgggcattcgccactcgcccagagcataagtcatcagattcgacattcttagtcttaatgtcacacggaattctcgagggcatctgcggaaccgtgcacgacgagaagaaacctgatgtgctcctctacgacacaatctttcagatatttaacaaccgcaactgtctgagtctgaaggataagcccaaggttatcatcgtgcaagcctgcagaggcgcaaatcggggtgagttatgggtccgggactccccggcttctctagaagtggctagctcccagtctagcgaaaatctcgaagaggacgcagtgtacaaaacccatgtcgaaaaagactttatcgcgttttgctcatctactcctcacaatgtctcatggagagactcaacaatgggaagtatctttataacccagcttatcacatgcttccagaagtacagttggtgttgtcacctggaagaggtgttccgcaaagtgcaacagagtttcgaaaccccacgtgccaaggcccaaatgccgacaatcgaacggctctctatgacaaggtacttttacctcttccccggaaattag

SEQ ID NO: 217211 - DNA, 213 bp, synthetic construct
  misc_feature 1..213: note = Description of Artificial Sequence: Synthetic coding sequence
  source 1..213: mol_type = other DNA
atggagaaaaaggaatgcccagagaagtcctcatcatccgaagaagaactgccacggagggattctggtagctctcgcaacatcgacgcttccaaattaatacggttacagggatcgagaaagctcctggtggacaacagcatccgagagttgcaatacactaagacgggcattttttttcaagccgaggcctgcgtgacaaatgacacctag

SEQ ID NO: 217212 - DNA, 3099 bp, synthetic construct
  misc_feature 1..3099: note = Description of Artificial Sequence: Synthetic coding sequence
  source 1..3099: mol_type = other DNA
atgccaggccgagccgaagcaggtgaggccgaagaagaggctggcgctggcagcggctcagaggcagaagaggatgccctctgggaaaggattgaaggagtgagacatcggcttgctagggccctgaatcccgcaaagctcaccccctatctcagacagtgcagagttatcgacgagcaggatgaggaggaagttttgtccacttatagattcccatgcagggtaaatcgtacggggaggctcatggatatcctgcggtgtagaggcaagcggggttacgaagcgttcctggaggccctggagttctactatccggagcattttacgctcctaaccggtcaggagcccgctcagaggtgttctatgattctggatgaagaaggtcccgaggggctgacccaatttctgatgaccgaggtaagacgacttcgagaagcacgtaagtcacagttgcagagagaacagcaactgcaagccagagggcgagttctggaagaggagcgagccggactggagcaacggctgagggatcagcagcaggctcaggagcgctgtcaacggctccgcgaggattgggaggctgggtcccttgagttactgcgactgaaagacgagaattacatgatcgccatgcgccttgcgcagttgtcggaggagaagaactcagctgtcctgcgatcgcgcgacttgcaactggcggtggatcaactcaaactcaaggtctcccggctggaggaggaatgcgccctgctgcggagggctagaggtccccctcccggtgcagaagaaaaggagaaggagaaggagaaggagaaagaacctgacaacgtcgacctcgtctccgagctgcgggctgagaaccagagactaaccgctagtcttagagaactgcaagaaggcctacagcaggaagcgagtaggcccggtgcccctggctcggagcggatcttgctggatatactcgagcacgactggagggaagcccaggactccagacaggagttgtgccagaagctccacgccgttcaaggagagctccagtgggcagaggaactcagggatcagtacttacaagaaatggaagacctcaggttgaagcatcggaccctgcagaaggactgcgacctttacaagcacaggatggccaccgtactcgcacaactcgaagaaatcgaaaaagagagggaccaagcgatccagagtcgcgaccgtatccaactgcagtacagtcagagccttattgaaaaggatcagtaccgcaagcaggtgagagggttggaagccgaaagggacgaacttctgaccacactgacctctcttgagggaacaaaagccctcctggaggtgcagctgcaaagagcccaggggggtacatgtctaaaagcttgtgctagttcgcacagcctgtgctcaaatttaagcagcacatggtccttgtcagagttcccctccccccttggcggtccggaagccactggggaggctgctgtcatggggggacctgagccccataattccgaggaggctaccgactccgaaaaagagatcaaccggctttccatattaccgttcccaccttctgcaggaagtatcttaagacgacagcgcgaggaggaccccgcaccgccaaagagaagtttctcctctatgtccgacattactggatctgtcacacttaaaccctggagtccaggactgtccagttcctcctcttccgattcagtgtggccattgggcaagccagaggggctgttggctcgtggctgcggtctggattttctgaataggtcactggcgattcgtgtgtctggtcgatcccctcccggaggaccagagccacaggacaaaggcccagatggcctctcgttttacggagacagatggtcaggcgctgtcgtgaggcgcgtccttagcggcccaggctccgctcgcatggagcccagggaacaaagagtcgaggctgcaggactggagggagcttgtcttgaagcagaggctcagcagcgaactctgctgtggaatcagggctctacgctcccatccttgatggattccaaagcatgccagtcttttcacgaagcactggaggcctgggcaaagggacctggtgcagaaccgttctatatccgagcaaacctgacgctgccggagcgagcggacccacatgctctctgtgtgaaggcccaggaaatccttcgactggtggacagcgcttacaagaggagacaggagtggttttgtacaagagtcgatcctctcacactcagggacctggataggggtaccgttcccaactaccaacgagcccagcagttgctggaggttcaggaaaaatgcctcccctcaagcaggcataggggtcctaggtcaaatctaaagaagcgtgccttagaccagctgagacttgttagacccaagcccgttggcgcacctgcgggagattccccagaccagctgctccttgagccctgcgcggaacccgaacggtctttgaggccatacagcttagtccgacctctcctggtcagcgctctgcgaccggttgtcctcctacccgaatgcctggctcctaggttgattcggaacttacttgacctgccctcctcccggctggactttcaagtatgtccagccgaatctttgagcggagaagagctgtgtccttcaagtgctcccggtgcccctaaggctcagcctgcgaccccagggctcggttctcgcattcgagcaatccaagaaagtgtgggcaaaaagcactgtctgcttgaattaggcgcaagaggtgtgcgagaactggtccagaacgaaatatatccaattgttatacacgtcgaggtgactgaaaaaaatgtgagagaagtgaggggtctgctggggcgaccaggttggcgggacagcgagctcctgcgccagtgtagaggatctgagcaagttttgtgggggttgccctgcagttgggtgcaggtgcccgctcacgaatggggccacgctgaagaattggcaaaagttgtgagagggaggattctccaagagcaggctaggctggtctgggtcgagtgcggctcctcacgcggatgtccatctagtagcgaggcctag

SEQ ID NO: 217213 - DNA, 3099 bp, synthetic construct
  misc_feature 1..3099: note = Description of Artificial Sequence: Synthetic coding sequence
  source 1..3099: mol_type = other DNA
atgcccggaagagcggaggcaggggaggcagaagaggaagctggcgctgggagcggttcagaagcagaggaggatgctctctgggagcgcattgagggggtgaggcatcgcctcgcgcgtgccctcaatcccgctaagttgacgccgtacctccgacagtgtagagtgatcgacgaacaggacgaagaggaggtcctgtcgacatatcggtttccttgcagagtaaaccgaactggcaggttgatggacatactcagatgcagagggaagaggggctacgaagcttttctggaagctctggagttttactatcctgaacactttaccctgctgaccggtcaggagcctgcccagcggtgtagcatgattcttgacgaggaaggccctgagggcctgacgcagtttctcatgacagaagtgaggcggctgagggaggcccgtaagagtcagctccaaagagaacagcagttacaagccagaggacgagtgctggaggaagaaagagccggactcgaacagcgcctgcgtgaccaacagcaagcacaggagcgttgccaaagacttagagaggactgggaggccggaagcctggagctacttcggttgaaggatgaaaattacatgattgcaatgaggctggcccagctgagcgaggagaagaactctgccgtcctacgctctcgcgatctacagttggcagttgaccagctgaagctgaaggtatccagactagaggaggaatgtgctctgctgcgcagagctcgaggccctccccctggggctgaagagaaagagaaagaaaaggagaaggagaaggagcccgacaacgtcgatctcgtgagcgagctcagggccgaaaaccagagactgacagcttctctcagggaactacaggagggtctgcagcaagaggcatcccgccctggagctcccggtagcgagagaatcctactcgacattctcgagcatgattggcgcgaagcccaggatagcaggcaggagctgtgccagaagctccatgccgttcagggcgagctgcagtgggctgaagaactgagggaccagtacctccaggagatggaggatctgaggcttaagcatcggacgctgcaaaaggactgcgacctgtacaagcatcgtatggcaacggtgctggctcagttggaagagatcgaaaaggagagagaccaagccatccagagccgagacagaatccagctgcagtactcacagagcctaattgagaaggatcaatacaggaagcaggtgagggggcttgaggcagaacgcgacgagctcctgactaccctgaccagcttggagggaaccaaagcattgcttgaagttcagctacaaagagcacagggcggtacatgtctgaaggcctgcgcgagttctcacagcctatgcagtaacctgtcctcaacttggtccctgtccgagttcccatcaccccttggcggtcctgaggcaactggagaagccgcagtgatgggcggacctgaaccgcataattcagaggaggcaacagactctgagaaggagatcaaccgcctttctatactgcccttcccgccttctgccggaagtattctccgcaggcagagagaggaggaccccgctccccctaaacgatcattcagctccatgagcgatatcaccggttctgtgactctcaagccctggtcaccagggctttctagctcttcaagcagcgattctgtgtggccccttggaaaacctgaaggtcttttggcaagaggctgcggtctcgacttcctaaaccggagcctggccatccgcgtgtccggacgcagcccccctggtgggccagagccccaggataaaggaccagacggactgtccttttatggcgataggtggtccggagcagtagtgcgacgcgttctgtcaggtccgggatccgctaggatggagcccagagagcagcgggtggaagccgcagggcttgagggagcctgtctcgaggctgaagcacagcaacggaccctgctttggaaccagggctccacactgccaagtttgatggacagcaaagcatgtcagtcatttcacgaggccttggaagcatgggccaaaggaccgggagcagagcccttctacattcgcgctaaccttaccctgcctgagcgggcagacccacacgccctatgcgtgaaagcccaggagatccttcggttggtggactcggcctacaaacgacgccaagagtggttttgtacccgcgtcgatccgttaactctcagggatttggaccggggaaccgttcctaactaccagcgtgcgcaacagcttcttgaagtgcaggagaagtgtctgccctctagtcggcatcgaggaccacggtctaacctcaaaaagcgggctttggaccagcttcgacttgtgcgcccaaagcccgtgggcgctcctgccggagatagcccagatcagcttctgttggaaccctgtgcagagcctgagcgaagtctgaggccttacagcttggtgaggccactgctagttagtgccctgcgaccagtggtcctgctgccagagtgtctggcccctagactgatccgtaacctgctcgacctcccatcttctcggcttgactttcaggtgtgccccgctgagtcgctgtcaggggaggagctgtgtccgtcatctgctccgggtgcgcctaaagctcagcccgcaactccgggtcttggttcccggatcagggcaattcaagagtcagtagggaagaagcactgtctgcttgagcttggagcacgaggcgtgcgtgagctcgttcagaatgagatctaccccatcgtgattcatgtcgaagttactgagaaaaacgtcagagaggtgcgcggtctgttaggccgacctgggtggagagattctgagttgctccgccaatgccgcggatcagagcaggtgctctggggattaccttgctcttgggtgcaggtgccggctcacgaatgggggcacgccgaggaactggcaaaggtggttcggggaaggatcttgcaggagcaagccagactggtgtgggtggaatgtggatcttcccggggatgcccaagcagtagcgaggcctag

SEQ ID NO: 217214 - DNA, 2241 bp, synthetic construct
  misc_feature 1..2241: note = Description of Artificial Sequence: Synthetic coding sequence
  source 1..2241: mol_type = other DNA
atgggggtaggtgtgggccttgggaatgggctgagactgctgccatggatggaggcctcccggcctggcgcaccaggcagtgagcgaattcttctcgacatattagaacacgactggagagaggctcaggacagcaggcaagagctctgtcaaaagttgcacgcagtgcagggtgagctgcaatgggcggaggagttgcgggaccagtaccttcaggagatggaggatctgcgtctcaagcaccgaacactgcaaaaagattgcgatctgtataagcaccgcatggccaccgtgttagctcagctggaagaaattgagaaagaacgggaccaggctattcagagcagagatcgcatacagctacagtactcccagagtcttattgaaaaggatcagtacaggaaacaggttagagggctggaagctgaaagagatgaactgctgacaacattgacatccttagaaggtacaaaagctctgctggaagtgcaactgcaaagggcgcaggggggtacgtgcctgaaggcatgcgcctcttcccattctctgtgctcaaatctgtcttccacgtggtccctaagtgagttccctagtcccctgggcggacctgaggccaccggcgaagccgctgtgatggggggtcccgaaccacacaattccgaggaggccacggactccgagaaggagattaatagacttagtatcctgccgtttcccccatcagctgggtcgatccttagaaggcagcgcgaagaggaccctgcacctcctaaacgttccttctccagtatgagcgacataaccggatctgttacactgaagccctggagccctggacttagctcctcaagctcttccgacagcgtctggccactgggaaagccagaaggcctgctcgccagaggttgcggcctggatttccttaaccggagccttgccatccgagttagtggaaggtccccccctgggggtcctgagcctcaggataagggcccagatgggctttccttctacggagatcgttggagcggcgcagtggtgcgccgtgtgttgtcaggcccaggctcggcgaggatggaaccaagagaacaacgagtcgaggcagccggacttgagggtgcctgtctagaggcagaggcccagcagcgcacattgctatggaaccaaggttccaccctcccgtctttaatggactctaaggcgtgccaatcctttcatgaagccctggaagcctgggctaaggggccaggtgcagaaccattttatatccgcgcaaatctgacactgcctgaaagggcggatccccacgccctctgcgtaaaagcacaggaaatcttacgcctggtggacagcgcctataaacgacgacaggagtggttttgcacgagagtggacccactgacacttagagacttagatcgcggtacagtccctaactaccagcgtgctcagcaattgctggaagtgcaggagaagtgtctcccaagttcgcggcatagaggccctcgcagcaatctgaagaagagagctctggaccagctccggttagtgcgcccaaaacccgtgggagccccagccggtgactcgcccgatcagcttctcttggagccgtgtgccgagccagagcggagtttacgcccttatagcctggtgcgaccactgttggtttctgcccttcgcccagtcgttctgctgcccgagtgcctggccccacggcttatccggaatctgctcgatttgccctccagcaggctggactttcaagtttgtcccgcagaatctctgtccggggaggagctctgcccttcttccgctccaggtgcccctaaagcccagcccgcaaccccaggcctgggcagtagaattcgggctatccaggagagtgttggcaagaagcattgcctccttgagcttggggcacggggtgtgagggagctggtacagaatgagatctatcctatcgtgatccacgttgaggttacagagaaaaatgtgcgagaggtacgcggactgctaggaaggccagggtggagagattccgagcttctcagacagtgcagaggcagcgagcaagtcctgtgggggctgccatgcagttgggtgcaggtgcctgcccatgaatggggccatgcggaagagctggccaaggtagtacgtggcagaatcctacaagagcaggccagactagtgtgggtggagtgtggctcctccagaggctgcccatcttcctccgaagcatag

SEQ ID NO: 217215 - DNA, 1443 bp, synthetic construct
  misc_feature 1..1443: note = Description of Artificial Sequence: Synthetic coding sequence
  source 1..1443: mol_type = other DNA
atggaagatctgcggcttaagcatcgcacactccagaaagattgtgacctgtacaaacatcgaatggcaacagtactggcacaactggaggagatcgaaaaggaacgagaccaagcgatccagtccagggatagaattcagctccagtactcccaatccctcatcgagaaggaccaataccggaagcaagtcagggggttagaggccgagagagacgaattactcactaccctgaccagcctggagggaactaaggccttactggaagtacagctgcagcgtgcccagggtgggacttgcttgaaagcatgcgcctcttcgcacagcctgtgctctaatctgtcatcaacctggagccttagcgagttcccatcacctctgggtggacccgaagcgaccggcgaagccgctgtcatggggggtcctgaacctcacaatagcgaggaggctacggactctgagaaagaaattaaccgattatcaatcctgccattcccacccagcgcgggttctatcttgagacgccagcgggaggaggacccagcacctcctaagaggtctttttcatctatgtctgacattaccggctctgtgacccttaaaccatggagcccagggctaagctctagctcgtcttcagatagcgtctggccactgggcaagcctgaagggcttcttgcacggggttgcggactcgactttttgaatcgctccctcgccattagggtcagcgggagatccccgccaggcggtcccgagccccaggacaagggaccagatggcctctctttttatggggaccggtggagcggtgcggtcgtgcgcagagttctgagcggcccagggtcagctcgaatggaaccccgagaacagagagtggaggctgccggactcgaaggcgcatgcctggaggcagaagctcagcagcggactcttctgtggaaccaaggtagcaccttgcccagcctgatggattcaaaggcctgtcaaagcttccacgaggccctcgaggcgtgggcaaagggccctggtgctgagcccttctatattagggccaacctgactctccctgaacgggctgaccctcacgctctgtgcgttaaagcccaggaaatccttaggctcgtcgactctgcttacaagaggcgtcaggaatggttttgcaccagagtggacccactcacacttcgtgatcttgatcgtgggacagtgcctaattaccagagagcccaacagcttctggaagtgcaggaaaaatgtcttccatcctccaggcacaggggccctagaagcaacttgaagaagcgcgctctggatcagctgaggctggtgaggccaaaacctgttggcgctcctgctggcgatagtcctgaccagctcttgctggaaccttgtgctgaacctgaacgatccctgcggccatactccctagtcagaccttag

SEQ ID NO: 217216 - DNA, 222 bp, synthetic construct
  misc_feature 1..222: note = Description of Artificial Sequence: Synthetic coding sequence
  source 1..222: mol_type = other DNA
atgcccggaggtggacccgagatggacgattacatggagactctcaaggatgaggaagatgcattgtgggagaatgtcgaatgtaaccggcatatgctctcgaggtacattaatccagcgaaactaaccccatacctgagacagtgtaaagtgatcgatgaacaagatgaggacgaggtgctgaacgcgccaatgttgccttctaaaattaatcgagcttag

SEQ ID NO: 217217 - DNA, 3465 bp, synthetic construct
  misc_feature 1..3465: note = Description of Artificial Sequence: Synthetic coding sequence
  source 1..3465: mol_type = other DNA
atgccgggaggcggacccgaaatggatgattacatggagactttgaaggacgaggaggacgccctgtgggaaaatgtggaatgtaacagacatatgctgtcacgctacataaaccccgcaaagctgaccccatatctgagacagtgcaaagtgattgatgaacaggacgaggacgaagtcctcaacgcacctatgctaccctcaaagattaaccgcgcaggtaggctactggacatcctgcataccaaaggacaacggggatacgtcgtgtttctggagtctttggaattctactatccagagttgtataagctggtcacagggaaggaaccaacaagacggtttagcacaatcgtggtggaggaagggcacgagggacttacccatttcctgatgaatgaagtaatcaagcttcagcagcagatgaaggcgaaagatctacagaggtgcgaactgctagcacgtctccggcagctggaggatgagaagaagcagatgaccctcactagagtcgaactgcttacctttcaggaaaggtattataagatgaaggaggaaagagacagctacaacgatgagctcgtcaaggttaaagacgataattacaacttagctatgcgctacgcccagctttcagaggagaaaaacatggccgtgatgcgttccagagatttacagctggaaatcgaccagctgaaacaccgtctcaacaaaatggaggaggagtgcaagctcgagcgcaatcagagtctaaaactgaaaaatgatatcgaaaaccgccctaaaaaggagcaagtcttggagctcgaacgcgaaaatgagatgctgaagaccaaaaatcaagagctgcaaagcattatccaggccggaaagagaagcctgcccgacagcgataaagccattctggacatcctcgaacacgaccgcaaagaagccctggaggacaggcaggagctcgtgaatagaatctataatcttcaggaagaagcacggcaggccgaggaactgagggacaagtacctggaggagaaggaagacctcgagctaaaatgtagcactctcgggaaagattgtgagatgtataagcatagaatgaacaccgtcatgctgcaactcgaggaagtggagcgggaacgggatcaggcctttcattcacgagatgaggcgcagacacagtattcccagtgtctgattgagaaggacaagtaccgaaaacagatccgcgaacttgaggaaaaaaacgacgagatgcgcatcgaaatggtgcggagggaagcatgcattgtgaatcttgaaagcaaactgagaaggctctccaaggactctaacaaccttgaccagagcttacctcgcaacctgcctgtgaccatcatctcgcaggattttggcgacgcttctccccgaactaacgggcaggaagcagacgacagctctacctcagaggagagcccagaggattcaaagtacttcctgccataccatccacctcaacgaagaatgaatctgaaaggtatccagctacaacgtgcaaaaagtcccattagcctcaaaaggacgtctgacttccaggctaagggccacgaggaagaggggacggatgcctcgccatccagctgcggttctctgcctataacaaattccttcaccaaaatgcagccaccccgatctagaagttctattatgtccatcaccgctgaaccacccggaaatgactccattgtccgcagatacaaagaagatgcccctcaccgtagtaccgttgaagaggacaacgacagcggtggattcgacgcactggatctggacgacgacagtcacgagcgttattccttcggccctagttctatccattcttcaagcagttctcatcagtcagaaggcctcgatgcatacgacctggagcaggtcaatctgatgttcagaaaattcagtctcgagcgcccttttcgaccttcggttacatccgtggggcatgtaaggggcccagggccatccgttcagcataccacactcaacggagattcactcaccagccagctcacgttgctgggcggaaatgctcgcggatctttcgtgcactccgtgaaacctggcagcctagccgaaaaagccggtctcagggaaggccaccaacttctgctgctggagggctgcatccgaggcgaacgtcagtccgttccccttgatacctgtacaaaggaggaagcccattggacaatccagcgctgcagtggccctgtgacacttcactataaagttaatcatgaagggtaccgaaaattagtgaaggacatggaggatggactgattacctccggagactctttctacatccgactgaacctcaatatcagcagccagctggatgcctgcactatgtccctgaaatgcgacgatgtggtacatgtccgggacacgatgtatcaagatagacatgagtggctgtgtgctagagtcgaccctttcacagaccatgacctggacatgggaaccatccccagttactcacgagcacaacagctgttactcgtgaaactccagagactgatgcacagggggagccgcgaggaagtggatggtactcaccataccctacgggcactcagaaacaccctgcaaccagaagaagctctgagtacatccgatcctcgggtgtctccaaggctgagccgtgcctcatttttattcggacagttgctccagttcgtctctaggtctgaaaataagtacaaacggatgaactcaaatgagagagttaggatcattagtggcagccctctcgggagcctcgccaggtcttctttagatgccactaagctgcttaccgagaagcaggaggagctggatccagagtctgaactgggcaagaacctgagtctcattccgtacagtcttgttagagcattctattgcgaacggagaagacctgttctgttcacccccacagtgctcgctaagactttggtccagcgccttttgaactcaggcggtgccatggaattcaccatttgcaaaagcgatatcgttacccgcgacgaatttctgcgaaggcaaaagacagagacaatcatatacagtcgggagaaaaacccgaacgcctttgaatgcatagcaccggctaatatagaggccgtcgccgctaaaaacaagcattgcttactagaggctggcataggctgtacacgggatctaattaagtcaaatatataccccatagtcctgtttatccgggtttgtgagaaaaatattaaacgcttccggaagttgttgcccagaccagaaacagaggaggaatttttgagagtgtgtaggctgaaggaaaaagagctcgaagccctcccatgcttgtatgccacagtggaacccgacatgtggggctctgtcgaagagttacttagagttgtgaaggataaaattggagaggagcagcgcaagacgatttgggtggatgaggaccagttgtag

SEQ ID NO: 217218 - DNA, 3114 bp, synthetic construct
  misc_feature 1..3114: note = Description of Artificial Sequence: Synthetic coding sequence
  source 1..3114: mol_type = other DNA
atggccaccgagtctacacccagcgaaatcattgaaagagagcgcaagaaacttctcgagattctccagcacgatccggattccatcctcgacaccctgactagtagaaggctgatatcggaggaggagtatgaaacactggagaatgtaaccgatctgttaaagaagagcaggaaactgctgatattagtccagaaaaagggcgaagctacctgccagcacttcctcaaatgtctcttttctaccttcccacagagcgctgctatctgcggcctcagacatgaagtgcttaaacatgagaacaccgtgcctccacaaagtatgggagcctctagcaactcagaggatgccttttcacccggaatcaagcagccagaggccccagagataacagtctttttcagcgagaaggagcacctggaccttgagacgagtgaattcttcagggataagaaaacatcgtatcgtgagactgcgctaagcgccagaaaaaacgagaaggaatacgatactcccgaagttactttgtcgtactctgtggagaaggtcggatgtgaggtacctgccacgataacatacattaaggatggccaacgctacgaggaacttgatgattctttgtatctggggaaggaggagtaccttggatctgtcgacacccccgaagacgcagaggcaaccgtcgaggaggaggtgtatgacgatccagaacacgtggggtacgacggcgaggaggacttcgaaaattcagagacgactgagttttcaggagaggaaccgtcctacgagggcagcgaaacctccctgtcattagaggaagagcaggagaagtcgattgaggagaggaaaaaggtgtttaaggatgttttgctctgcttgaatatggatcggagccgcaaagtcctgccggatttcgttaagcagttttccctggaccgagggtgtaaatggacccctgaaagccctggggatctggcctggaacttcctcatgaaggtgcaagccagagatgtgaccgccagagatagcatccttagtcataaggttctggatgaagatagcaaggaagacttgcttgcaggagtggagaacctggagatacgggatattcagaccattaaccctttggacgtcctgtgcgcaacgatgctgtgcagtgactcgagtctccaacgtcaggtgatgtcaaacatgtaccaatgtcagttcgctttaccactccttttacccgatgcagaaaataacaagagcatcctgatgctgggagccatgaaggatatcgtgaaaaagcagtctacgcagttcagcgggggtcccaccgaggatacagagaagtttctgactttaatgaagatgcctgtgatctcgttcgtaagactggggtattgcagtttttccaagtcgcgtattctcaataccctcctgagccccgcacagctaaagctccataaaatatttctccaccaggacctccctctactggtgcttcctcgccagattagtgatgggctggtggaaattacctggtgcttccctgactcagatgataggaaagaaaatcctttctttcagaaaccggtggccctcgccaacctgagaggcaacctcgagagcttctggacccaattcggtttccttatggaagtgtcctcggccgtcttcttcttcactgactgtctgggggaaaaagaatgggacctgctgatgttcttgggggaggcagcaattgagcgctgttactttgtgctttctagccaggcacgggagtctgaagaggctcagatttttcagagaatcctgaacttgaagcccgctcagctgttgttttgggagaggggggatgcgggagatcgcagaaaaaatatggaaggccttcaggctgccctacaggaagttatgttcagcagctgccttcggtgcgtgtccgtggaggacatggccgctctggcacgagagctcggaattcaggtcgacgaggattttgagaacacccagcggatccaggtcagctccggggaaaatatggccggtactgctgaaggggagggccaacagcggcactctcagcttaagagctcttccaaatcccaggccctgatgcctattcaggagccaggaactcagtgcgagttgtctcagaacttgcagaacctatatggtacccctgtgttccgcccagtgctggagaattcttggttatttcccacccggatcgggggaaatttcaaccacgtgtcgttaaaagcttcttgggtaatgggtcgacccttcggttctgagcagcggcctaaatggttccaccctctcccattccaaaacgcaggggctcagggcagaggcaaatctttcggtattcagtcttttcatccccagatcttctactctggtgagcgttttatgaagttttctcgggttgcccgtggttgtcattccaatggcactttcggcaggctccctaggcctatatgccagcacgttcaggcatgcccagagcgtcctcagatgatggggactttggaaagaagtagagctgtagcttctaagattggccactcttactccctggattcccagccggcacgcgctgtgggaaaaccgtggccacagcaggcatgcacccgcgtgaccgaactgacagaagcaactggaaaattgatcaggacgtcgcacatcggaaaaccccatccccagtctttccagccagccgcagctacccagaaactgaggcctgcgtctcagcagggagtgcagatgaaaacacaaggcggtgcatccaatcctgctttacagataggatcacaccctatgtgcaaaagctctcagtttaaatcagatcaaagcaatcctagcactgtgaagcactctcaaccgaagccattccactccgtaccttcccagcccaaatccagccaaacgaaatcttgtcagtctcagccgtcccagaccaagccctcaccttgcaagtctacacagccgaaacccagtcagccttggcctccacagagtaaaccatctcagccccgaccccctcagccaaagtcaagttccacgaatccctctcaggctaaagctcaccactcaaaggctggacagaagagaggcggtaagcactag

SEQ ID NO: 217219 - DNA, 933 bp, synthetic construct
  misc_feature 1..933: note = Description of Artificial Sequence: Synthetic coding sequence
  source 1..933: mol_type = other DNA
atggccaccgaatcaaccccttcggagattatagaaagagaaagaaagaaacttctggaaatcctacaacatgatccggattctatactcgacaccctgacctcgcgacggctgatttccgaagaggaatacgagaccttggagaacgtgactgacctgttgaagaagtctaggaagctgctgattctagttcagaagaagggggaagccacatgccaacattttcttaagtgtctttttagcacctttccacaatctgcagccatttgcggccttcggcctgaagtgctcaagcacgagaatacagtacctccacaaagcatgggagcaagtagcaactctgaggatgcatttagtccagggatcaagcaaccggaggcccctgagattacagtgttcttctcagagaaagaacatctggacctcgagacgagtgagttcttccgtgacaaaaaaacttcatatcgcgagacagccctgagtgctcggaaaaatgaaaaagaatacgatactccagaagtcacgctctcttactctgtggagaaggtgggatgcgaggtgcccgcaacaattacatatatcaaggacggccagcgatatgaagaattagacgactccctatacctgggtaaagaagagtatctcggctctgtagataccccagaagatgctgaagccactgtggaggaggaggtgtacgatgacccagaacatgtcggttacgatggcgaagaagacttcgaaaactcagagaccaccgagttttccggggaggagcccagctatgagggttccgaaacaagcctgagcctcgaagaggaacaggagaaatcaatagaaggttggtctcgtacccatggattgaagcggtcttcccacgtgggcctcccaaaatgctgggactatcggagagaacccccttgtctggcctag

SEQ ID NO: 217220 - DNA, 1446 bp, synthetic construct
  misc_feature 1..1446: note = Description of Artificial Sequence: Synthetic coding sequence
  source 1..1446: mol_type = other DNA
atggctactgaaagcacaccttctgaaatcatcgagagagagagaaaaaaactgctagagattctccagcatgatcccgactcgatcctcgacactttaacgtccaggcgcctgatatcagaggaggagtatgaaaccctagagaatgtaaccgacctcctgaagaaaagtaggaagcttctgattctggtgcagaaaaaaggggaggccacttgtcagcatttcttgaagtgcttgttcagtacctttccacagagcgccgctatttgtggcctgcgtcacgaagtgctcaagcatgagaataccgtccctccacagagcatgggagcttccagtaactcagaagacgcattttctcccggtattaaacagcccgaggcaccagagatcacggtgttcttcagcgaaaaggagcacctggacctggaaacatcagagttttttcgcgacaaaaagacttcttatcgggagaccgccctttcagccagaaaaaatgagaaggagtacgacacgccggaggtgaccttgagttattcagtggaaaaagtaggctgtgaagttccagcaactattacgtacattaaggatggccagaggtacgaagagctggacgattcactgtatctcgggaaggaagagtacctcggctccgtggacacccctgaagatgctgaggcaacagttgaggaagaagtgtatgacgatcctgaacacgttggctatgacggcgaggaggacttcgagaactctgagacgacagaattctcaggggaggagcctagctatgaagggtccgaaacttccctgtccttggaggaagagcaggaaaaaagtattgaggaacgaaagaaggtcttcaaagatgtcctcctttgccttaatatggaccgtagccgtaaggtgctacctgatttcgtgaagcagttctctttggataggggctgcaaatggacacctgaatctcccggagacctggcttggaatttcctgatgaaagtccaggccagagatgtgacagctcgagactctattcttagtcataaagtgctggacgaggactccaaagaagatcttctggcaggtgtggaaaaccttgaaattcgcgacatccagaccattaacccgctggatgtgctgtgtgccaccatgctgtgctccgactccagtctgcagagacaggtcatgtccaacatgtatcagtgtcagttcgcgttgccactcctgctgccagacgccgagaataacaagtccatcttgatgctcggagcaatgaaggatatcgtgaaaaagcagtctacacagttttctggcggtcctaccgaggacacagaaaaattccttactctgatgaagactcttaaaactctccgcgagttcaagttccctctcgagaaaacatggcttgggcagctgaaggttagggtctccaaggacactgtcagttag

SEQ ID NO: 217221 - DNA, 570 bp, synthetic construct
  misc_feature 1..570: note = Description of Artificial Sequence: Synthetic coding sequence
  source 1..570: mol_type = other DNA
atggtacttgaacatcctgcacgagtcgaaccattttatgccgtgttagagtcaccttccttctctcttatgggtattctgcttcgcatcgcatccggtacaaggctcagcattcctattacttctaatactctgatctattatcatccccatcctgaggacatcaagttccatctttatcttgtaccctcagacgccctcctgaccaaggcaatcgatgacgaagaggatcggtttcacggagtgaggcttcagacaagtcccccaatggagcccctgaattttggcagctcttacattgtgagcaacagtgccaatttaaaggtgatgcccaaggagctgaagttaagttaccgctcacccggtgagatacagcacttcagtaagttctatgcaggacaaatgaaggagcctatacagctggagattacggagaaacggcatggtaccttagtgtgggacacagaggtgaagcccgtggatttgcagcttgtggccgcatcagcccctcccccattttccggcctgctgtggcagcggcaacctctaaatccaccgcctgccagatag

SEQ ID NO: 217222 - DNA, 1296 bp, synthetic construct
  misc_feature 1..1296: note = Description of Artificial Sequence: Synthetic coding sequence
  source 1..1296: mol_type = other DNA
atgatgaggcagagacagtcacactactgttccgtgttgttcttgtcggtgaactacctcggtggaacatttcctggcgatatttgctccgaggagaaccagattgttagctcctatgcatcaaaggtttgtttcgaaatcgaggaggattataaaaatagacaatttctcggtcccgagggaaatgtggatgtcgagctgatcgacaagagcacaaaccgatattcagtttggtttcccaccgcaggttggtatctgtggagtgccactggcctgggctttctggtgagggacgaggtgacagtaaccattgcttttggctcatggagccaacacctcgcattagatctgcaacaccatgagcagtggctagtcgggggtcctctcttcgacgtgactgctgaacctgaggaggccgtcgccgagattcacctcccgcactttatcagcttgcagggagaggtggacgtctcatggtttctggttgcccatttcaaaaacgagggcatggtcctggagcacccagctcgagttgagcctttttacgctgtcctggagtctcctagctttagcctcatgggcattcttctgaggattgcatctggcacacgactttccatacctattacctcaaacactttaatctattatcaccctcacccagaggacatcaaattccacctatatctcgttccaagtgatgctctgctcaccaaagctatcgacgatgaagaagaccgatttcacggggtcagacttcaaaccagtccgccaatggaacccctgaattttggctcatcctatattgtctcaaattctgccaatctgaaggtcatgccaaaagaattgaagctgtcataccgcagtccaggagagatccagcatttttcaaagttttacgcaggccagatgaaagagcctatacaactggagatcacagaaaagcgtcatggcactttggtttgggatacagaggtgaaacctgtagatctacagctcgttgccgctagcgctcccccaccgttctctggggcagccttcgtgaaggaaaatcataggcagctgcaggcgagaatgggggacctgaaaggcgttctggacgacctgcaagacaacgaagtgctgaccgaaaacgagaaagaactggtggagcaggaaaaaacgcgccaatctaagaacgaggctctcctgtccatggtcgagaagaaaggggatctggccctggatgtgctgtttaggtctatttctgagagagacccctatctagtttcgtacttgaggcagcagaatctgtag

SEQ ID NO: 217223 - DNA, 1614 bp, synthetic construct
  misc_feature 1..1614: note = Description of Artificial Sequence: Synthetic coding sequence
  source 1..1614: mol_type = other DNA
atggagaagaaggagtgcccggaaaagtcttcctccagcgaggaagagctgccccgacgggatagcggatcaagccgtaatatcgacgccagcaaactcattcgtcttcagggaagcaggaagttgttagttgataattcgatacgggagctgcagtacaccaagaccggtattttcttccaggcagaggcgtgtgtgacaaacgataccgtataccgagagctcccttgtgtgtctgaaaccctgtgcgacatcagtcactttttccaggaggatgatgagaccgaggcggagcctctgctgttccgggcagtcccggaatgtcagctgtcgggaggggatatcccctctgtatccgaggagcaggaaagcagcgaaggacaggattccggtgatatctgttcagaagagaaccagattgtgtcgtcttacgcctctaaggtctgctttgagattgaagaggattacaaaaaccgccagtttctcgggccagaaggaaacgtcgatgtggaactcatcgacaagagcaccaataggtattcagtatggtttcccaccgctggctggtacttgtggtccgccaccggtttgggcttccttgtcagggatgaggtcacagtgactatagcctttggcagttggtcgcagcacttggcattggacctgcagcaccacgaacagtggctcgtgggaggacctctgtttgacgtgacagcagagccagaagaggcagtcgcagagattcacctgcctcattttatttcccttcaggccggagaggtcgacgttagctggtttctggtggcccatttcaagaatgaaggcatggtgctggagcaccccgcaagggtggagccgttctatgccgttctggaaagcccatcattcagtttgatggggattctgttgagaatcgcgagcggaacaaggttatcaattcccataacgagcaataccctaatctattatcaccctcacccagaagacatcaagttccatctgtaccttgtgccctctgatgcccttttaaccaaggccatagacgacgaagaagacaggtttcacggcgtccgcctgcagacaagccctcccatggagcccctgaacttcggatcctcttacatcgtgagtaattcagcgaatctgaaagtcatgccaaaagagctgaagttgagttacagaagccctggggagatccaacacttctcaaagttttacgcaggacagatgaaagaaccaatccaactcgaaatcaccgagaagcggcacggcactttagtatgggacactgaagttaagccagtcgacctgcaactcgtggcagcgtcagccccacccccattttctggtgctgcattcgtgaaagagaaccacaggcagctgcaggccagaatgggtgatctgaagggcgtcctggacgatctccaggacaatgaggtgttaaccgaaaacgaaaaggaactggtcgagcaggagaagacacggcagtccaaaaatgaggctctgctcagcatggtggagaaaaagggtgacctcgctctggacgttctctttcggagtatctccgaacgagacccatacttggtgagctacctcaggcagcagaacctttag

SEQ ID NO: 217224 - DNA, 1464 bp, synthetic construct
  misc_feature 1..1464: note = Description of Artificial Sequence: Synthetic coding sequence
  source 1..1464: mol_type = other DNA
atggagaagaaggagtgtccagaaaaaagtagtagttctgaggaggaacttcctagaagggtataccgggaattaccatgcgtgtccgagactctatgtgatatatcccactttttccaggaggatgatgaaaccgaagccgagcccctgctgtttcgcgctgttcccgagtgccagttaagcggaggcgatattccatctgtctctgaggaacaggagtcctcagagggccaggattctggagatatctgctccgaggaaaatcaaattgtatccagttacgcctctaaagtgtgtttcgagattgaagaggattacaagaatcgacaatttctgggaccggaggggaacgtcgacgtggagcttatcgataagtccaccaaccggtatagtgtgtggttccccaccgccggttggtacctgtggtccgcaaccggcttgggattcctggtccgggatgaggtcaccgtcaccatcgcttttgggtcctggtctcagcacctggcgctcgacctccagcatcacgaacagtggctggtgggcggacccctttttgatgtcacggctgaacctgaggaggccgtggcagagattcacctcccccacttcatcagtttgcaggccggagaggtagacgtgtcctggttccttgtggctcacttcaagaatgagggtatggtgttagaacatcccgctcgggtggaaccattctacgccgttctcgagtctccctcattcagtctcatgggcatcctcctacggatcgcatccggcacgcgcctgagcattccaataacctctaacaccctgatctactatcacccccatcccgaggatattaagttccacctgtatctggtgcccagcgatgcactgctgacaaaagcaatagatgacgaggaggacaggtttcacggagtgaggttacagacctcaccccctatggagccactcaacttcggatcttcctatatcgtgtccaactcagccaatcttaaagttatgcctaaagagttgaaacttagctatcgctcccctggcgagatccagcatttttctaaattctacgccggtcagatgaaggagccaattcagttggagatcactgagaagaggcatgggacgttagtttgggataccgaagttaaacctgtggaccttcagctggtagccgctagcgctcccccacccttttctggcgctgccttcgtgaaagaaaaccatcgccagcttcaagcccgtatgggagatctaaagggtgtacttgatgacctgcaggacaacgaggtgcttaccgagaatgaaaaagagcttgtggagcaggagaaaactcggcagagcaaaaacgaggcgttgctttcgatggtcgagaaaaagggagatctcgccctggacgtcctgtttcggtccatctccgagcgggatccttatctagtttcttatctgagacagcagaatctgtag

SEQ ID NO: 217225 - DNA, 1101 bp, synthetic construct
  misc_feature 1..1101: note = Description of Artificial Sequence: Synthetic coding sequence
  source 1..1101: mol_type = other DNA
atgtcagactatgaaaatgacgacgaatgttggagtgtcctagagggatttagagtgacactcacaagcgtgattgaccccagccggattaccccatacctcagacaatgtaaggttttaaatcctgatgacgaagagcaggtccttagtgaccctaatctcgtaatccggaaaagaaaagtgggagttttacttgacatcctgcagcggacggggcacaagggttacgtcgcctttctagaatcacttgagctgtattacccacaactctataaaaaagtgactggcaaggagccagcccgtgtgttttcaatgattattgacgctagcggggaatcaggtctcacacagctcttgatgaccgaggtgatgaagctgcaaaaaaaagtgcaagacctaactgctctgctctcatctaaggatgacttcattaaggaattacgcgtgaaggactcgttactgaggaagcaccaagagagagtgcagagactaaaagaagaatgtgaggctggtagtcgtgagttgaagcgttgtaaggaggaaaattatgacttggcgatgcggctcgcccatcaatccgaagagaaaggggcagcactaatgcggaacagggatctgcagctagaaatcgaccagctcaagcattccttaatgaaggccgaagatgactgcaaagtagaaagaaagcacactctgaaactgaggcacgccatggaacagcggccttcgcaggagctgctttgggagcttcagcaggagaaggccctactgcaggccagggtgcaagagttagaggctagcgtgcaggagggcaagctggacaggtcctccccatatatccaggtgctggaggaagactggcggcaggcccttagagaccatcaggaacaggccaataccatcttttccctgagaaaggacctaaggcaaggagaagctagaagacttcggtgcatggaagaaaaagaaatgtttgagctgcaatgtttagcccttcgaaaagatagcaagatgtataaggaccgcatagaggcaattctcctgcagatggaagaggtggctatcgaaagagatcagtccacccagatggaggggctctag

SEQ ID NO: 217226 - DNA, 1611 bp, synthetic construct
  misc_feature 1..1611: note = Description of Artificial Sequence: Synthetic coding sequence
  source 1..1611: mol_type = other DNA
atgtcagactacgaaaacgacgacgagtgctggtccgtgttggaagggttccgggtgacgttaactagcgtcattgatccatcccgaattactccatatctccgacagtgcaaggtgctgaaccccgacgatgaggaacaggtgctcagcgaccctaacctcgtgatccgcaagcgcaaggtcggcgtcttgctcgatattctacagcgcacaggccacaagggctatgtcgcttttttagagtctcttgagctgtactatccacagctctacaagaaagtgacaggaaaagagcctgctagagtattttcgatgatcatcgacgcttctggggaaagtggcctgactcaactgctcatgactgaggtgatgaaactgcagaagaaagtccaggacttgacagccttattgagctctaaggatgacttcatcaaagaacttcgggtgaaagacagcttactccggaaacatcaagagagagtgcaaagactgaaggaggaatgtgaggctgggtcgagggaactcaagaggtgcaaggaggaaaattacgatctggccatgagactagctcaccagtcagaagagaagggagcagcactgatgagaaatagggacctgcaactggagatagaccagctaaagcactctttgatgaaggctgaagacgactgtaaagtagaaaggaagcatacactgaagttacgccatgccatggagcagagaccttctcaggaactactctgggaattacaacaggaaaaagctctgctgcaggccagagtccaggaactggaggccagtgtgcaagagggtaagttagataggtcatcgccgtacatacaagtgctggaagaagattggagacaagccctgcgagatcaccaggagcaggcaaacactattttcagcttacggaaggacctccgtcaaggggaagcacggagacttcgttgtatggaagaaaaagagatgttcgaactccagtgtcttgccttacggaaagattccaagatgtacaaagaccgtatcgaagccattctgctgcagatggaggaagtggctatagagcgcgatcaggccattgctacgagagaggagctgcacgctcaacacgcaagggggcttcaggagaaggacgccctcaggaagcaggtgagagagcttggcgagaaagctgacgagttacagttacaggtgtttcagtgcgaggcccaactacttgccgtcgagggtaggctgaggcgtcagcagctggagacactcgtcctctcttctgatctcgaagacggatctccaagacgtagtcaggaactctctctgccccaagacctggaggacacccagttatcggataagggctgcctcgctggaggcggtagtccaaaacagccctttgctgccctgcatcaggagcaggtactccggaaccctcacgatgctgggctgagctctggcgaaccacctgaaaaggaacggaggagactcaaggagtcattcgagaattacagaaggaaacgtgcattgcgaaagatgcagaaaggttggagacagggggaggaggatcgagaaaatactacgggatcagacaatactgataccgagggctcttag

SEQ ID NO: 217227 - DNA, 1479 bp, synthetic construct
  misc_feature 1..1479: note = Description of Artificial Sequence: Synthetic coding sequence
  source 1..1479: mol_type = other DNA
atgtccgattacgagaatgatgatgaatgctggtctgtcttggaggggttccgagttaccctgacttccgtgattgatccatcccgcataaccccttacctcagacaatgcaaagtgcttaatcctgacgacgaggagcaagtgctgtccgatcccaacctggtgattcggaaacgaaaggtgggcgtgcttttggacattttacagaggacaggccataagggctatgtcgccttcctagagtccttagagctctattaccctcagctttataagaaagtcaccggcaaggaacctgccagagtcttctccatgatcatcgacgcgtcaggcgaatccgggttaacccagctcctgatgacagaagtgatgaaactccagaaaaaagtgcaggacttgactgccctgctttctagcaaggatgactttataaaagagctgcgcgtgaaggactccctgctccgtaaacatcaggagagggtgcagcgcctgaaggaggagtgcgaggccggatctcgcgagttgaagcggtgcaaagaggagaattacgatctggctatgaggcttgctcaccaatccgaggagaaaggagccgctctgatgcgcaaccgggatctgcagctagaaattgaccagctgaaacatagcttaatgaaagccgaggacgattgcaaggtggaaaggaagcatacgctgaaacttaggcatgccatggaacaacgcccttcacaggagctgctgtgggagttgcagcaggaaaaggcactgctccaggcacgagtgcaggaactggaagcatccgtccaggaggggaaattagaccggagctcgccttacattcaggttcttgaagaagactggcggcaggcactgcgcgaccaccaggagcaggcgaacacaatcttcagcctgaggaaggacctgaggcagggcgaagcacggcgactgcgatgcatggaagaaaaggagatgtttgaactccaatgtcttgctttaaggaaagatagcaagatgtacaaagatcggattgaagccatcctcctgcagatggaagaagtggccattgaaagagaccaggctattgccacacgcgaggaactccatgcacagcatgcccgaggtctgcaggagaaggatgcactgaggaagcaggtacgggaattgggagaaaaggcggatgagcttcaactgcaggtcttccaatgcgaagcccagctccttgccgtcgaaggacgtctgagacgccagcagttggagactttagtcctgtcctccgatctggaagatggctcgccccgaaggtctcaggagttgagcttgcctcaggatctggaagacacacagctgagcgacaagggttgccttgccggtggcggatctccaaagcagcctttcgccgctctccatcaggaacaagtgcttaggaatccccacgacgccggaccggcagggctgcctggtattggcgctgtgtgctag

SEQ ID NO: 217228 - DNA, 3501 bp, synthetic construct
  misc_feature 1..3501: note = Description of Artificial Sequence: Synthetic coding sequence
  source 1..3501: mol_type = other DNA
atggacctaggtacggccgagggcacgcgttgcactgatccccctgccggaaagcctgcaatggccccaaagcgaaagggtggtctgaaactgaacgcaatctgtgccaagctgagtcggcaggttgtggtggagaaaagggcggacgctggttctcatacagagggcagccccagccagccccgtgaccaggagaggtccggcccagaatctggggcagccagggccccacgctctgaagaagacaaaagaagggcagttatcgagaagtgggtgaacggagagtacagtgaagagccagctcccacccctgtgctggggaggattgctcgtgagggacttgagctgccccctgaaggggtgtatatggttcagccacaagggtgcagcgatgaggaggaccacgcagaagagccgagcaaggatgggggtgcactggaggagaaagatagcgacggtgcagcctcgaaagaggacagcggcccatcaacccgacaggctagtggcgaggcttcctctctgcgggattatgccgctagcacaatgaccgaattcttgggcatgttcgggtacgacgatcagaatacccgggacgagttggctcggaagattagtttcgagaagttgcacgcgggatccaccccagaagccgctacttcgagcatgctgcctacctcagaagatactctctccaaacgggctcggttcagtaaatatgaggagtatattagaaagctgaaggccggagagcagttgtcatggcctgcaccatctactaagaccgaggaaagggttggaaaagaagtcgttggcacccttcccggtctccgccttccctcctcaactgcgcatcttgagaccaaggccaccatcttacccctacccagccatagctcagtgcagatgcagaatctggtcgccagggcctcaaaatacgatttcttcattcagaagctgaaaacaggtgagaatctacgccctcaaaatggctctacttacaagaagccaagcaaatacgacctggaaaatgttaagtacttacacctcttcaagccgggagagggatccccagacatgggcggtgcgattgccttcaaaaccggaaaggttgggaggccatcgaagtacgatgtacggggaatccagaagccaggacccgcaaaagttccacccactccgtcgttggcacctgccccattagcgagtgtgccatccgcgcctagcgcaccaggtcccggaccagagcctcctgcatctttgtccttcaatacccctgagtatctaaagtctaccttctccaaaacggactcgatcacaaccggaacagtctccaccgttaaaaacgggctcccgacagataagcctgccgtgactgaagatgtgaacatataccagaagtacatcgccagattctcaggctcgcagcattgcggacatattcactgtgcgtaccagtatcgtgagcactaccattgcttggacccagaatgtaattaccagagatttacctccaagcaagacgttattcgccattacaatatgcataagaaacgcgataattccctgcagcatggattcatgaggttcagcccgctcgatgattgttccgtgtactaccatggctgtcatttgaacggcaagagcactcactatcactgtatgcaggtgggctgcaataaggtgtatactagcactagcgacgtgatgacgcacgagaacttccacaagaaaaacacacagttgatcaacgatggctttcaaagatttagagccactgaagactgtggaacagccgactgccagttctacggccagaaaaccactcacttccattgcagacgacctggatgtacatttacatttaaaaataagtgtgacatagaaaagcacaagtcctatcatattaaggacgacgcatatgcaaaagatggcttcaaaaaattctacaagtacgaagagtgtaaatacgagggatgcgtgtattcaaaagctactaaccacttccactgcatacgtgcagggtgcggattcactttcacctctacatcacagatgacatcacataaaagaaaacacgagcggaggcatatcagatccagtggagctctcgggcttcccccatctttgttgggagctaaagatacagaacatgaggaatccagcaatgatgatttagttgattttagcgctctttccagcaaaaatagcagcctttccgcctcccctacatcccaacagtccagtgccagcttggcggctgccacagccgcaacagaagccggtccttcggcaactaaaccgcctaactccaagatctcaggcctacttccccagggtctacctggcagcatcccactggctttggcactgagcaattctggcctcccaaccccgactccttacttcccgatcctagccggtagagggtccacttcactgccggtagggacaccttccttacttggggcagttagttcaggcagcgccgcatcagccactcccgacactccgacccttgtcgcctcaggggcaggcgattctgcaccggtggcagctgcatctgtgcccgcacctcccgcttccatcatggagaggatctctgcttctaaaggcttaattagtccaatgatggcccgacttgcagcggcagctctgaagccctccgctaccttcgaccccggtagcggccaacaggtcacccccgctcgattccctcccgcacaggtcaagccagaaccaggagaatcaaccggtgcacccggaccccatgaggcatctcaggatcgatcattggacctgaccgtgaaagagccaagcaacgaatctaatggccatgccgtgccggcaaactcctcactgctcagcagtctaatgaacaagatgagccaaggcaatccgggacttggaagtcttctgaacataaaagccgaagccgagggctctcctgccgctgaaccgtcccccttcctgggaaaggctgtgaaggcactagtgcaggagaagcttgccgagccttggaaggtttacctccggaggtttggcacaaaggacttctgtgatggccaatgcgatttcctgcacaaagctcacttccattgtgtggttgaagaatgcggagccctgttctcaactctggatggcgcaatcaagcacgccaacttccactttaggacagaaggtggcgctgccaaaggtaacaccgaagccgctttccccgcatccgccgcagaaacaaaacctcccatggccccttctagtccccctgttcctcctgtcacaacggctacagtctcctctctcgaaggcccagccccatctcctgcatccgtgcccagtaccccaaccttgctggcatggaaacaactcgcatcgactatcccacaaatgccgcagatccccgctagtgtccctcacctcccagcttccccactggctactacttccctggaaaatgcaaaacctcaggtaaaaccgggttttctacagttccaagaaaaatag

SEQ ID NO: 217229 - DNA, 5279 bp, synthetic construct
  misc_feature 1..5279: note = Description of Artificial Sequence: Synthetic coding sequence
  source 1..5279: mol_type = other DNA
atggacttagggacggcggagggtaccaggtgcactgacccccctgctggcaagcctgccatggccccaaagagaaagggcggactcaagcttaacgctatatgtgccaaactcagccggcaggtagtagtggagaagcgtgcagacgctggctcccatactgaggggagcccctcccagcctagagatcaagagaggtcaggacccgaaagcggcgcagctagagcacccagatcagaggaagacaagcgcagagcagtcattgaaaaatgggttaacggtgagtattcagaggagccggcaccaaccccggtgctgggaaggatagccagggaggggctggagttgccacctgagggagtctacatggtacaaccccaaggttgctccgacgaggaggaccacgccgaggaaccctctaaagacggcggagcattagaagaaaaggattccgatggagcggcaagcaaagaggacagcgggccatctacaaggcaggcgtcaggggaggcctcttccctgcgcgactacgcagctagtactatgacagaattcctcggcatgtttgggtatgatgaccaaaatactcgtgacgagttggcacgcaaaatttctttcgaaaaactgcacgcaggctcaaccccagaggccgctacctccagcatgttgcccactagcgaggatacactgtcaaaaagggcccgattcagcaagtacgaggagtacattagaaaactcaaggcgggagaacagctctcctggcctgctccctccactaagactgaggagcgcgtcggcaaagaggtagtgggaaccctgcccggactgcgcctgccctcctccacagcgcacttggagactaaagcaacgatcttaccgctcccctcccattcctcggtgcagatgcagaatctggtagcacgcgcatctaaatatgatttctttatccagaagctcaaaacgggagagaacctccggccacaaaacggctctacgtacaagaagcccagcaagtacgacctcgagaacgtaaagtacctccatcttttcaagccgggtgaaggctcaccagacatgggaggcgctattgctttcaagacggggaaggtggggagaccctcaaagtacgatgtgaggggtatccaaaagcctggaccagccaaagttccgcctacaccttcactggcaccagcgcctttggctagcgtccccagcgctccaagcgctcccggaccgggtcccgaacccccagccagtttatcctttaatacccctgagtacctgaaatctacgttttcgaagaccgattcaattaccaccggaaccgtgagcacggtgaagaatggactccccacggacaagccagccgtgactgaggacgtcaatatatatcagaaatacattgctcggttttcaggttcccagcactgcggtcatattcactgtgcctatcaatatagggaacattatcattgcttagatcccgaatgcaattatcagcgctttacatcgaaacaggatgtgatccgacactacaacatgcacaagaagcgagacaattctctgcagcatggattcatgagatttagccctctcgatgactgctctgtttactatcacggctgtcacttgaacgggaaaagtacacattatcactgtatgcaggtaggctgtaataaagtttacacgagcacctccgatgttatgactcacgagaattttcacaaaaagaatacccagttgattaatgacggttttcagagattcagggctaccgaagactgcggcacggccgattgtcagttctacggacaaaagactacgcatttccattgcagacgcccagggtgtacttttacattcaaaaacaagtgcgatattgaaaaacacaagtcttatcacattaaggatgacgcctacgcgaaggatgggtttaagaaattctacaaatatgaagaatgtaagtatgagggatgtgtttatagtaaggccaccaaccatttccattgcatacgggctggctgcggcttcacatttacatcaacctcccagatgacatctcataagcggaagcacgagcggagacacatcaggtccagtggcgctctcggtctgcccccatccctattaggcgctaaagacacagagcacgaagagtcctccaatgatgatctggtcgatttctcagctctatctagcaagaactcatcactgtccgctagccccactagtcagcagagttccgcttccctggcagccgcaacagccgctacagaggccggtcctagtgccaccaagccacctaattcaaagataagtggcctgctcccacaggggcttcccggaagcatccccctagctttggccctctcgaactcaggcttgcctactccgactccatacttccccatactcgctggacggggttctacttctctgcctgtgggcacaccatcactcctgggtgctgtttcaagtggcagtgccgcatctgcgacccccgatacaccaactctcgtggcctcaggcgctggagattcagctcctgtcgcagctgcctcagttcctgcgccacccgctagtatcatggagagaatcagcgcctcgaaagggctcatcagcccaatgatggcgaggctggctgccgcagccctgaagccctccgctactttcgaccctggaagcggccaacaggttacacccgctcgcttcccaccagcacaggtcaagcccgaacccggagagagcaccggtgctccagggcctcacgaagcttcacaagatagatctctcgacctcactgtgaaggaacccagcaacgaaagcaacggacatgctgtgcctgccaattcatctttgctttctagtctcatgaacaagatgagccaaggtaatcccggtctaggctcactcctcaatataaaagcggaagctgaggggtcacctgccgcagagcctagcccttttcttggaaaagctgtgaaggctctggtgcaagagaagctggccgagccatggaaggtttatctgaggaggtttggaaccaaagacttttgtgacggccagtgtgatttcctccacaaagcacatttccactgcgtggtggaagaatgcggggcactgttctctacgctggatggcgcaattaaacatgccaattttcatttccgtacagaagggggagcagccaagggtaacaccgaggcagcgtttccagcctcagccgctgaaactaagcccccaatggcccctagtagtcctcccgtaccgcctgtgactacagccaccgtcagctcactggaaggtcccgcaccttctccagctagtgtcccgagtacccccactcttttagcgtggaaacagctcgccagtaccattccccagatgccacagatcccagcatctgtaccgcacctgcccgcttcacctttggcaacaacttccctcgagaacgctaagccgcaggtcaagcctggatttcttcaattccaggaaaatgatccttgtttggctacagactgcaagtacgctaacaagttccattttcactgtctgttcggcaactgcaaatacgtgtgcaaaaccagcggcaaggctgagtcccattgtcttgatcatattaatccgaacaacaaccttgtaaacgttagagatcagttcgcgtactacagtctccaatgcctgtgccctaaccaacactgcgagtttagaatgagggggcattatcactgtctgcggacagggtgttatttcgtaaccaacataaccaccaaacttccttggcacataaaaaagcatgagaaggccgagcgaagagcggcaaatggctttaaatattttactaagagagaggaatgcggtagactgggatgtaagtataaccaggtgaactcccacttccattgtatccgtgaggggtgtcagttttcctttctgcttaaacaccagatgacctctcatgctcgcaaacacatgcggcgaatgcttgggaagaatttcgaccgggttcctccttcccagggtcctcccggactcatggacgcagagacagatgagtgtatggactacacaggctgctccccgggagccatgtctagtgagtccagtaccatggataggagctgctcctccacaccggtggggaatgaatccacggccgctgggaacacaataagcatgcctacggccagcggggctaaaaagaggttttggataatcgaggatatgtccccctttggaaagaggaggaagactgcaagtagtcggaaaatgctggacgagggcatgatgctcgaaggatttagaaggtttgatctgtacgaggattgtaaggacgcagcatgccagttctctctgaaagtgacgcattaccactgcactagggaaaattgtggatacaagttctgcggacgcacacacatgtataagcatgctcagcatcacgacagggtggataacctggtgctggacgacttcaagcgcttcaaggccagcctgagctgccacttcgccgattgtccattctctggaacatccacacacttccattgcttgcgctgtagatttagatgcacggattcgacaaaagtgaccgcccaccgtaaacaccatggtaaacaggacgtgattagcgccgctgggttctgccagtttagcagcagcgcggactgtgcagtgcctgactgcaaatataagttgaaatgttcccacttccattgtactttcccgggttgccgccacaccgtcgtgggcatgtcacagatggattctcataaaagaaaacatgagaaacaggaaagaggggaaccagcagccgagggccctgccccagggcctcccatttcactggacggaagcctaagcctcggcgcagaacctgggtccctgctttttctacagagtgcagctgctggtttaggcctggccttgggcgacgccggagacccagggcctccggatgccgctgccccaggccctcgcgaaggggctgcggctgcggcagccgctgctggtgagtccagccaggaagatgaagaagaggagcttgagctacccgaagaagaagccgaggatgatgaagacgaggacgatgatgaggacgatgatgatgaggacgatgacgaggatgacgacgatgaagacttgcggaccgacagcgaggaatctctgccggaggccgctgctgaggctgcgggtgccggagcaaggacacctgctctcgccgcactcgcggcattgggagccccaggtcccgcaccaaccgccgcttccagccctta

SEQ ID NO: 217230 - DNA, 4332 bp, synthetic construct
  misc_feature 1..4332: note = Description of Artificial Sequence: Synthetic coding sequence
  source 1..4332: mol_type = other DNA
caggagctcgaggccgctttgcaccgggatgatgttgaatttatttctgatctaatcgcgtgtctcctgcaggggtgttatcaacgccgtgatatcaccccccagacattccacagttaccttgaggacatcatcaattacagatgggagctcgaggaggggaaacccaaccccctgagagaagcaagcttccaggatctgcctctgagaactagagtggagatcctccatcgtttatgcgattaccgcctggatgccgatgacgtgttcgatctgttgaaaggactggacgccgattccctccgggtggaaccactcggcgaggacaactcgggggctctctactggtatttttatggtactcgtatgtacaaggaagaccctgtgcagggtaagagtaacggggagctgagtctgagcagggaatctgaaggccagaagaatgtcagctctatacccggtaaaaccggcaagagacgcggtcggccacccaaacgcaagaaattgcaggaagaaattttgctatcagaaaagcaggaagaaaacagtctcgccagtgagcctcagaccaggcatgggagccaggggccaggacagggcacatggtggttactctgccaaactgaggaagagtggagacaggtcaccgagtctttcagagagcgaactagcctcagggaacgccagctctataagctgctcagcgaggattttctccctgaaatatgtaacatgatcgcccagaagggaaaaagacctcagcgtactaaggccgaactccaccccagatggatgtcagatcatctctctataaaacctgttaagcaggaggaaacgcccgtcctgaccaggattgagaaacagaagcgcaaagaggaggaagaagagagacagatactgcttgctgtgcagaagaaagagcaggaacagatgcttaaggaagagaggaagagggagctcgaggagaaagtcaaggctgtggaaggcatgtgtagcgttagggttgtatggcgaggggcatgcttgtccacatctagacctgttgacagggcgaagagacgaaaactgagggaggagagagcatggttactcgctcagggcaaggagcttcctccagagctctcacacctggacccaaactctccgatgagagaggaaaaaaaaacgaaagacctctttgagctcgacgatgacttcacagctatgtataaagtgctggatgtagtaaaggcccacaaggactcttggcccttcctcgaacctgtggacgagagctacgcccctaattactaccagataatcaaagctccaatggatatcagttccatggaaaagaagctgaacggcggtctgtactgtaccaaagaagagttcgtcaatgacatgaaaacgatgttccgcaattgcaggaagtacaacggggagtcctctgagtacacaaaaatgtccgataatctcgagcggtgctttcatagggccatgatgaaacacttccctggcgaggacggcgatactgatgaagaattctggattcgcgaggacgaaaagcgggaaaagagacggagtcgggctgggcgatcgggcggtagccatgtctggaccagaagcagagacccagagggatctagtagaaaacagcagcctatggagaacggaggtaaaagtttgcctcccacacgacgagctcctagctctggagatgaccaatcctccagtagcacccagcctccacgcgaagtggggacaagcaatgggagggggttcagccatccactccactgtggcggtaccccatcacaagctccatttcttaaccagatgagacccgctgtccccggtacatttggtcccctcagaggctccgatcccgcaaccttatacggcagctccggggtccccgagccacaccccggagaaccggtgcagcagagacaaccctttaccatgcaacctccagttggcataaactccctcaggggccctcggttagggacccccgaagaaaagcagatgtgtggcggactcactcacctctcaaatatgggacctcaccctggatccctgcagctggggcagatctctggaccctctcaagatgggtccatgtacgcacctgcccagttccaaccaggatttatcccaccgcgtcatggaggcgctcccgctagaccacctgattttcctgagtcaagcgaaatacctccttcgcacatgtatagatcatacaagtatctgaacagggtgcattcggcggtttggaatggcaaccacggcgctaccaatcaggggcctctgggccctgacgaaaagcctcacctcggtccagggcctagccatcagcccaggacactgggacacgtcatggactcacgagtcatgcgaccgccagtgcctccaaaccagtggaccgaacagagcggcttcctgcctcacggggtgcccagcagcgggtacatgagacccccatgtaagtctgctggacatagactccaaccgcctcccgttccagcgccatcaagcttattcggagcacctgcccaggcacttagaggagtgcagggcggagactctatgatggacagccccgagatgatagctatgcagcagctaagcagcagagtgtgtcctccaggggtcccatatcatccacaccagcctgcccacccacgactaccaggccctttcccccaggttgcccaccccatgtctgtgaccgtctccgcacccaaaccagctctcggaaatcccggtcgggcacctgagaactccgaagctcaggaaccagagaacgaccaggccgagcccttgcctggtctcgaggagaagccaccaggcgttggcacctccgaaggggtgtacctgacacagctcccgcatcctacacctccactccagacagattgtacaagacagtccagcccacaggaacgagagaccgtgggacccgagcttaagtcatcctcaagcgagtcagctgacaactgcaaagcgatgaaggggaaaaacccgtggccctcagactcatcatatccaggacctgcggctcagggttgtgttcgcgatctttcaactgtagcagatagaggggcactttcagagaacggggtgattggcgaagcgagcccttgcggctccgagggaaaaggccttgggtctagcggttcagaaaaactgctgtgccccagaggtcgtacactccaagagactatgccttgcaccggtcaaaacgctgctaccccaccatccactgaccccggtctcaccggcggaacggtttcccagtttccgcctctctatatgccgggacttgaatatcctaactccgccgctcactaccacatttcgcccggtctgcagggagttgggcctgttatgggtggtaaatctccagcctcccacccacagcattttccacctaggggatttcagtccaatcatccgcactccggagggttccccagataccgtcctccccaaggcatgagatattcttatcaccctcctcctcagccctcctatcaccactatcagcggacaccatattacgcgtgtccgcagtctttctctgattggcaaaggccactgcacccacagggtagtccatcaggcccaccggcatcccaaccccctcctcctagatctttatttagcgacaaaaacgccatggctagcctgcagggctgcgagacccttaacgccgctttgacgagtccaaccaggatggatgcagttgccgctaaggtgcctaatgacggacagaatccagggccagaagaagagaagctggacgaatctatggagaggcccgagtcgccaaaggagttcttagacttggacaatcataacgcagccaccaaaagacaatcgtcattaagcgctagcgaatatctgtacggaacacctcctccgttatcttcaggtatgggatttggcagttctgcctttccgcctcacagcgtgatgctccagactggacccccttacaccccccaacgacctgcctctcatttccagccaagggcctactctagccccgtggctgcgctcccacctcaccaccccggtgctacccaacccaacgggctgtcccaggaagggccaatctaccggtgccaggaagagggactggggcacttccaagccgttatgatggagcaaattggtactcgctcagggatcagaggaccctttcaagaaatgtaccgcccaagtggcatgcagatgcatcccgttcagtctcaggcttcattccctaagacacccaccgcggctacgagtcaggaggaagtgccacctcataagcccccaacactgcccctggaccagtcgtag

SEQ ID NO: 217231 - DNA, 1371 bp, synthetic construct
  misc_feature 1..1371: note = Description of Artificial Sequence: Synthetic coding sequence
  source 1..1371: mol_type = other DNA
gaattggaggccgcattacaccgcgatgatgtggagtttatctcagacctcatcgcctgccttctgcagggctgttaccaaagacgcgatataactccacaaaccttccactcctatctggaagacatcattaattatcgatgggagctggaggagggtaagcctaatccactgagggaagcttcgtttcaggatctcccactgcgaacgcgggtggaaattctgcaccggctgtgcgattaccggctggacgccgatgatgtgttcgacctgcttaagggactggatgccgactctcttagggtcgagccactgggggaagacaactccggggcactgtactggtacttctacggaacccggatgtacaaagaggacccagtccagggcaagtcgaacggggagctgtccttatccagagagtccgagggccagaaaaatgtatcatcgattcccggaaaaacagggaaacggagaggtaggccccctaagcggaagaaactgcaggaagaaattctcctctcagaaaaacaagaggagaattccctagcctcagagccacagacccgacatgggagccaaggccctggccagggaacttggtggcttctgtgccagaccgaggaggagtggaggcaagtaaccgaatctttccgcgagcgtacttctcttagggaacggcagctttacaagttgctgagtgaggacttcctgccagaaatatgcaatatgatagcccagaaggagactccagtcctcacacgtattgagaaacagaaaagaaaagaggaggaggaggagagacagatcctgctggccgtgcaaaagaaggagcaagaacaaatgctgaaggaagagcggaaaagggagctggaggagaaagtgaaagccgtagaggggatgtgcagtgtgagagtagtgtggcgcggtgcctgcttaagcacgagccgcccagtcgacagagcaaagaggagaaaactgcgcgaggagcgcgcttggctgttggcgcagggtaaggagttaccaccagaacttagccacttagaccctaattcaccaatgcgggaagaaaagaaaacgaaagacttgttcgaactcgacgacgatttcacggcgatgtataaggtcctggacgtggtgaaagctcacaaagactcttggcccttcctggagcctgtggatgagagctacgctcctaactactaccagatcattaaagccccaatggatatctctagtatggagaagaaattgaatggcggactgtattgtactaaggaggaatttgtgaatgacatgaaaacaatgtttaggaattgtcgaaagtacaacggcgaatcctctgggaagcagggccgtagcctctgctag

SEQ ID NO: 217232 - DNA, 1584 bp, synthetic construct
  misc_feature 1..1584: note = Description of Artificial Sequence: Synthetic coding sequence
  source 1..1584: mol_type = other DNA
atggctgactcgcgggacccagccagtgaccaaatgcagcactggaaggaacaaagagcggctcagaaagccgatgtgcttacaaccggggctggcaaccccgttggcgacaaactgaacgtgatcactgtgggacccagaggcccactccttgttcaagatgttgtcttcaccgatgagatggcccactttgatagggagcggatccccgaacgagtagtccacgccaagggtgccggtgcgttcgggtatttcgaagtcacccacgatattaccaagtatagtaaagccaaggtctttgaacacataggcaaaaaaactcccatagctgtaagatttagtaccgtcgccggagagagcggctctgccgatacagtgagggatcctcgtggtttcgcagtcaagttttacacggaagatggcaactgggatctggtgggcaataacacccctatattcttcattcgggacccaattctctttccatcattcatccacagccaaaagaggaatccacagactcatctgaaagaccctgatatggtctgggacttttggagtctgcgcccagaaagtctgcatcaggtctctttcttgttctcggataggggcatcccagacgggcaccggcacatgaatggatacggatctcatacgtttaaactagtgaatgccaatggagaggcggtgtactgcaagtttcactacaagacagatcaggggatcaagaacttatccgttgaagacgcggctcggctgtcccaagaggacccagattatgggatccgggatctcttcaacgccatcgccacagggaaataccccagctggacattttatatccaagtaatgacgttcaatcaggctgaaacatttccatttaacccattcgacttaacaaaggtatggccacacaaggactacccgctaataccagtgggcaagttggtcctcaaccgaaaccccgtgaactattttgccgaagtggagcagattgcgttcgacccgagcaatatgcccccaggaattgaggccagccctgacaaaatgttacaagggagactcttcgcttatccggatactcataggcatcggttaggcccaaattacctacatattcccgtaaattgtccctatagggcgagggtcgccaattaccaacgggacggacctatgtgcatgcaggataaccaggggggagcgcctaactactacccgaattcttttggggcacccgagcagcagccctccgccttggagcactctatccagtacagcggcgaggtgcgcaggtttaatactgctaatgatgacaacgtgacgcaggtgcgagcgttctatgtcaacgtgctgaacgaagaacaacggaaaagactgtgtgagaatatcgcgggtcaccttaaggacgcccaaattttcatccagaagaaggcggtaaaaaacttcacggaagtgcatcccgactatggtagtcacatccaggccctgctcgataagtacaacgccgaaaagccgaaaaacgccattcacacattcgttcaatccggttcacatcttgctgcacgagagaaggcgaacctgtag

SEQ ID NO: 217233 - DNA, 816 bp, synthetic construct
  misc_feature 1..816: note = Description of Artificial Sequence: Synthetic coding sequence
  source 1..816: mol_type = other DNA
atgccagaggcccctccactcctgctcgcagccgttctgctgggactggtacttctcgtggtgctgttgctcctgcttagacactggggttggggattgtgcttaatcgggtggaatgagttcatcctgcaacctattcacaacctacttatgggcgataccaaagagcaacgcattctgaaccatgtcctccagcatgccgaaccaggcaacgcccaaagcgtgttggaagccatcgacacctactgcgagcagaaagagtgggctatgaacgttggagacaagaaaggaaagattgttgacgcggttatccaggaacaccagcctagcgtactcttggaattaggcgcatattgtggatacagcgcagtgaggatggcccgtttgctatccccgggtgcacgcctgatcacaatcgaaatcaatccagattgcgccgcaataacgcagcggatggttgactttgctggtgttaaagataaggtcacgctagtggtcggcgcatcccaggacatcattccccagctcaaaaagaagtacgacgtcgatacactagatatggtcttcctcgaccactggaaggatcgatacctgccagataccctgcttttagaggaatgcggcttactgcggaaaggaaccgtgctgcttgcagacaatgttatctgtcccggtgcgcctgactttttagctcacgtccgcggaagtagttgcttcgagtgcacgcattaccagagctttcttgaatatagagaggttgtggacggtctggaaaaagctatttataaggggccaggtagcgaggctggcccatag

SEQ ID NO: 217234 - DNA, 816 bp, synthetic construct
  misc_feature 1..816: note = Description of Artificial Sequence: Synthetic coding sequence
  source 1..816: mol_type = other DNA
atgcctgaagcccctccactcttgcttgccgcagtgttgctgggcctggtgctgctcgtggtgttactcctgctgctccgtcattggggttggggcctttgccttatagggtggaatgaattcatactgcaacctattcacaatctgttaatgggggacactaaggaacagcgaattctgaaccacgtgcttcagcacgccgagcctggaaatgctcagagcgtccttgaggccattgatacgtactgtgaacagaaagaatgggcaatgaatgttggcgacaagaaaggaaagatcgtcgacgcagtcatacaggaacaccagccgtctgttctgctcgagctcggtgcgtactgcggatactcggccgtccgaatggccaggcttctctccccgggagctcgcctgattactattgagatcaaccccgattgcgccgctattactcagagaatggtggacttcgctggagtgaaagataaagtgacactcgttgtgggtgccagtcaggacataattccccagctcaagaaaaagtacgacgtggatactctggacatggtgtttctggatcactggaaagacagatatctgcccgatactctcttactcgaggaatgcggactgttgcgaaagggcaccgtgttgctggctgacaatgtgatatgccctggcgcacccgactttctcgctcacgttcgcggtagctcgtgtttcgaatgcacacattaccagtcctttttagagtatcgagaggtcgtggatggtctggaaaaggctatctataaaggcccaggcagcgaggccggtccttag

SEQ ID NO: 217235 - DNA, 816 bp, synthetic construct
  misc_feature 1..816: note = Description of Artificial Sequence: Synthetic coding sequence
  source 1..816: mol_type = other DNA
atgcccgaggcacctcccctgcttctggcagccgtgcttctgggtcttgtgctgctagtggttctcctgctgctgctgcgccactgggggtggggactgtgcctgattgggtggaacgagttcattctccaacccatccacaacctgctcatgggagatacaaaagaacagaggatcttgaaccacgtgctgcaacacgccgagcctggcaacgctcagtcagtgctggaggccattgacacttattgtgaacagaaggagtgggctatgaacgtgggcgacaagaaggggaaaatcgtggatgccgttatacaggaacatcagccgtcggtgctcctggagctgggggcatattgcggctatagtgcagttcggatggccaggctgctgagtccaggcgcacggttgataaccattgaaataaatcctgactgtgccgcaatcacacagaggatggttgattttgccggtgtcaaggataaagtgaccctggtggtcggggcaagtcaagatatcattccccagttgaaaaaaaagtacgatgtcgataccctcgacatggtgtttctggatcactggaaggatagataccttcctgataccctacttctggaagaatgcggactgcttagaaaggggacggtattgctcgcagacaacgtcatatgtccaggggcacccgatttcctggctcatgtcagaggcagttcctgctttgagtgtacccattaccaaagctttctggagtacagggaggtcgttgacgggctggagaaggccatttataaaggaccaggaagcgaagctggcccatag

SEQ ID NO: 217236 - DNA, 666 bp, synthetic construct
  misc_feature 1..666: note = Description of Artificial Sequence: Synthetic coding sequence
  source 1..666: mol_type = other DNA
atgggagacacaaaggaacagagaatactgaaccacgtcctgcagcacgccgagcctggtaatgctcaatcagtgctggaggccatcgacacatactgcgaacagaaggaatgggctatgaatgttggtgataaaaagggcaaaatcgtggacgcggtgattcaggagcatcagcctagtgtcctcctcgaactcggggcatattgcggttattcagccgtgagaatggcacgtctgttaagtccaggagctcggcttattacaatagagataaatcccgactgcgctgcgataacacagagaatggtggacttcgcaggagtgaaagataaggtgaccctagttgtaggtgccagtcaggacatcattccacagcttaagaagaaatatgatgtcgacactctggatatggtgtttctggaccactggaaggatagatacttaccagacactttgctcctggaagagtgcggcctgctgagaaaaggcacagtgctgcttgcagacaatgtgatatgtccaggagcacccgactttctggctcatgtccggggtagttcgtgttttgagtgtacccactaccagtccttccttgagtaccgcgaggtggtggacggattggagaaagctatttacaaaggccctggatccgaagccggaccatag

SEQ ID NO: 217237 - DNA, 672 bp, synthetic construct
  misc_feature 1..672: note = Description of Artificial Sequence: Synthetic coding sequence
  source 1..672: mol_type = other DNA
atgccagaagcccctccactgcttctcgccgctgtgttactgggcctggtcctcttggtcgtgctgctcctgctccttcggcattgggggtggggcctttgtctgatcggctggaacgagttcatcttacagccgatacacaaccttctcatgggcgataccaaggaacagcgtatcctaaatcacgtgttgcagcacgccgagccaggcaatgcccagagcgtgctggaagcaatcgacacctactgcgagcagaaggaatgggctatgaatgtgggcgacaagaagggaaagatcgtagatgccgtgattcaggaacaccagccctcagtgctgttggaactgggggcttactgcggctactccgccgtccggatggcacgtctgctgagccccggagcgaggttgataactatcgaaataaaccccgactgtgctgccatcacccaacggatggttgattttgctggcgttaaggataaagtaactctggtagtaggagcatctcaggacattattccacagctgaaaaagaagtacgacgtcgatacgcttgacatggtgtttctcgaccactggaaggatcggtatttgccggacactttgttattagaggagtgtggcctgctgcgcaagggtaccgtcctgctggcagacaacgtgatttgctag

SEQ ID NO: 217238 - DNA, 666 bp, synthetic construct
  misc_feature 1..666: note = Description of Artificial Sequence: Synthetic coding sequence
  source 1..666: mol_type = other DNA
atgggcgatacaaaagagcagcggatactgaatcacgtgctgcagcatgccgagcctgggaacgctcagagcgtcctcgaagcaatcgacacatattgcgagcaaaaggaatgggctatgaatgtgggtgacaaaaaaggcaagatcgtcgatgccgtcattcaagagcatcaaccttctgttttactagaactgggagcatactgcggctacagcgctgtgcggatggcacgcctgctgtctccaggggcaaggcttatcactatcgagataaatccagactgcgctgctatcacccagcgcatggttgactttgctggcgtcaaggacaaggttacgctcgtcgtgggtgccagccaagacattatacctcagcttaaaaagaagtatgacgtggacacactcgatatggtgttcctggaccattggaaggatcggtatctgccagacactttgctgctggaggagtgcgggctgctgcggaaagggaccgtgttgctggccgataacgttatatgtcccggtgcacctgactttctggcccacgtccgcggaagcagctgcttcgagtgtacccattaccagtctttcctcgagtaccgggaggtggtcgatggactggaaaaagccatctataaggggcctgggagtgaggccggaccttag

SEQ ID NO: 217239 - DNA, 2664 bp, synthetic construct
  misc_feature 1..2664: note = Description of Artificial Sequence: Synthetic coding sequence
  source 1..2664: mol_type = other DNA
atggccaatgggaccctaactcggagacatcagaacggacggttcgttggggacgcagatctggagcgccaaaagttctccgacttaaaattgaacggaccacaggaccactcacacttgctctactccactattcctaggatgcaggagcccggacagatcgtggaaacttataccgaggaggaccctgagggcgctatgagcgtggtctctgtggagacatcagacgatggcacaactcgccgaactgagaccaccgtgaagaaagttgtgaaaactgtaaccactagaaccgtccagccggttgccatgggcccagatggtctccctgtggatgcctcatcagtgtctaacaactacatccagaccctgggccgtgactttaggaagaacgggaatggagggcctgggccatacgtcggccaggcaggtactgccaccctgccaaggaacttccactaccctcccgacgggtattcccgccactacgaggacggatatccagggggatccgacaattatggctcactctcaagagtaacaaggatcgaggagcgttaccggccaagtatggaaggctacagagctccaagcaggcaggatgtgtatggaccccagccacaggtcagagtgggcggatcatctgttgacctacaccgcttccaccccgagccctacgggcttgaggacgaccaacggagtatgggttacgatgaccttgactacgggatgatgagcgactatggaaccgcacgcagaactgggactcccagcgatccgaggaggcgcttacgcagttacgaagatatgattggggaggaagtgccctccgaccaatactactgggccccactcgcccagcacgagaggggaagcctcgctagccttgactcgctgcggaaggggggaccccctccccctaattggcgccagcccgagctgccggaggttattgctatgctcggtttccggttagacgctgtgaagtctaatgcagctgcctacctacagcacctgtgctatcgcaacgacaaagtcaaaacggatgtgagaaagctgaagggtatccctgtgctcgtcggattattggatcacccaaaaaaggaagtccatctgggcgcttgtggagctcttaagaatatatccttcggacgagatcaggacaacaaaatcgcaatcaaaaattgcgacggagtgccagccttggtgagactgctgaggaaggccagggatatggatctgacggaagtgataaccggcaccctgtggaacctcagtagccatgattcgatcaagatggagatcgtggatcacgccctacacgctctgactgacgaggtcatcataccccattctggctgggagagggaacctaacgaggattgcaaacctaggcatatcgaatgggagagcgtgcttacaaacaccgcaggttgcctgagaaacgtcagttcagagcgctcagaggcccgtagaaaactgcgcgagtgtgatggattggtggatgcgctgatattcattgttcaggccgagattggccagaaagactcagattcgaagttggtggagaactgcgtgtgcttactgcgaaaccttagctatcaggttcaccgagaaattcctcaggccgagaggtaccaggaggccgctcctaatgtggcgaataatactggtccgcacgcggcaagctgcttcggcgctaaaaagggcaaagggaagaagccgatcgaagatcctgccaatgacaccgttgactttcctaagcgcacctctcccgcacggggatacgaattgctgttccaacccgaagtcgtgcggatatatatttctttattgaaagaaagtaaaacaccagcgatcttggaggccagcgcaggagcgattcaaaacttgtgcgccggacgctggacatatggtcgttatatccggtcagcactacggcaggaaaaagcattatcagccatagccgacctgctcacaaacgaacatgagagagtggtgaaagcagcctccggcgctctccgcaacctagcagtagatgctcggaacaaggagttgatcggtaagcacgctattcctaatttggtcaagaacctgcctggcggtcaacagaacagctcttggaatttttccgaggacaccgtaatcagtatccttaacaccattaacgaggtaattgcagagaatctggaagccgctaaaaagttacgggaaacccaggggatcgaaaagttggttctcattaacaaatcaggcaatagatcagaaaaagaggtgagagccgctgcacttgttctccagaccatctggggatacaaagagctgaggaagccgctggagaaagagggttggaagaagtccgatttccaggtcaatctgaataatgctagccggagccaaagctcacactcttatgatgattctactctccctctcattgatagaaaccagaagagcgataacaattactccacgcctaacgagagaggggatcacaacaggactctggatagatcgggcgatttaggcgatatggagcctctgaaaggcactacccccctgatgcaggatgaggggcaggagtccctcgaagaagaactggacgttctcgtgctcgatgatgagggcggacaggtgtcctatccatctatgcagaaaatttag

SEQ ID NO: 217240 - DNA, 1755 bp, synthetic construct
  misc_feature 1..1755: note = Description of Artificial Sequence: Synthetic coding sequence
  source 1..1755: mol_type = other DNA
atggatgggtggcggagacccttgcagagtgtcggaaaggtttgcgaaaagaatatgaagacatcagagatgcacacaatgtccggcgcacaaaccggcaggaaggaaaagggagatccgctgaatatcgcaatcgataaaatgacaaagaaaacaagagatttgcgacggcagcttagaaaagctgtgatggatcacatctctgatagcttcttggagaccaatgtgccgctcctcgttttgatcgaagccgcaaagagtgggaacgagaaagaggtgaaggagtatgcacaggtgttccgggaacacgccaataaattggtcgaagtcgccaacctggcctgctccatctccaacaatgaggagggcgtcaagttggtgcgcatggctgcgacacagattgatagcttatgtccacaagtgattaatgctgcactgactctcgctgcacgccctcagtccaaggtggcacaggacaacatggatgtattcaaggatcagtgggaaaaacaagtaagggtgctgacagaggccgtggacgacattacatctgtagatgacttcctttccgtcagcgagaaccatatcctggaggatgtgaacaaatgcgttattgccctccaggagggagatgtggatacacttgatcgaacggcaggggcaattcggggacgggcagcccgtgtgattcatatcatcaacgccgagatggaaaattacgaggccggagtctacaccgagaaagttcttgaggcaaccaagctgttgtccgaaactgtgatgcccagattcgccgagcaggttgaagtggctatcgaggcactatcggctaatgtaccacaacccttcgaggaaaacgagttcattgatgcctccagactggtctatgacggagttagagacatcagaaaagcggtgctcatgatccgcacacccgaggaacttgaagatgactccgatttcgaacaagaggattacgacgtgagatctaggacttccgttcagaccgaggacgaccagttgatcgcagggcagagtgccagggctatcatggcccagctcccccaagaagaaaaagcgaagatagccgaacaagtggagatcttccaccaggaaaagagcaagcttgacgccgaagtggccaagtgggacgattccggaaacgatatcatcgtgctagccaagcaaatgtgtatgattatgatggagatgacggattttacacgaggcaagggccctctgaagaacactagcgatgtgatcaatgcggctaaaaagatagctgaagccggtagtaggatggacaagttggccagggcggtggctgatcaatgcccagactctgcctgcaagcaggatctgctggcgtatctacagcgcatcgcgctctattgccaccagctaaatatttgtagcaaggtgaaggccgaggttcagaatttgggcggagaattaattgtctctggactggactcagccaccagcctgattcaggctgcgaagaacctaatgaatgcagtggtcctcactgtaaaggcctcttacgtggctagcacaaagtaccagaaggtatacgggacagctgccgtgaactcacctgtggtgtcttggaagatgaaagccccagagaaaaaaccattggtgaaaagggagaaaccagaggagtttcagactcgcgtgagacggggaagtcaaaaaaaacacatatctcccgtacaggcgctttcggagtttaaggctatggactcattctag

SEQ ID NO: 217241 - DNA, 2820 bp, synthetic construct
  misc_feature 1..2820: note = Description of Artificial Sequence: Synthetic coding sequence
  source 1..2820: mol_type = other DNA
atgagcgggctgatttgtctacagtacggactgtggcatggccagaagatcgactttggaggccctagaaggctgctgcagcggaatcgtggcgaaggctcaatgaccagcgccacctcaccaattatcctgaagtgggacccaaagtcacttgaaataagaacacttactgtggaaaggttgctggagcctctagtcacccaagttacaacactcgttaatactagcaacaaaggacctagtggcaaaaagaaaggacggagcaagaaagctcatgtgctggccgcttctgtcgaacaggctacgcagaattttctggaaaaaggagagcaaatcgctaaggaaagtcaagatctgaaggaggagctggtggcagccgtagaggatgttcgcaagcagggcgagacgatgaggatagcctctagcgagtttgccgatgatccatgcagttctgtgaaaagggggacaatggtcagggcggctagggccctactgtccgctgtgacccgcttgcttatcctcgctgatatggccgatgttatgcggttgctctcccacctcaagatcgtagaggaggccctcgaagccgtgaagaacgcaactaacgagcaggatctagcgaatcggttcaaggaattcgggaaggagatggtgaaactgaactacgtcgccgcacggcgacaacaggaactcaaggatcctcactgccgtgacgaaatggccgcagctcggggtgctttaaaaaagaacgctactatgctttatactgcttcccaggcattcctgcgacacccagatgtggcggctacacgagctaatagagactacgtttttaagcaggtccaggaagccatcgctggcatatcaaacgcagcacaggcaacaagtccgacagatgaggccaagggccacaccggcattggggagctagccgctgctctaaatgaattcgataacaaaattattcttgatccaatgacattctcagaggccagattccgtccatcacttgaggaaagactcgagagtattattagcggtgccgctctcatggccgactcgagttgcactcgagatgacaggagggaacgcattgtggccgaatgtaacgccgtgcgacaggcccttcaggacctcctttccgagtacatgaacaatacaggccgaaaagagaagggcgatcccctgaatatcgctattgacaagatgaccaaaaaaactcgggacttgagacgtcagctccgaaaagcagtcatggatcacatttccgattcattcctggaaacaaacgttcccctcttagtgctcatcgaggctgccaaaagcggcaacgagaaagaagtgaaggaatacgcacaggtgtttcgtgagcatgcaaacaagttggttgaagtagccaacctggcttgctcaatctccaacaacgaagaaggcgttaagctggtgcggatggccgctactcagattgacagcttgtgcccccaggtaattaatgcagcactcaccttagccgcacggcctcaaagcaaggttgcccaggataatatggacgttttcaaagaccaatgggaaaagcaagtcagggtccttacggaggcggtggacgatataaccagtgtggatgactttctgtctgtatccgaaaatcatatccttgaagacgtgaataaatgcgtgatcgcccttcaagaaggcgacgtggataccctcgaccggactgctggggctatccgcggacgagccgcacgcgttatccatataatcaatgcagagatggagaactacgaggcgggagtatacactgagaaagtgctcgaggctactaagcttcttagtgaaacagtcatgccgaggttcgctgagcaggtcgaggtcgctatcgaggctctgtctgccaatgtgccacagccttttgaggaaaatgagtttattgatgcttccaggctggtgtacgatggagtacgggatattcgtaaggccgtgctcatgattcgaactccagaagaactcgaggacgactccgactttgaacaggaagactatgatgtccggtcaagaacaagcgtacagaccgaggacgatcaactgatagctggccaaagcgctagggcaattatggcacaactcccacaggaagagaaggccaagattgccgaacaggtcgagatctttcatcaggagaagtctaaactggacgcagaagttgcgaagtgggacgactcaggaaatgacattattgtattagcaaagcagatgtgcatgattatgatggaaatgaccgacttcacaagggggaaaggtccactgaagaatacaagcgatgtaattaatgccgctaaaaaaatcgccgaggcgggatctagaatggataagttagcccgagccgtggcagatcagtgtcccgattctgcttgtaaacaggacctgctcgcgtacctccagcgcattgccttgtactgccaccagctgaacatctgttccaaagtcaaagctgaggtgcagaatctcggcggtgagctaatcgtgtccggattggacagtgcgacttctctaatccaggctgccaaaaacctcatgaacgccgtcgtgctgaccgtgaaggcgtcttatgtggcttcaaccaagtaccaaaaggtgtatgggaccgctgctgtaaactcacccgtcgtgagctggaagatgaaggcgccagagaaaaaacctctggtgaagcgcgaaaagccggaagagttccagacacgggtccgacgtggaagccagaagaagcacatctcccccgtccaggccctcagtgagtttaaggccatggactcgttttag

SEQ ID NO: 217242 - DNA, 2862 bp, synthetic construct
  misc_feature 1..2862: note = Description of Artificial Sequence: Synthetic coding sequence
  source 1..2862: mol_type = other DNA
atgacttcggcaacgagccctatcattctcaagtgggatcccaaaagcctagaaatcaggacactcacagtggaaagactgttagagccattagtgacacaggtgacaacgcttgtgaatacttctaataagggcccatctggcaaaaagaaggggcgttccaaaaaggcacacgtgttggccgcttccgtggaacaggcaacacaaaatttcctagagaagggcgagcagatcgctaaagaatcacaggacctaaaggaggagcttgtagctgctgtggaagatgttagaaaacaaggcgaaacgatgagaatagcctcatcagaattcgccgatgacccttgctctagcgtgaagagaggcaccatggtcagggctgctcgcgcactcttgtcagctgttacccgcttattaatattggccgacatggccgacgtgatgagactgctttctcacctcaaaatagtcgaggaggctttggaggccgtgaagaatgcgaccaacgaacaagacctggctaaccgctttaaagagttcggaaaggagatggtgaagcttaactacgttgctgcgcgtcggcagcaggaactgaaggaccctcattgtagagatgaaatggccgcagctagaggcgctctcaaaaaaaatgctactatgctgtacactgcatcacaggctttcctgcgccatcctgacgttgcagctacccgggcaaaccgggattatgtatttaaacaggtgcaggaggcgatcgctggaataagcaacgccgcacaggcgacatcgccgaccgatgaagcgaaaggacataccggaatcggcgaattggccgcagcgctgaacgaatttgataacaagataatactagaccccatgacattctctgaggccaggttcaggcctagtctcgaggaaagactggagagcatcatctccggcgcagctctgatggccgacagttcctgtactcgcgacgatcgaagagaaagaattgttgccgaatgtaatgcagtgcgtcaggcccttcaagatctgttatctgaatacatgaataataccgggcgaaaggaaaaaggagacccccttaacattgcaatcgacaaaatgacaaaaaagactagggacctgaggcgccagctccgtaaagcagtaatggatcatatttctgatagctttctagagaccaacgtaccattgcttgttctcatcgaggcggctaaatcgggtaatgagaaagaggtgaaggagtacgcccaggtgtttcgtgagcacgccaacaaactggtagaagttgctaatctagcttgtagtataagtaataacgaagaaggcgtgaagctcgtccggatggcagccactcaaattgactccttgtgtcctcaagtgattaacgcggcactgactttggccgctcggcctcagagtaaggtggcccaagataatatggacgtctttaaggatcaatgggaaaaacaggtaagagtactgaccgaggctgtcgatgacataacgtccgtggacgatttcctctctgttagcgagaaccacatcctcgaagatgttaacaaatgtgtgatcgctttacaggagggcgatgtggacacgctggatcggaccgctggggctattcgcggacgagctgcccgagttatccacataattaacgcagagatggagaattatgaggctggagtgtacacagaaaaagtgctggaggccacaaagctactcagtgagactgtgatgcccaggttcgccgaacaggtggaggttgcgatcgaagcgttgagtgccaatgtgcctcagccattcgaagaaaatgaattcatcgatgcctcccgactggtctatgatggtgttcgcgatatacgaaaagctgtgttgatgattcgaaccccagaagagttggaagatgacagcgactttgaacaggaggactacgacgtcagaagccgtacatcggtgcaaactgaggacgaccagctcattgcagggcaaagcgctcgagccatcatggcacagttaccacaggaggaaaaagctaagatcgcagagcaggtggagatattccaccaggaaaaatcgaagttggatgccgaggtggctaaatgggacgacagcggaaatgatatcattgttctggcaaaacagatgtgcatgataatgatggagatgactgacttcacacgtggtaagggcccactgaagaacacttctgacgttatcaatgccgctaagaaaatagccgaggcgggtagtcgcatggacaagctggctcgcgcagtagcggatcaatgtcccgattccgcctgcaaacaggacctcctcgcgtacctgcaacggatcgctctatattgccaccagcttaatatatgcagcaaggttaaggccgaggtgcaaaacttgggaggtgagttgatcgtgtctggcaccggcgtgcaaagcactttcacgacattttacgaggtcgattgtgatgtcattgatggtgggagagcatctcagctcagcacacatctgccgacctgtgccgagggggctccgatcgggagcggaagctccgactcctctatgctcgactccgccacatcactgattcaggccgcaaagaatctgatgaacgctgtcgtgctgactgtcaaagcaagctacgttgcctccacaaagtaccaaaaagtatacggcacagccgcagttaattcccctgttgtgtcatggaagatgaaagctcctgagaagaagccgttagtgaagcgggagaagcccgaagagtttcagacacgagtacggcgaggctcgcagaagaaacacatatcccctgtgcaagccctgtcagagttcaaagcaatggacagcttctag

SEQ ID NO: 217243 - DNA, 354 bp, synthetic construct
  misc_feature 1..354: note = Description of Artificial Sequence: Synthetic coding sequence
  source 1..354: mol_type = other DNA
atgacatctgcaacaagccctatcatcctcaaatgggaccccaaatcactggagatccggactctgaccgttgagagactcctggaacctttggttacacaggtcactaccttggtcaatacttccaataaaggaccatccgggaagaagaaagggaggtctaagaaggctcacgtgctggccgctagcgtcgagcaagctacccaaaatttcttggagaagggtgagcagatcgcaaaagaatctcaggatctgaaggaagagctggtcgcggcagtggaggacgtgcgtaagcaaggtgagaccatgcgcattgccagttcggaatttgcagacgacccttgctcatcatag

SEQ ID NO: 217244 - DNA, 201 bp, synthetic construct
  misc_feature 1..201: note = Description of Artificial Sequence: Synthetic coding sequence
  source 1..201: mol_type = other DNA
atgacctccgccacaagtcccattattctcaaatgggaccccaagtctctggaaatcagaacgctcacggttgagcggctgcttgagcctctcgtgacacaggtgacaacactggtaaatacttctaacaagggccctagtggcaaaaaaaaaggacggagtaagaaagctcatgtcctggcagccagcgttgaacaatag

SEQ ID NO: 217245 - DNA, 2718 bp, synthetic construct
  misc_feature 1..2718: note = Description of Artificial Sequence: Synthetic coding sequence
  source 1..2718: mol_type = other DNA
atgactagcgccacctctccaatcatattgaagtgggaccccaaaagcctggagatccggacgctgacggtcgagcgcctgttggagccactggtgactcaggtcactacgttggtgaacacatcaaacaaaggaccttccggaaaaaagaagggcaggtcaaagaaagcccacgtcctcgccgcatcagttgaacaagccacccagaactttctggagaaaggagaacaaattgcgaaagaaagtcaggatctgaaagaagagttggtggcagctgtcgaggacgtgaggaagcaaggagaaacaatgcggatcgcttctagcgaatttgccgatgacccatgctcttctgttaagcgcggaactatggtgcgagccgcaagggctcttttgagcgctgtcaccaggctgctcatcctggccgatatggcagacgtaatgaggcttctgagtcacttgaaaattgttgaggaggccctcgaggctgtgaagaatgctacaaatgaacaggatctggccaatcggttcaaggagtttggaaaagaaatggtgaagctcaactacgtggcggctcgcagacagcaagagctcaaagacccccactgtcgcgatgagatggcggctgcaagaggagctctgaaaaagaacgccacaatgctgtacacggccagtcaggccttcttaaggcaccctgatgtggcagccacgagggctaacagggactacgtattcaaacaagttcaggaagctatcgccggtatttctaatgccgcacaggcaaccagcccgacagatgaggctaagggtcacaccggaattggcgagttggcagccgcactgaatgaattcgataataagattatcctggatcccatgacatttagtgaggcacggttccgcccttcccttgaggaacggctggagtccattatctctggggcagctcttatggccgatagttcgtgtacacgcgatgacagacgtgagcgtattgtggctgagtgcaacgccgttagacaagctctgcaggacctcctatcagagtacatgaataatactggccgtaaagagaaaggcgaccctctgaacatagctattgataaaatgaccaagaaaaccagggacctgcggcgacagcttcgcaaggccgtgatggaccacatttcagacagttttttggaaacaaatgtgccgttgctcgttttgatcgaggccgctaagtctggcaacgagaaagaggtgaaagagtatgcacaagtcttccgcgagcatgctaataagctggtggaggtggcgaatctggcttgtagcatatcgaataatgaggagggcgtcaagctggtacgaatggctgccactcagatcgattccctgtgccctcaagtgataaacgccgcacttaccctggcagcgaggcctcagtctaaggtagctcaggataacatggatgtcttcaaggaccaatgggagaaacaggtgagggttcttacagaggcagttgacgacattaccagcgtagatgatttcctctctgtgtctgagaatcacatcctcgaggacgttaataagtgcgttatcgccttgcaggaaggcgacgttgacaccctcgatagaaccgctggtgctattcgcggacgggctgccagagttatccatatcattaatgctgaaatggaaaactacgaggccggtgtgtacactgagaaagtcctggaggccactaaactcttgtccgaaacagtgatgcccagattcgccgagcaagtggaggtcgcaatcgaagcactgagcgccaatgtgccacaaccttttgaagagaacgaatttatcgacgctagcagactggtctacgatggtgtacgggacattcgaaaagctgttctgatgataaggacccctgaagaattggaggatgacagcgacttcgaacaggaggactatgacgtccggtctcgtacctcagtgcagactgaggacgatcagctcatcgcaggacagagcgcccgtgccatcatggcgcagctcccccaggaagagaaagcaaagattgcggagcaggtggagatctttcatcaggagaagagcaagctcgacgcagaagtggccaaatgggacgatagcggcaacgatattatcgtgttagctaaacagatgtgtatgattatgatggagatgactgactttacccggggaaaaggtccgctgaagaacaccagcgacgtgatcaatgccgcaaagaagattgctgaggctggctcccgcatggataagctggctagagctgtcgccgatcagtgtcctgactccgcctgcaagcaggacctgcttgcctatctgcaaaggatcgccctatactgccaccagcttaacatctgttccaaagtaaaggcagaggtgcaaaatctcggcggagagctgatcgtgtctgggctcgattccgcaacctctctgatccaggccgcaaaaaatctgatgaatgccgtggtcttaactgtgaaggcttcgtatgtggcttccaccaagtatcaaaaagtgtacggcacagcggctgtgaattcccccgtcgtgtcatggaaaatgaaagcccctgagaaaaagcccctcgtgaagagagagaaaccagaagaatttcagacgcgcgtaaggcgcggaagtcaaaagaagcatatatccccagtgcaagctctctccgaattcaaagccatggatagtttttag

SEQ ID NO: 217246 - DNA, 2718 bp, synthetic construct
  misc_feature 1..2718: note = Description of Artificial Sequence: Synthetic coding sequence
  source 1..2718: mol_type = other DNA
atgacctccgcaaccagccctattatcctgaaatgggatcccaaaagcctcgaaatacggaccctgaccgtggaacggctgcttgagcccctagttacacaggtgacaaccttggtaaatacaagcaacaaagggccttccggtaagaaaaagggcagatcaaaaaaggcacatgttctggctgccagcgtggaacaggcaacgcagaactttcttgaaaagggcgaacaaatcgctaaggaaagccaggacttaaaggaagagctggttgctgcagttgaggacgtgaggaagcagggcgagactatgcgcattgcttcctccgagtttgccgacgatccttgttcatctgtgaaacgtggaaccatggttcgtgctgctcgggctttgctttctgctgttacacggctcctcattttagcagatatggctgatgttatgcgcctgctgagccacctcaagatcgtcgaagaggctcttgaagcagtgaagaacgcgacaaatgaacaggacctagcaaataggttcaaagagttcggaaaggaaatggtgaagctaaattacgtggcggcaagaagacagcaggagctgaaagatccacactgcagagatgagatggccgctgccaggggcgctttgaagaagaacgctacgatgttgtacaccgcttctcaagccttcttaagacaccccgatgtcgctgcaactcgggcaaatcgcgattacgtgtttaaacaggtacaggaagcaatcgctgggatcagcaatgctgcccaggctacatcccctacagacgaagccaagggccacaccggtattggcgaactggccgcagccttaaatgaatttgataacaaaattattctggaccctatgaccttctcagaggctcgttttcgcccatcccttgaggagcgattggaatccataattagcggagctgccctcatggccgatagttcctgtacgcgcgacgatagacgggagaggattgtagccgaatgtaacgcagttcgacaagcactgcaggatttactgagcgaatacatgaacaataccggcagaaaggaaaagggggacccactgaacattgcaatcgataagatgaccaaaaagaccagggacttgagaaggcagctccggaaggcggtaatggatcatatcagtgactcctttctggaaactaacgtgcctctgcttgttctcatagaagccgctaagagcggcaatgagaaggaagtgaaggaatatgcccaggtgttcagagagcacgccaataagttagtggaggtcgctaatttggcgtgttcaatatctaacaatgaagagggggttaagctcgttcgaatggcggctactcagatcgatagtctctgtccacaagttattaacgctgccctgacactggccgctcggcctcagtctaaagtggctcaggacaatatggacgtcttcaaggatcagtgggagaaacaggtgcgtgtacttaccgaggctgtggacgatatcacttccgtcgacgatttcttgagcgtttctgagaaccacatccttgaagatgtgaataaatgtgtgattgccctgcaggagggggacgtcgacacactggatcgaacagcaggagctataaggggcagagccgcaagagtaatccatattatcaatgccgaaatggaaaactacgaagccggagtgtacactgagaaggtactggaggctacaaaactgctgagcgagacggtcatgccacggttcgccgaacaagtggaggtagctatcgaggccctgagtgctaatgttcctcagccattcgaagagaacgagttcatagacgcctctcgcctggtgtatgacggcgttagagatatccgaaaggcagtgcttatgattcgcacccccgaggagctcgaggacgactccgatttcgaacaggaagactacgacgtgagatctcggacttccgtgcagacagaggacgaccagctgatcgccggtcagagcgcccgagctatcatggcacagctgccccaggaggagaaggccaaaatcgccgaacaggtggaaatcttccatcaggaaaagtctaagctggatgcggaggttgcaaagtgggacgattccggaaacgatatcattgttcttgcaaaacaaatgtgtatgatcatgatggagatgaccgattttacgcggggaaaggggccactgaagaatacatccgatgtgataaacgccgctaagaagatcgcagaggcgggatcaaggatggacaagctggctagggcagttgccgatcagtgccctgatagcgcctgcaagcaggatctgctggcgtatctgcaacgcattgctctctactgccaccagttgaacatctgcagcaaggtgaaagccgaggtgcagaacctgggcggagaactgatcgtgagtggattagactccgctacatctctcatccaggccgctaaaaatttgatgaatgcggtggtactgacggtcaaagcctcttacgtggcctcaacaaaataccagaaagtgtacggaacagcagcagttaattctcctgtggtctcctggaagatgaaggcaccagagaagaaacctcttgtaaagagagagaagcctgaggaattccagacaagggtaagacgtggaagccaaaagaagcatatctcaccggtgcaagcgctcagcgaattcaaggcaatggacagtttttag

SEQ ID NO: 217247 - DNA, 2583 bp, synthetic construct
  misc_feature 1..2583: note = Description of Artificial Sequence: Synthetic coding sequence
  source 1..2583: mol_type = other DNA
atgacctctgccaccagcccaatcatcctgaagtgggaccccaaatcattggagatccgcaccctcaccgtggaaaggttgctcgagcccctggtgactcaggtgacaacccttgtgaatacatccaataagggtccatccggtaagaagaaggggcgatctaagaaagcacacgtgctcgctgcctcagtggagcaggcaactcagaattttctggagaagggggaacaaatcgccaaagagtctcaggacttaaaagaagagttggtggcggctgtggaggatgttcggaaacaaggcgaaactatgcgtattgccagtagtgaattcgccgatgacccttgttcctctgtcaaaagaggcaccatggttagagctgccagggcactgttaagtgcagtcaccaggctgctgatcttagcggacatggccgacgttatgagactcttgtcgcatctcaaaatcgtagaggaagccctcgaggccgttaaaaatgccacaaatgaacaagatctggccaaccgctttaaagagtttgggaaagaaatggtcaagctcaactatgtggcggctcggagacagcaggagctgaaggatcctcactgcagagacgaaatggcagccgcacgcggagccctgaagaaaaatgccactatgctgtacactgctagccaagcctttcttcgccatccggatgtggcggctaccagagcaaacagagattatgtgttcaaacaggttcaagaggctatcgccggtatcagtaacgcggcacaggcgacaagtcccactgatgaggccaaaggccacacaggcattggagagctggcagctgccctgaacgagttcgataataagatcattctggatcccatgacttttagcgaggcgagatttagaccctccctagaggagcgcttggagtcaattatctctggagcagccttaatggccgactcttcctgcacacgcgacgataggagggagcgaattgtggccgagtgcaacgccgtaaggcaggcactgcaagacctgctgtcagagtatatgaacaacacaggacgcaaagagaagggagaccctctcaatatagccatcgataaaatgaccaagaaaacccgcgatctccggcgacagctgagaaaagctgtgatggaccatattagtgactctttcctcgagaccaatgttccactgctggtactgatcgaggcggcaaagtctggcaacgaaaaagaggtgaaagaatacgcacaggtcttccgggagcacgcaaataaactcgtggaggttgccaatctggcttgcagtatttctaacaatgaggaaggcgtaaagctggtgcggatggctgctactcagattgattcactgtgtccacaggtgataaacgcagccctcaccctcgctgctaggccacagagtaaggtcgcccaggataatatggacgtttttaaggaccaatgggagaaacaggtccgggtactgaccgaggcagtggacgacattaccagcgtagatgatttcctgagcgtctccgaaaatcacatactagaagacgtcaacaaatgtgtgattgcgctgcaagagggcgacgtagacacccttgatcgcaccgccggagccataagaggccgagcggctagagtgatccatatcattaacgctgagatggagaattacgaggccggagtttatacagaaaaggtgttagaggcgacaaagttactctcagaaacggtgatgcctaggttcgctgagcaagttgaagttgccatcgaggcactgtcggctaatgttccccagccctttgaggagaacgagtttatagacgctagccgactcgtatacgacggggtgcgagatatcaggaaggctgtccttatgatacggacccctgaggagctagaggacgattccgatttcgagcaggaggattacgatgtgagaagcagaaccagtgtgcagaccgaggacgatcagctcattgctgggcagtccgctagagctatcatggctcagctgccccaggaagagaaagctaagatagcagagcaagtcgagattttccaccaagagaagagtaaactcgacgccgaggtggctaagtgggacgattcaggcaatgacatcattgtgcttgcaaagcagatgtgcatgatcatgatggagatgactgacttcacacggggaaagggccctttaaagaataccagtgacgtcatcaatgccgcaaagaaaatagcagaggctggctccagaatggacaagcttgccagggcagtggctgaccaactcgattcggctaccagcctgatccaggctgcaaagaatttgatgaacgcggtggtcctcacggttaaagcctcatacgttgcttcaacaaagtaccaaaaagtttacggcacagcggcagtgaattctcctgttgtgagctggaaaatgaaggctcccgaaaagaagcccctggtaaagagggaaaaacctgaagagttccagaccagagtgagaaggggatctcagaaaaagcatatcagcccagtgcaggctttaagcgagttcaaggcaatggactcattttag

SEQ ID NO: 217248 - DNA, 2718 bp, synthetic construct
  misc_feature 1..2718: note = Description of Artificial Sequence: Synthetic coding sequence
  source 1..2718: mol_type = other DNA
atgacctctgcaacgtcccccataatactcaaatgggaccctaaatccctggaaatccggaccctgacagtggaaagacttctcgagcccctggtcactcaggtaaccacgttagtgaacacatccaacaagggcccatccggcaaaaagaagggacgttccaaaaaggcacacgtgctcgcagccagcgttgagcaagcaacccaaaactttctggaaaagggcgaacagatcgcgaaggagtcccaggacctgaaggaggaactcgtggccgcagtggaggatgtaaggaaacaaggggagactatgcggattgcatctagtgagttcgccgatgatccgtgttcctctgttaaacgcggtaccatggtgcgggcagccagggctttgctgtccgcagtaacacgcctactcatcttagcggacatggctgacgttatgagactgttatctcacctgaaaatcgtggaggaggccctagaggcagtgaagaacgcaacgaatgaacaagacctggccaatcgctttaaggaatttgggaaggaaatggtcaagttaaactacgtagcagcccgacgccagcaggaattaaaggaccctcattgtagggacgagatggcggcagcacgcggagcactgaaaaaaaatgcaacaatgctctacactgcctctcaggcattcttgagacatcccgatgttgccgcaacaagggccaacagagactacgtgtttaaacaggttcaggaggcaatagcaggcattagcaacgcagcccaagcaactagccccaccgatgaggcaaagggccacacaggaatcggggagctggctgccgctctgaatgagttcgataacaagataatattggatccaatgacatttagcgaggcacgattccgcccaagcctggaggagaggctggagtcgataatttccggagctgcacttatggctgattcgagctgcacgcgtgatgaccggagagagcgcattgtggccgagtgcaacgcagtgaggcaggcactgcaggacctactgtctgagtatatgaataataccggacgaaaggagaagggcgatccgttgaacatcgccattgacaagatgaccaagaagacccgggacttacgcaggcagctgcgtaaggctgtgatggatcatatcagcgacagctttctggaaacaaacgtccctcttttagtcctgattgaagccgctaagagcggaaacgagaaggaggtgaaagagtacgcacaagtgttcagggaacatgcaaacaagctcgtggaagtcgctaacctggcttgctctatctccaataatgaagaaggggtaaagctggtgcgtatggcagctacacaaattgactctctttgcccacaagttatcaacgctgcactgaccctcgccgctagaccccagagtaaggtggcgcaggacaatatggacgtcttcaaggatcagtgggaaaagcaagtgcgggttctcacggaggcagttgacgatattacctctgtggatgatttcttatctgtgtccgagaatcacatcttggaggacgtgaataaatgcgtcattgcgctacaggaaggggacgtggataccctagatagaaccgcgggagccattcggggaagagccgcaagagtgatacatattattaacgcagagatggaaaattatgaagccggagtctataccgagaaagtcctcgaagcaacaaaactcttgtccgaaactgtgatgcctcgcttcgcagagcaggtggaggtggccattgaggcacttagcgctaacgtcccccagccctttgaagagaacgagtttatcgacgctagccgcctagtgtacgatggggtgagggatattagaaaggcggtcctgatgatcagaactcctgaagaactcgaagacgattctgactttgagcaagaggattacgacgttcgaagccgcacttccgtccagaccgaagacgaccagcttattgccggtcagagcgcgagagccatcatggcacagctcccacaagaggagaaggcgaaaatagccgagcaggtggaaatcttccaccaggagaagtccaaactggacgctgaggtggctaaatgggacgactccggcaatgacattatcgtgttggcaaagcagatgtgtatgatcatgatggaaatgaccgacttcacgcggggtaagggccctcttaagaacactagtgatgtaatcaatgctgccaagaagatcgcggaagccggttcacgaatggataagcttgccagagctgtcgccgaccagtgcccagactccgcctgcaaacaggacctgctggcatacctgcagcgcatcgccctatactgccatcagctgaatatctgctcgaaagtgaaagccgaggtccagaacctgggcggagaattgattgtcagcggcctggatagcgcaacctccctgattcaggcagccaaaaacttaatgaacgccgtcgttttgactgtaaaagctagctacgtcgcctctactaagtatcagaaggtttacggaaccgctgctgtgaactcccctgtggttagttggaagatgaaagctccagagaagaagcctcttgtcaagagagagaagccagaggagttccagacaagagtcaggcgagggtcgcagaagaagcacatttctccggtgcaggctctgagcgaattcaaggccatggactcgttttag

SEQ ID NO: 217249 - DNA, 582 bp, synthetic construct
  misc_feature 1..582: note = Description of Artificial Sequence: Synthetic coding sequence
  source 1..582: mol_type = other DNA
atgagtgcagaaacgccaatcaccctgaatattgaccctcaggacctgcaagttcagaccttcacagtggagaagctgctggagcctctgatcattcaggtaaccacactggtgaactgcccacaaaacccatcttcccgcaagaagggacgaagcaagcgggcttccgtgctactcgctagcgtggaggaagcgacgtggaacctgttagataagggagagaagattgctcaggaagccacagtccttaaggacgaactgacagccagcttagaggaagtcaggaaggaatcagaggccttgaaggtcagcgcggaacggttcactgatgacccctgctttttgccaaagagggaggctgtggtgcaggcggctcgcgctttgctggcagccgtgactaggttgctgatcctggctgatatgatcgatgtgatgtgcctcctgcagcacgtgtctgctttccagcgtacatttgagtccctgaagaacgtggccaataaatcagacttacagaagacatatcagaagctgggcaaagagctcgaaaacttggactatctggccttcaagagacagcaatag

SEQ ID NO: 217250 - DNA, 705 bp, synthetic construct
  misc_feature 1..705: note = Description of Artificial Sequence: Synthetic coding sequence
  source 1..705: mol_type = other DNA
atgacgcagctgccggaagccgagaaagaaaagattgctgaacaggtcgccgatttcaaaaaagtaaagagcaaacttgatgccgaaatcgaaatttgggacgatactagtaatgatataatagtgcttgccaaaaacatgtgcatgattatgatggagatgacagatttcactagaggcaagggccctttgaaacatactaccgatgttatttatgccgctaaaatgatcagtgagtccggctcacgaatggacgtactcgctagacaaattgctaatcagtgccccgacccatcctgtaaacaggacctgttagcctacttggaacaaattaaattctatagtcatcaacttaaaatttgcagccaggtcaaggcagaaattcagaatctgggcggtgagctcattatgtcagccctggactctgtaacaagccttatccaggctgctaaaaatcttatgaatgccgttgtccagaccgttaaaatgagctatattgcctctaccaagatcatcaggattcagtccccagctgggccaagacaccctgtcgtcatgtggaggatgaaagccccagccaaaaaacccctcatcaagcgggagaaacctgaagagacatgcgctgctgtgcgcagaggcagcgcgaaaaaaaaaattcatcctctgcaggttatgtcggaatttaggggaaggcagatctattag

SEQ ID NO: 217251 - DNA, 2688 bp, synthetic construct
  misc_feature 1..2688: note = Description of Artificial Sequence: Synthetic coding sequence
  source 1..2688: mol_type = other DNA
atgagcgccgagacgcccatcaccctcaatattgatccacaagacctgcaagtgcagacattcaccgttgagaagttactggagcccttgatcatccaggtgacaactctggtgaactgtccccaaaatcccagctccagaaaaaaaggaaggtctaagcgcgcatcagtgctcctggcctctgtggaggaagccacgtggaacctattggataagggtgaaaaaatagcccaggaagccactgtgctgaaggatgagcttactgctagtctggaagaggtaaggaaggaatctgaggccctcaaagtgtcagcagagcgctttaccgatgacccttgcttcctgcctaagagggaggcagtcgtccaagcggcaagggcgctcctggcagcagtgacgaggctactgatcttagcagacatgatcgacgtcatgtgtctactccagcacgtgagtgcctttcaacgcacttttgagtctctgaaaaacgtggccaacaaatcagacctgcagaagacttaccagaagctgggaaaagaactagagaacctggattatctcgcctttaagcgccagcaggacctgaaaagccctaatcaaagggacgaaatcgctggggcacgagcgtctctcaaggaaaacagtcctctgctgcatagcatttgcagcgcctgtctggagcactctgacgttgcaagtttgaaggcgagcaaggataccgtctgtgaagaaattcagaatgctctcaatgttattagcaatgcttcccagggaattcagaacatgacaactcctccagaaccacaggcggcaacactcggatccgccttggatgagctggaaaacctaatcgttctgaacccattgacggtcacagaagaggaaatacgcccttcccttgagaaacgtctcgaagccatcatctctggcgcagctcttctggctgactcgtcgtgcaccagggacctgcaccgcgaacgcattatcgcagaatgcaacgcaatccgccaggctttgcaggatcttctgtcggaatacatgaacaatgctgggaaaaaagaacggtccaacacactcaacattgccttggacaacatgtgcaagaaaacacgcgaccttcgcagacaattacgcaaagctatcattgaccacgtgtctgattcatttctcgatacaactgttcccctgttggtgttgatagaagcagccaagaacgggagggaaaaagaaattaaagagtacgcagccatcttccatgaacatacaagccgactggtggaggtggctaacctggcgtgctctatgtccaccaacgaggacggcatcaagatcgttaagatagctgccaaccatctcgagaccttatgccctcagatcataaatgctgccctcgccctcgccgctcggccaaagtcacaggccgtcaaaaacactatggagatgtacaagaggacttgggaaaatcatatacacgtgctgacagaagccgtggatgatattacctcaatcgatgattttctcgccgtttcagaatcccatattttggaagatgtgaataagtgcattatcgccctcagagaccaggatgcagataaccttgacagagctgccggtgccatacgcggaagggccgcacgtgtggcccacatcgtgacaggcgagatggactcgtacgagccaggggcatatacagagggtgtcatgcgcaacgtcaactttctcactagcactgtaatcccggaatttgtgacccaggtgaatgtggcccttgaagccctgtcaaaatcctccctgaatgtgctcgatgataaccagtttgtggatattagtaagaagatatatgatacgatccatgatatacgctgttcagtcatgatgattaggacccccgaagaactggaagatgtatcggacctcgaggaagagcacgaggtccgctcccacacttctatccagaccgagggcaagacggaccgagctaaaatgacgcaactgccagaagcagaaaaagaaaagattgccgagcaggtggccgatttcaagaaggtgaagtccaagttggacgctgagatcgaaatttgggatgatacgtcaaatgacatcatcgtgctggctaagaatatgtgtatgatcatgatggagatgaccgacttcaccaggggtaagggacccctcaagcatacaaccgatgtcatttacgccgcaaaaatgatttccgaaagtgggtctcggatggacgtgctagctaggcagatcgccaaccagtgccctgaccccagctgcaaacaggacttgctcgcctacttggagcaaatcaaattttatagccatcagttaaaaatctgctcccaggtgaaagccgaaattcagaatctcggcggtgagttaatcatgtccgcgctagattccgtaacatcgctgatccaggctgcaaagaacctaatgaacgcggttgtgcagactgtgaagatgagttacattgcttcaaccaagattatccggatccaatcgccagcagggccaagacaccctgtggtaatgtggcggatgaaggctcctgctaaaaagccactgatcaaaagggagaagcccgaggaaacctgtgccgcagtccggaggggcagtgccaaaaaaaaaatccacccccttcaggtgatgtctgaatttagaggacgtcagatttattag

SEQ ID NO: 217252 - DNA, 2688 bp, synthetic construct
  misc_feature 1..2688: note = Description of Artificial Sequence: Synthetic coding sequence
  source 1..2688: mol_type = other DNA
atgtcagctgaaacccctattaccctgaatatagacccacaggacctgcaggttcagaccttcacggtggaaaaacttcttgagcctcttataatacaggtgacaacactcgtcaactgtccgcaaaacccctcctccaggaaaaaaggccgttccaaacgcgcaagcgtcctgctggcctctgtggaggaggccacctggaatctactcgataagggcgagaagattgcccaggaggccaccgtcctgaaggacgaactgaccgctagcctcgaagaagtgcgcaaggaatcagaagcactcaaagtgtccgccgagcgcttcaccgatgatccttgctttctgcccaagcgggaggccgtggtgcaggccgcacgcgctctgctcgccgcagttacccgtctcctgatcctagctgatatgatcgacgtcatgtgcctcttgcagcatgtttcagcgtttcagcgtacctttgaaagcctgaaaaatgttgccaataagagcgacctgcagaaaacatatcagaaactgggtaaagaactcgaaaacctggattatctcgcgtttaaacgtcagcaagacctgaaatctcctaatcagagagatgaaatagcaggcgctagggctagtctgaaggaaaatagcccactcctgcattccatttgcagcgcctgcctggaacattccgatgtggcctcccttaaagcctccaaagacactgtttgtgaggagatccagaatgcgcttaacgtaattagcaacgcttctcagggcatccagaatatgacaacacccccagagccgcaggctgcgaccctggggtcagccctggatgagctcgaaaacttgattgtgctgaacccactcaccgtcactgaagaggagattagaccatcattggaaaagcgcctcgaagcaattatcagcggggcagcgcttctagctgatagttcctgtacacgggatcttcatagagagagaatcattgcggaatgcaatgccatccggcaggcgctgcaggatctccttagtgagtacatgaacaatgcgggaaagaaagaaagatctaataccttgaacattgcactggacaatatgtgcaagaagacacgcgatttacgccgacagttgcggaaggctattatagaccacgttagcgatagctttctggataccaccgttccccttctggtgctaatcgaagccgctaagaacgggcgagaaaaagaaataaaagaatacgctgctatttttcacgagcacacctcccggcttgtagaagtggccaacctagcttgcagtatgagtactaatgaggacgggatcaagattgtcaaaatcgctgctaaccatctagaaactctgtgccctcagatcatcaatgccgctctcgctttggctgccagacccaagagccaggccgtaaagaatactatggaaatgtacaagagaacatgggaaaaccacatccacgttctcacagaagccgtagacgatataacaagtattgatgactttctcgctgtctctgaaagccacatcctggaggatgtgaataaatgcatcattgcactgagagatcaggacgcagacaacttggatcgcgcagcaggcgctataagaggtcgtgctgctagggtggcacacatagtgaccggcgaaatggatagttatgaacccggagcctacactgagggcgttatgaggaacgtgaatttcctcactagcacggttatcccagagtttgtgacgcaggtgaacgtagcattagaggctctgtcaaaaagctctctcaatgttctggatgataaccaatttgtcgatatttctaagaaaatttatgacaccatacatgatattcggtgctcagtaatgatgattcggactcctgaagagctggaagatgtatctgaccttgaggaagagcatgaagtgcgtagtcatactagcatccaaacggagggcaagactgacagagcaaagatgactcagctccccgaagcggagaaagaaaaaatagctgaacaggttgccgactttaaaaaagtgaagtcaaaactggatgccgagatcgaaatctgggatgacacctccaacgacataatcgtcctggctaagaacatgtgcatgatcatgatggaaatgactgacttcactagaggcaagggtccacttaaacacacgacagatgtgatctacgctgcgaagatgattagtgagtccggatcgcgtatggacgtacttgcgagacagatagcgaaccagtgtccagacccatcctgtaagcaggatctcctggcatacctggagcagatcaagttttatagccatcaacttaaaatttgtagtcaggtcaaggccgagatccaaaatctgggcggagagctgattatgtctgccctggacagtgtgacatccttgatccaggcagcaaagaaccttatgaatgcggtcgtgcaaacggtcaagatgagctacattgcctctactaagatcatccgcattcagtcccctgccggaccccgacacccagtagtcatgtggaggatgaaagcccctgccaaaaagccattgatcaagagagaaaagccagaagaaacctgcgccgcagtgcgcaggggctcagccaagaagaaaattcaccccctgcaagttatgagcgagttcagaggccgtcaaatttactag

SEQ ID NO: 217253 - DNA, 1131 bp, synthetic construct
  misc_feature 1..1131: note = Description of Artificial Sequence: Synthetic coding sequence
  source 1..1131: mol_type = other DNA
atgtccgcggaaacccccatcactcttaacatcgacccccaagatctccaggtccagactttcacggtagagaagctgttggagcctctgatcatccaggtgaccacactggtcaactgtccacagaatccctcctctaggaagaagggcagaagtaaaagagcctccgtgttgctggcctcagtggaagaagccacctggaatctacttgacaagggagaaaagatagcccaggaagctaccgtactgaaagacgagctgactgcatcccttgaggaagtcagaaaggagtctgaggctcttaaagtcagcgctgaacggttcaccgatgacccctgcttcctcccaaaaagggaggctgtggttcaagctgcgagagcgctgcttgctgctgtcacaagacttctgattctcgccgatatgattgacgttatgtgtctgctccaacacgtgtctgcctttcaaaggaccttcgagtctttgaaaaacgtggctaataagtcagatctgcagaaaacctatcagaaactcggaaaggaactcgagaacctggactacctggctttcaaacgccagcaagatctcaaatcacctaaccagagagacgaaatcgccggagctcgcgctagtttgaaagagaactcccctctgcttcactctatctgctctgcctgtcttgaacattccgatgtggccagcctaaaagcttcaaaagacaccgtgtgtgaggaaatccaaaatgcactcaacgtcatctcgaacgcttcccaaggcatacaaaatatgaccacacctcccgaaccacaggccgctactctgggcagtgctctggatgagctggagaacttgatcgttctcaatcccctaactgttactgaggaagagatccgccctagtttggaaaaaaggctcgaagccatcataagtggcgctgcactacttgccgatagtagctgcaccagagatctgcatcgtgagaggatcatcgccgagtgtaatgccatcagacaggccttgcaagatctgctttccgagtacatgaacaatctgtgtaatcagaagagcgatctcggactgaccggtgtgaaaatcaaactgctggaggagtgtatcattttttggtcactgtag

SEQ ID NO: 217254 - DNA, 582 bp, synthetic construct
  misc_feature 1..582: note = Description of Artificial Sequence: Synthetic coding sequence
  source 1..582: mol_type = other DNA
atgagcgccgagacgcctattaccttaaacattgacccacaggatctacaagtacagactttcactgtggagaaactgcttgaaccactcataatccaggtgacaaccctcgtcaattgccctcagaatccatctagtaggaagaagggtcggtctaagcgtgcctccgtgctattggcttccgtggaagaagccacctggaacctgttggataagggcgaaaaaatcgcccaggaggccactgtgctgaaggatgagcttacggccagccttgaggaggtgcgaaaagagtccgaggccctcaaggtgtcagcagagcgttttactgatgatccctgcttcttgccaaaaagggaggcggtcgtgcaggccgctcgggctcttttggcagcagtcacaagactgttgatcttggctgatatgatagacgtgatgtgcttgttgcagcacgtctctgcattccagcgtacatttgaaagtctgaaaaacgtggctaacaagtccgatctgcagaaaacctaccaaaaactgggcaaggagctggagaacctggattatctagccttcaaacgtcagcagtag

SEQ ID NO: 217255 - DNA, 1131 bp, synthetic construct
  misc_feature 1..1131: note = Description of Artificial Sequence: Synthetic coding sequence
  source 1..1131: mol_type = other DNA
atgtcagccgaaacgcctattacattgaacattgaccctcaggacctgcaggtgcaaacattcactgtggaaaaactgctggagccgttgatcattcaggtgacgacactggttaactgtccacagaatcctagctctagaaagaaaggccgatcgaagagagccagcgtcttactagcctcagtagaggaggcaacgtggaatcttctggacaaaggcgaaaagattgcacaagaagcgactgtcctcaaagatgagcttactgccagtctggaagaggtgagaaaggaatctgaggcccttaaagttagcgccgagcgctttacagacgacccttgttttctgccgaagcgggaggcagtagtgcaagccgcaagagctctgctggctgccgtgaccaggctccttatactcgctgacatgattgatgtgatgtgtctgttgcagcatgtctccgcttttcaacgcacgtttgagagtctgaagaacgttgcaaacaaaagtgacctacagaaaacatatcagaagctggggaaggagttagaaaacttggattatctggcattcaagagacagcaggatcttaaatcccctaatcaacgggatgagatcgccggtgcccgagcatctctgaaggagaattcccccctgctgcactcaatctgcagtgcgtgtttggaacatagcgacgtggcctccctcaaggctagcaaggacacggtgtgtgaagaaattcagaacgctttgaacgtcatcagcaatgcatcacagggcatccagaacatgaccactccccctgagcctcaggctgctaccctcgggtctgccttggacgagctggaaaatcttatcgtcttaaaccccctgacagtcactgaggaggaaatccgcccttccctggaaaagcggctggaggcaatcatctcaggtgccgctttgctggctgactcgagttgtacaagggacctgcatagagagaggatcatcgccgagtgtaacgcaattaggcaagcactccaagacttattatccgagtacatgaataacctgtgcaaccagaagagcgatctgggcctgactggcgtgaaaattaagttactagaagagtgcattattttttggagcctctag

SEQ ID NO: 217256 - DNA, 2205 bp, synthetic construct
  misc_feature 1..2205: note = Description of Artificial Sequence: Synthetic coding sequence
  source 1..2205: mol_type = other DNA
atggcagcgtcccccggaccagcgggagtgggcggagcaggagctgtttacggcagcgggtccagtggattcgccttagacagtgggctggaaatcaaaaccaggagcgttgagcaaaccctcctgccgctggtgtcccagatcaccaccctgattaaccacaaagataacaccaaaaagagcgacaaaaccctgcaggccattcagcgcgtggggcaagctgtgaatctcgctgtcgggcgattcgttaaggtgggcgaggccatcgcaaacgaaaactgggatctgaaagaggagattaatatcgcctgcatcgaggcaaaacaggccggagaaaccatagccgctctgactgatatcacgaatctcaatcacctcgagagtgatggccagattaccatctttactgacaagaccggcgtaataaaagcagcaagattgttgttatcctccgtaaccaaggtgttgttgttagcggatagggtcgtgattaagcagatcatcacatcgaggaataaggtgctggccactatggagcgactggagaaggtaaattccttccaggaatttgtgcagatattctcacagtttggcaatgaaatggtggagttcgcacacctgagcggagaccgccagaacgatctgaaggacgagaaaaagaaagccaagatggccgcagcacgggctgttctcgaaaaatgcacaatgatgctcctgaccgctagcaagacctgcctgcgacaccccaactgcgagagcgcccacaagaataaagaaggggttttcgatcgtatgaaagtcgcactggataaagtgattgagattgttactgattgtaagccaaacggtgaaaccgacatcagttccatttcaattttcactgggatcaaagagttcaaaatgaatatcgaagcactccgagaaaatctatattttcagagtaaggaaaatctttcagttacactggaagtcatcttagagaggatggaggacttcacggactctgcgtacacaagtcacgagcaccgcgagagaatcctcgaactgagcacccaggcaagaatggagctacagcagctcatctcagtgtggatacaggcccagtcaaagaagaccaagtcgattgctgaggagttagagctgtctattctgaagatatctcactcactgaatgaattgaaaaaggaactgcactctaccgccacccagttagctgccgatctcctcaagtatcacgcagaccacgtagttctcaaggctcttaagctgactggggtggaaggcaatctggaggctctcgccgaatacgcatgcaaactttcggagcagaaagaacagctagttgaaacatgtcgccttttaagacacatcagcggtacagagccactcgagatcacttgcatacacgccgaggaaaccttccaggtaacgggacagcaaatcatcagcgccgcagaaacccttacgctgcatccgtctagtaagatagctaaggagaatttagacgtgttctgcgaggcatgggagtctcagatttctgacatgagcaccctcctccgcgagattaacgacgtatttgagggcagaagaggggagaagtacggctatctgtctctcccaaaacctatgaagaacaatgccaatctcaagtcactcaagcctgataagccagattcagaggagcaagctaagatcgcaaaacttgggctgaaactgggactgctgacctcagatgcggattgtgagatagagaagtgggaagatcaggaaaacgaaatagtgcagtacggacgcaatatgagctcaatggcttactccttatatttattcacacggggagaaggccctctaaagactagccaggatcttattcatcagctcgaggtgtttgctgcggaaggactcaagttgacatctagcgtccaggccttctccaagcaattaaaggatgatgataagctgatgcttctgctggaaataaacaaactgatccccctatgtcaccaactccagacggtgaccaagacctccctgcaaaataaggtgtttcttaaggtcgataaatgcatcacaaaaacacgctctatgatggcactgttggtgcagcttctgtctctctgctacaagctactgaaaaagctgcagatggagaataacgggtgggtcagcgtgacgaacaaagacaccatggactcgaagacctag

SEQ ID NO: 217257 - DNA, 1953 bp, synthetic construct
  misc_feature 1..1953: note = Description of Artificial Sequence: Synthetic coding sequence
  source 1..1953: mol_type = other DNA
atggccgctagtccagggccagccggagtggggggagcgggagccgtttacggttctggctcctccgggttcgccttagatagtgggctggagatcaagactcgatcggtcgagcagaccctgctcccactggttagccagattaccaccttaatcaaccacaaagacaacactaaaaagtcagacaagacactgcaggccatccagagggtgggacaagctgtgaatcttgcagttggacgcttcgtaaaggtgggtgaagctattgccaacgaaaactgggacttaaaggaggagattaacattgcatgcattgaggctaagcaggctggagaaaccattgccgctctgacagatatcactaatctgaatcacttagagtccgacgggcaaataactatctttaccgacaaaactggggtgatcaaagcagctcgactcctcctcagctcagtgacaaaagttcttctgctcgccgacagagtcgtaattaaacaaatcatcacatcaaggaataaagttctggctaccatggaaaggctggaaaaggtcaactcatttcaggagtttgtccagatcttttcacagtttgggaacgaaatggtggagtttgcccacctgagcggagaccgccaaaacgatctgaaggatgaaaagaagaaggctaaaatggccgcagctcgcgctgtcctggaaaagtgcacaatgatgcttcttacagcaagcaagacctgcctgcggcacccgaattgcgagagcgcccacaaaaataaagagggtgttttcgatcggatgaaggtggccctcgacaaggtcattgagatagtgactgactgcaaacccaacggagagactgacatctcatctatctcgatcttcacaggtatcaaagaatttaagatgaacatcgaagctttaagggaaaatctgtacttccagtccaaagagaacctgagcgtcacacttgaggtgattttggaacggatggaggatttcacagatagtgcatacacctcccatgagcaccgtgaaagaattctcgaattaagtacccaggcacgtatggagcttcagcagctgatcagcgtctggatacaagcccagtccaagaaaaccaaaagcattgctgaggagttggaattgagcattctcaagatttctcactcgctcaatgaactgaaaaaggagatcattagcgccgcagaaacattgactttgcacccaagttccaaaatcgcaaaagaaaatctggatgttttttgcgaagcttgggagtcacaaatcagcgatatgagtaccctcctgcgcgagattaacgacgtgttcgaaggccgtcgaggggaaaaatacggatacctgagtctgccaaaaccaatgaaaaataatgccaatttgaagagcctgaagcccgataaaccagatagtgaagagcaggccaaaatcgcgaagttgggacttaaactgggacttttgaccagtgacgccgattgtgagatagaaaagtgggaggatcaggaaaacgagattgtgcaatatggtcgtaacatgtctagcatggcttattctctctacctcttcaccagaggcgaggggcctttgaaaacaagtcaagacctaatccatcaactcgaagtttttgccgcagagggcctgaagctgacgagttcggtgcaggcattctctaagcagctgaaagacgatgataagctgatgctgcttttggaaattaataaactgataccactatgtcatcagctccagacggtcacaaagacatccctacagaataaggtatttctgaaggtggacaagtgcattacaaaaacacggagtatgatggccctgctcgtgcaattgttatcactctgctataagttactgaaaaagctgcagatggaaaacaacgggtgggttagcgtgactaacaaggacactatggactccaaaacttag

SEQ ID NO: 217258 - DNA, 552 bp, synthetic construct
  misc_feature 1..552: note = Description of Artificial Sequence: Synthetic coding sequence
  source 1..552: mol_type = other DNA
atggccgcttctccaggccctgcaggggttggaggagcaggggctgtgtacgggtccggttccagcggatttgcactcgattctggacttgagatcaagactcggagtgtggagcagaccctcctccccctagtcagtcagatcaccaccttgatcaaccataaggacaacacgaagaagagtgacaagaccttgcaggctatccagagggttggtcaggccgtaaacttagctgtgggcaggtttgttaaggtgggcgaagcaatcgccaacgaaaactgggacctcaaggaagaaataaatatcgcctgtattgaagcaaagcaggcaggagaaactatcgccgctttaaccgatatcaccaacctgaaccacctggagagcgatggccaaatcactatttttacggacaagaccggggtcatcaaagccgctcgcctgcttttatcctcagtgacaaaggtacttctgctggcagatagagtcgtcattaagcagatcatcacaagtaggaataagcgcctgacaatctataacctccgacactcttag

SEQ ID NO: 217259 - DNA, 408 bp, synthetic construct
  misc_feature 1..408: note = Description of Artificial Sequence: Synthetic coding sequence
  source 1..408: mol_type = other DNA
atgtcgagcatggcctactccttgtacttgtttacacggggtgagggtccattgaaaacatcgcaggatttgatccaccagctggaagtgtttgcggctgagggactcaaattaacttctagtgtgcaagccttttcgaagcaattgaaggacgacgataaactcatgctcctcctggagataaacaagctgattcccttatgccatcaactgcaaacagtcaccaagacttccctgcaaaataaagtgtttctaaaggtagacaagtgtatcactaagacaagatccatgatggccctcctggttcagcttctgagtctctgttacaagctgctaaagaaacttcaaatggaaaataatgggtgggtctctgtgaccaataaggacaccatggactcaaagacttag

SEQ ID NO: 217260 - DNA, 2157 bp, synthetic construct
  misc_feature 1..2157: note = Description of Artificial Sequence: Synthetic coding sequence
  source 1..2157: mol_type = other DNA
atggctgcgagcccgggacccgctggagtgggaggggcaggggctgtttacggatcagggagctccgggttcgccttagactcaggtctggagatcaagactcgctcagttgaacaaactctgctgccactggtgtcccagatcaccacgctcatcaaccacaaggataacaccaaaaaatcagacaagacgctacaggccatccagcgcgtcgggcaggctgttaacctagcggttggacgatttgtgaaagtgggagaagcaattgccaacgaaaactgggacctcaaagaggaaattaatatcgcctgcatcgaggccaaacaggcaggtgaaaccatcgcggctctcactgacattaccaacctgaaccaccttgaatcagatggccagattaccatttttactgacaaaactggggtcatcaaggcagcccgactgctgcttagctctgtgaccaaggtcttgttgctagccgacagggttgtgatcaaacagatcataacctcacgcaataaagtacttgccacgatggagagactagaaaaggtgaacagtttccaggagtttgtacagatttttagccagtttgggaacgagatggttgagttcgcgcatctcagcggagacagacagaatgacctgaaggacgaaaagaaaaaagcgaagatggccgctgcgagggccgtcctggagaaatgtactatgatgctgcttactgctagtaaaacctgtcttcgtcatcccaactgtgagagcgctcacaaaaacaaggaaggtgttttcgatcgcatgaaagtagccctggataaggttatcgagatcgttaccgattgtaagcccaatggagagactgacatctcctcgatatcaatctttaccgggattaaggagttcaagatgaatattgaggccctcagagaaaatctgtatttccagagcaaggaaaatctcagcgtgactttggaagttatcttagagcgcatggaggacttcactgattccgcctatacatcacacgagcacagagaacgcattcttgagctttctacacaggccagaatggaacttcagcaactgatcagtgtctggattcaggctcagagcaaaaaaacaaaatctatcgccgaagagctcgaattgtctattctgaaaatttcacattcactcaatgagctgaaaaaagagctgcacagcacagccacccagttggctgccgacctcctgaagtaccacgccgatcatgtggtcctcaaagctctgaaactgacaggagtggaagggaaccttgaggctttggcagagtacgcttgtaagctttctgagcagaaggagcagctggtggagacctgccgtctgctgcggcacatcagcggcacagagcctttagagattacctgcattcacgcagaagagaccttccaggttaccgggcagcagattatttccgcagctgagactctgaccctccacccaagctcaaaaatcgcaaaagagaacttagacgtgttttgcgaggcctgggagtcgcagatctctgacatgtcaacactgctccgggagattaacgatgtgttcgaggggagacgaggggagaaatacggttatcttagcctgcccaaaccaatgaaaaacaatgccaacctgaagtctctgaagcccgataaacctgattctgaagaacaggcgaagatagccaagttggggttgaaacttggactgctgacctctgatgccgactgcgaaatcgagaagtgggaagaccaggagaacgagattgtacagtatgggcgaaatatgtcgtctatggcctactctctctacttgttcactagaggggaggggccattaaaaacaagccaggacctgattcatcagcttgaagtgttcgcagccgagggcctgaagctcacctcctctgtgcaggccttctccaaacaattaaaagatgacgacaagctcatgttgctgctcgaaatcaacaagctcatacccttgtgccaccaattgcagacagttactaagacctccctgcagaataaggtattccttaaagtcgataagtgcattactaagacaagatctatgatggccctgctcgtgcaattgctttctctgtgctataagctactgaaaaaaagcgagacacggtactag

SEQ ID NO: 217261 - DNA, 2802 bp, synthetic construct
  misc_feature 1..2802: note = Description of Artificial Sequence: Synthetic coding sequence
  source 1..2802: mol_type = other DNA
atggatgactctgaggtcgagtctacggccagcatcctagcctccgtcaaggaacaggaggcacagttcgaaaaattaactagagccctggaggaggagagaagacatgtgtctgcacagttagaacgcgtgcgcgtttccccacaggacgccaaccccctaatggctaatggaaccctcacccggcgtcatcagaatggccgtttcgtgggggacgccgatcttgagcgccagaagttctcagatctgaagctcaatggaccccaggatcactcccatctcttgtattcaactatcccacgaatgcaagagccaggccagatagtggagacttatacggaggaagatcctgagggcgctatgagcgttgtaagcgttgagacttctgatgacggaaccactcggaggaccgaaacaaccgtgaaaaaggtggtgaagacagttactactaggactgtgcaacctgtggcaatgggccctgacggcttacctgtggatgcaagtagcgtcagcaataactatattcagactctgggaagagacttccggaaaaacggcaacggtggccctggtccttatgtcggtcaggcgggtaccgccaccctacccaggaactttcactaccccccagacggctactctagacactatgaggacggatatccaggtggcagcgataactacggttctctgagccgggtcacgaggatagaagagcgctaccgcccttctatggagggctaccgcgctccttccaggcaagacgtctacggcccacagcctcaggtccgggtgggcggaagctcagttgacctgcaccgcttccatcctgagccctacgggctggaagatgaccaacgcagcatggggtatgacgatcttgattacggcatgatgtccgactacggcaccgccagaaggaccgggacccctagcgaccccaggcgcagattgaggagttatgaagacatgattggcgaagaagtgccttccgaccagtactattgggctccccttgcgcagcacgaacgagggtcacttgcctctctggactccctgagaaaagggggaccccctccaccgaactggcgccaacccgagctgcctgaggtgattgccatgcttgggtttcgactggatgctgtcaaaagtaatgcagccgcttatctgcagcatctgtgctatcgcaatgacaaagtaaagactgatgtaaggaaattgaaggggattcctgtactggtcggactgctagatcaccccaaaaaggaggttcatttgggtgcgtgcggggctcttaagaatattagctttggaagggatcaagacaataagattgccatcaaaaattgcgacggcgtacctgcactcgtgcggctgctgcgaaaggcccgagacatggatctgactgaggttatcactgggaccctatggaacttgtcttcccatgactccattaagatggaaatcgtagaccacgctctgcacgctctgacagacgaggtgatcatcccacatagtggctgggagagagaaccaaatgaggattgcaagccacgacacatagaatgggagtcagttctgactaacaccgccggatgtctgcgaaacgtgtcctctgagcggtcggaagccagaagaaagctgagagagtgcgacggcctcgtggatgccctgattttcatagtgcaggctgaaatcggccaaaaggattctgacagcaagttagtagagaattgcgtctgtctgctgagaaacctttcttatcaagtccatcgcgagatcccccaggctgagcgttatcaggaggccgctccaaatgtggccaataacaccgggccacacgccgcttcctgctttggagcgaagaaaggaaaaggtaagaagccgatcgaggaccccgcaaacgacacagtggatttcccaaagcgtaccagcccagcccgaggttacgaactgctctttcagccggaggtagtgcgcatctacatttccctgttaaaggaatctaagacgcctgcaatcctggaggcaagtgctggggcaatccaaaacctgtgtgctggcagatggacctacggacgctacattagaagcgcactccgccaggaaaaggccttaagcgccatcgccgacctgctgaccaacgaacacgagcgcgtggtaaaggccgcatccggagccttgaggaacctggccgtggacgctcgtaacaaggaactgattggcaagcacgcgattcccaacttggtgaagaacctgccaggtggacagcagaacagcagctggaacttcagtgaggacacggtcatttcaatcctcaacaccattaacgaggtgatcgccgagaacctcgaggcggctaaaaaactcagagagacacaagggatcgaaaaactagtgcttattaacaagtcgggtaatcggtcggaaaaagaggtacgggcagcagcccttgtactgcaaactatttggggctataaagaattacggaaaccattggagaaggaggggtggaaaaaaagtgactttcaggtgaacttgaacaacgcttccaggagtcagtcatctcatagttacgatgacagcacactaccgttgatagaccgtaatcaaaaatccgacaaaaagcccgatcgggaagaaattcagatgtctaatatggggagcaacaccaaaagccttgataataactattctacccccaatgagaggggtgatcataataggaccctggataggtcaggcgatctgggagatatggagccactaaaggggactacacccctgatgcagaaaatctag

SEQ ID NO: 217262 - DNA, 2844 bp, synthetic construct
  misc_feature 1..2844: note = Description of Artificial Sequence: Synthetic coding sequence
  source 1..2844: mol_type = other DNA
atggacgactccgaggtggaatccacagcttcaatactggcctccgtgaaagaacaggaggcccagttcgagaaacttactcgcgctttggaagaggaacgcaggcatgtgtctgcccagttggagcgagtgcgggtgagtccacaggatgccaacccactgatggctaacggtacccttacaaggaggcatcagaatggaaggttcgttggcgacgccgaccttgaacgacagaaattcagcgacctgaagctgaatggaccacaggatcatagccatctgctttatagcacaattcctcggatgcaggagccgggtcagatcgtggagacctacactgaagaagatccagagggggcaatgagcgtcgtatctgtggagacctctgatgatggtactacaaggcggacagagactacagtgaagaaggtagtcaaaaccgtgaccacacgaaccgtccaaccagtggccatgggacccgatggacttcctgtagacgcttcctccgtgtccaataactatattcagaccttggggagagacttccggaaaaatggtaacggtggtcctggcccatatgttgggcaggccggaaccgccaccctcccacggaacttccactacccccctgacggctactcacgccattacgaggacggatatccaggcggaagcgacaactacggtagtctgtcccgcgtgacccgcattgaggaacgctaccgccctagcatggaaggctacagagcccctagtcgccaagatgtgtatggcccacaaccacaggtgcgcgttggagggagcagtgtggatttgcatcgctttcatcccgaaccgtatggtttagaggatgaccagagatcaatgggctacgatgacctggactatgggatgatgtcagattacggcacagccagacgcacgggaaccccctctgatccacgtcgacggttaagatcatacgaagacatgatcggggaggaggtccccagtgatcagtactactgggccccactggcacagcacgagagaggatctctggcctccctggactccctgcgaaaaggtggaccacctcccccaaattggcgccagcccgagcttcccgaggtgattgcgatgttaggatttaggttagacgcagtgaagtctaatgccgctgcatatctacagcatttgtgttacaggaatgataaggtgaaaacagatgtacgaaagcttaaaggtattccagttcttgtggggcttctagaccacccgaagaaagaggtccatctgggcgcttgtggtgcactgaagaatataagctttggacgcgaccaggacaataagattgcaattaagaattgtgacggcgtgcccgctttggttcggctgctgcggaaggcgcgagacatggatctgaccgaggtgatcactggaacactgtggaacctcagctcccacgactctatcaaaatggagattgtggatcacgcactgcacgcccttactgacgaagtgatcatcccgcacagcgggtgggagcgcgaaccgaacgaggactgcaaacccaggcatattgagtgggagtctgtcctgacgaatacagcgggttgccttcgaaatgttagctccgagcggtccgaggcaaggaggaaacttagggagtgtgatggtctggttgacgccctcattttcatcgtccaggccgaaatcggtcaaaaggattctgattcaaagttagtggaaaattgcgtgtgcctgttgaggaatttaagctaccaggttcacagggaaatcccccaggcagaacgctatcaggaagcggctccgaacgtggcgaataacaccgggcctcacgcggcttcatgcttcggagccaagaaggggaaggacgagtggttctctaggggaaaaaaacccatcgaggacccggcaaatgataccgtagatttccctaagaggacctcccccgcaagaggttacgagctgctgttccagcccgaggtggtgagaatttatatatctctgttgaaggaaagcaaaacccccgcaattcttgaggcttcagccggtgcgattcagaatctgtgcgcgggaaggtggacttacggacggtacatccggagtgctctgagacaggaaaaggctctgtccgccatagccgatttattaactaatgagcacgagagagtcgttaaggccgctagcggagccctgcgtaacctggcagtagatgcgaggaacaaagaactgataggaaagcacgcaatcccaaatctagttaagaatctcccagggggacagcaaaattcctcgtggaattttagcgaggatacagtgatctctattctgaacactattaacgaggtcattgctgagaacctggaagcagctaagaaactgagggaaacgcaaggcatcgaaaagcttgtgttgataaataagagcggaaatcgctcagaaaaagaggtcagagctgcagctctcgtgctgcagacaatttgggggtacaaggaactccgcaagcccctggaaaaagagggatggaaaaagagcgactttcaagtcaacctgaataatgcctcccggtcacaatcatcccacagttacgacgactctaccctccctctcatcgaccgtaatcaaaaatctgataataactacagcactcctaacgagaggggagaccacaacaggaccttagacaggtccggggatctgggcgacatggaaccattaaagggcacaaccccactgatgcaggacgaaggacaggagagccttgaggaggaactcgacgtgcttgtgctggacgacgaaggaggccaggtgagttacccgtctatgcagaaaatctag

SEQ ID NO: 217263 - DNA, 2889 bp, synthetic construct
  misc_feature 1..2889: note = Description of Artificial Sequence: Synthetic coding sequence
  source 1..2889: mol_type = other DNA
atggacgatagtgaggtagaatctactgctagcatcctagcgtctgtgaaagagcaagaagctcagttcgaaaaactgactagagctctggaagaggagaggaggcacgtatccgcgcaattggaaagagtgagggtgagtccgcaggacgcaaatccattaatggcaaacgggacgctcactaggcgccaccagaatggtaggttcgtcggcgatgccgatctcgagaggcaaaaattttccgacctcaagctgaacggacctcaagatcactcacatcttctttatagcaccatcccaaggatgcaggagcctggccagattgttgaaacctacacggaggaggacccggagggggcaatgagcgtggtgagcgtggagaccagtgacgatggaactacccgtaggactgagaccaccgtgaagaaggtcgtgaaaaccgtaacgactagaacagtgcagcccgtggccatgggaccagacggcctgcccgtggatgcttctagtgtgagcaataactatatccagacactggggagggattttcgcaaaaatggcaatggcggtccaggcccttatgtgggacaggccggaacggccactctgccccgaaactttcattatccgccagacgggtatagccggcactacgaggacggatatcctgggggttcagataattatggttccctgagtagagtgaccagaatcgaggaaagataccgaccttccatggaaggttaccgtgccccttctcgacaggatgtgtacggaccacagcctcaggtgcgggtgggaggatcctctgttgacctgcacagattccatcccgagccctacgggcttgaggatgaccagcggagtatggggtatgatgatttagattacggaatgatgagcgactatggaacagcgcgaaggaccggaacgcccagcgatcctaggcgacgcctgaggagctacgaggatatgattggagaagaggtgcctagcgatcagtattactgggcgccactggcgcagcatgagcgcggttctttggcttcattagacagcctgcgcaagggcggtccaccacctcccaactggagacagcccgagctgcccgaagtgatcgcaatgctcgggttccgcctagatgcggttaaatcaaatgccgctgcttatctacagcacctctgctaccgcaacgataaggtaaaaaccgatgtgcggaagctgaaagggatccctgtcctagtgggcctgctggaccaccctaaaaaggaggtgcatctgggcgcttgtggggctctgaagaacataagcttcggtcgtgatcaggataacaagatcgcaatcaagaattgtgacggcgtgcccgcacttgtccggctgctgcgcaaggcaagagatatggaccttacagaagtcatcaccggcaccttatggaatctgagttctcacgatagcattaaaatggagatagtagatcatgcactgcatgccctcactgatgaagttataatcccccattccggatgggagagggagcccaatgaggactgcaaacccagacacatcgagtgggagagtgttctgaccaatacagccggttgtttgaggaatgtgtcaagcgagcggtctgaagcgagacgtaagctaagagagtgcgatggccttgtagatgcccttatcttcattgttcaggccgagatagggcagaaggattccgactctaaactggtggagaattgcgtttgtctgttgagaaacctctcgtaccaggtgcatcgtgagatcccccaagccgaaagataccaggaagccgcacctaacgttgcaaataacaccggaccccacgctgcttcatgtttcggggctaaaaaaggcaagggcaaaaaacccatcgaggatcctgccaacgataccgtggacttcccgaaacgaacctccccggcaagggggtatgagctgctttttcagcccgaagttgtgaggatttatatcagcctgcttaaggagagtaagacaccagcaatcttggaagcttctgccggtgcaatccagaatctctgcgccggtaggtggacatatggccgatacattcgttctgccctccgacaagagaaagcattaagcgcgatcgcggacctgctaacgaacgaacatgagcgcgtggtgaaagccgcatccggtgctctcagaaacctcgctgttgatgccaggaataaggaactgatcggcaaacacgccattcctaatctggtaaaaaacctgcccggagggcagcagaattcttcatggaacttcagcgaggacacggtgatctccatcctcaatacaatcaatgaggtaatcgcagaaaatctcgaggctgctaaaaagctgcgcgagacccaaggcattgagaaactggtgctaataaataagtccggtaatagatccgagaaagaggtgcgtgcggctgccctggtgctacagaccatatggggttataaagagcttcgcaagcctctggaaaaggaggggtggaaaaaatctgattttcaagtcaatctcaataacgcttctcggtcgcagtccagtcattcctacgacgactccacccttccattaattgatcgcaaccagaagtcagataagaaacctgatcgggaagaaatacagatgtccaacatgggcagcaacacgaagtcactcgacaataattacagcaccccaaacgaacggggagaccacaaccggacccttgatcggagtggggacctgggcgatatggagcctctgaaaggaaccacacctcttatgcaggacgaaggtcaggaatccttggaggaggagctggacgtgctggtgctcgacgatgaggggggacaggtcagctacccgtctatgcagaagatctag

SEQ ID NO: 217264 - DNA, 2826 bp, synthetic construct
  misc_feature 1..2826: note = Description of Artificial Sequence: Synthetic coding sequence
  source 1..2826: mol_type = other DNA
atggatgatagcgaggtcgaaagcaccgcttcaatcctcgcgtctgtgaaggagcaggaagcccaattcgagaagcttacacgcgctttggaggaggaacgacgtcatgtcagcgcgcagctggaacgagtgagggtgagtccccaagatgctaatccgctgatggcaaacgggacacttacacgaaggcatcagaatgggagattcgtgggtgacgcagacctggagaggcagaagttctccgacctgaaactcaatggaccccaggatcattcacatttactgtattcaacgattcctaggatgcaggaacccggacagatcgtcgaaacatatacagaagaggatcctgaaggagccatgagtgttgtgtctgttgagacgtctgacgatggcacaacccggaggaccgagactacagttaagaaggtggtgaagactgtgactacacgcactgtgcaacccgtggccatgggtcctgatgggctcccagtggatgcctcttctgtatccaataattatatccagactctgggccgagactttcgtaagaatggcaatggcggtccgggtccatatgtgggtcaggccggtaccgcgactctaccacggaactttcactaccctcccgatgggtatagccgacactacgaggacggttatcccggaggcagcgacaactacgggtcactgagccgcgttacccgcatcgaggagaggtacagaccctcgatggaagggtacagagcgccttcccgacaggatgtgtacggccctcaaccacaagtccgggtcggaggctccagcgtcgatttgcaccgtttccatccggagccttacggactcgaagacgatcagcgcagtatgggttacgatgacctcgactatggaatgatgtcggattatggtaccgccagaagaaccgggacaccaagcgatcccaggaggcgtttgagatcttacgaggacatgattggagaggaggttccctccgatcagtattactgggcccctcttgcccaacacgaaagagggtccctggcttctctagacagtcttcggaagggcggtccacctccaccaaactggaggcagcctgaactacccgaagttattgccatgttaggttttcgcctggacgccgtgaagagtaacgcagccgcatatcttcaacacctctgttaccgaaacgataaggttaaaactgatgtgaggaaactcaagggcatccctgtgttggtgggcttactcgatcatccaaagaaggaagtacatcttggtgcgtgcggcgcactcaaaaatatttcttttggtcgggatcaggataataagatcgcgataaaaaactgtgacggagtgccagccctggtacgcctcttgaggaaagccagggatatggatctgaccgaggtgattaccggcactctttggaacctgagcagccacgatagcatcaagatggagatcgtcgaccatgcccttcatgccttgacagatgaggtcatcattccccatagcggctgggagagggaaccaaacgaggattgtaaacccagacacatcgagtgggagtccgtactgaccaatactgccggatgcctgcggaatgttagctccgagagaagtgaggcgcgacggaagctgagagaatgtgatgggctggtggacgctctgatctttatcgtgcaagccgagattgggcaaaaagacagcgactcaaagctggtggaaaactgcgtgtgcctactccgcaatctgtcctatcaagtccatcgggagattcctcaggccgaacgctatcaggaggctgcccctaacgtggcaaataataccggacctcacgccgcttcatgtttcggcgctaagaaaggcaagggaaaaaaacccatcgaggacccggcaaacgataccgttgacttccctaaaaggacgtctcctgcaaggggctatgaactcctttttcagcctgaggtcgtccggatttatatcagtttacttaaggaaagcaagacaccagctatccttgaggcctctgctggcgcaattcagaacctgtgtgccggtcgctggacctatggccgttatatccgcagtgccttgaggcaggaaaaagcgctgagtgcaatcgccgatctgctgactaatgagcacgagagggtggtgaaggctgccagcggagccctgcgcaatctagccgtcgacgcacggaacaaggagctcattggaaagcatgctatacctaatctggtcaaaaacctgccaggcggtcaacagaactcatcttggaatttctcagaagataccgtgatttcaattctgaatacaatcaatgaagtgatcgcggagaatttggaggccgctaagaagcttagagagactcagggaatagaaaagctggttctgattaacaaaagcgggaaccggtccgagaaggaggtccgggcagccgcacttgtgctgcagacaatctggggttataaggaactgcggaaaccactggagaaagagggatggaaaaaatctgattttcaagttaacttgaacaacgccagtagatcccaatcctcccactcgtatgacgacagtactcttccactgattgaccggaatcaaaagagtgataataattatagcacgcccaatgagcgcggagaccataacagaacactggatcgaagtggcgacctgggagatatggagccattgaaaggaactacacctctcatgcaagacgagggccaagagtccttggaggaggagctggacgtgctcgtcctggacgacgagggaggacaagtgtcttatccgtcaatgcagaaaatctag

SEQ ID NO: 217265 - DNA, 2802 bp, synthetic construct
  misc_feature 1..2802: note = Description of Artificial Sequence: Synthetic coding sequence
  source 1..2802: mol_type = other DNA
atggacgacagcgaagtcgagagtaccgccagcatactggcttccgtgaaggaacaagaggcccagttcgagaaattaacacgcgctttggaggaagaaaggagacacgttagcgcacagctggagcgcgtgcgagtgtcccctcaggatgccaatccccttatggcaaacgggaccctgacaagaaggcaccagaacggcaggtttgtgggcgacgctgacttggaaaggcagaagttcagcgatctaaaactaaacggcccacaggatcatagtcacttgttgtacagcacgatcccccgaatgcaggaacccggtcagatcgtggaaacctataccgaagaggatccagagggagctatgagcgtcgttagtgtggaaacaagtgatgacggcacaacgcggagaactgaaaccaccgtcaagaaagttgttaaaacagttactaccaggaccgtgcaacccgtagcaatggggccagacggtttgcctgtagatgcaagctctgtgagcaacaattacatacagacgctcggtagggacttccggaaaaacggaaatggcggacctggaccatatgtcggccaggccggaacggcgaccctgcccaggaactttcattatccaccagacgggtactccagacattatgaagatggctatcccggaggatctgacaactatggctcactgagccgcgttacaaggattgaggagcggtacagacccagcatggaagggtacagagcccctagccgccaggacgtgtacggacctcagccccaggttagggtgggtgggtcgagcgtggacttgcatagattccatccagagccatacggtctggaggacgatcaaaggtctatggggtatgatgacctagattacgggatgatgtcagactatgggacagctcgcaggactggaacgccttctgatcctaggcgacgattgagatcatacgaggacatgatcggagaagaggtgccttctgaccagtattactgggccccactggctcagcacgagcggggaagtcttgcttcgctggattccctacgaaaggggggtccacctccacctaactggcgacaaccagaacttccagaagttatcgctatgctgggattccggctggacgctgtaaaatcaaacgccgcagcctacctgcagcatctctgttacagaaatgataaggtgaagacggatgtgcgtaaactcaaggggattcccgtcttagtgggcctgcttgaccaccctaaaaaggaggtccacttaggcgcttgcggcgcactgaaaaacatcagctttgggcgtgaccaggacaacaaaattgccattaagaattgcgacggtgttcccgctctggttcgcctgcttcgaaaagcacgagatatggatctgactgaagttattacaggcaccctgtggaatctgtccagccatgacagcatcaaaatggagattgtggaccatgcgctgcacgcattaactgatgaagtcattatcccccacagcggctgggagcgcgagccaaatgaagactgcaagcccagacatatcgaatgggagtcagtcctgaccaatacagccggatgcctgcgaaacgtgagttctgagagatcagaggctcgcagaaaattaagagaatgcgacggcttggtggacgctctgatcttcatagtgcaggcggagatcggtcagaaggattcagatagtaagctggtcgaaaactgcgtctgtctcctgcggaacctgtcctatcaggttcatagggagataccccaggcagagcggtatcaggaagcagccccaaatgtggcgaataacacgggtccccatgccgcatcgtgcttcggcgctaagaaaggaaaagggaagaagcctatcgaggaccccgctaacgataccgtagacttccccaaacgcacatccccggcacgaggttacgaactcctcttccagccggaagtggttagaatctatatcagcttgctgaaggagagcaaaactccagccattctggaagcctctgctggagctatccagaatctttgcgccggacgctggacctacggcagatacatacgaagcgccctgcgacaggagaaagctctgtccgccatcgcagacctgctcaccaatgagcacgagcgggtcgtgaaagctgcgtctggcgcactgcgcaatctcgcggtcgatgcgagaaacaaagagctaatcggcaagcatgccatcccaaatttggtgaagaatttgccaggaggccaacaaaatagctcctggaacttttccgaggacaccgtgattagtatactgaacaccataaacgaggtcatcgccgaaaatctggaagcggctaaaaagctgagggagacacaggggatcgaaaagctcgtgctcattaataaatcaggcaaccgctccgagaaagaagtgagggccgctgcattggtcctacaaacaatttggggatataaagagctccgcaagccattggagaaagagggatggaaaaaatccgattttcaggtgaatctgaataacgcttctcggagccaaagttcccattcatacgacgattccacattaccactgatcgatcgaaaccaaaagagcgataaaaaacccgaccgagaagagatccagatgagcaacatggggtcaaatacaaaaagcctggacaacaactattccacacccaacgagcgcggagaccataatcgaaccctggacaggtctggagacctaggggacatggaacccctgaaaggcaccacgccacttatgcaaaaaatatag

SEQ ID NO: 217266 - DNA, 2817 bp, synthetic construct
  misc_feature 1..2817: note = Description of Artificial Sequence: Synthetic coding sequence
  source 1..2817: mol_type = other DNA
atggacgacagcgaagtggagtccactgcgtccatccttgcctccgtgaaagaacaagaggctcagttcgagaagctcacccgcgcactggaggaggagcgtaggcatgtatccgcccagttggaaagggttagagtgagcccccaagacgctaaccccctcatggccaatggcacactcactcgcagacatcagaacgggcgtttcgttggggacgcagatctcgaacggcagaagttttccgacttaaagctgaacggtccgcaggatcatagccatctcctatacagcactatcccaaggatgcaagagccaggccagattgtggagacatacacggaggaggacccggagggcgcaatgtcggtggtaagcgtggaaacatctgacgatggtacaactcgcagaacggagacgaccgtcaaaaaagtagtaaaaacggtgactacacggactgtccagcccgtggcaatgggacccgatggattgcctgtggacgcctcatccgtgtctaacaattatattcagactcttggtagggatttccgaaagaatgggaacggaggaccgggtccctatgttgggcaggccggtaccgcaactctgcctagaaattttcactacccacccgacggctattcccgacactatgaggatggctatcctggtggttctgataattatggttccctttctcgcgtcacccgcatcgaagaacgctatagaccgtccatggaagggtacagggccccttccaggcaggacgtttacgggccacagccgcaggttagagtgggaggctcatcggtggatctgcaccggttccacccagagccttacggcctcgaggacgatcagcgtagcatgggatacgacgaccttgattatggtatgatgagtgactacggcactgcacggaggacaggcactccatcagaccccagacgcagattaagatcctacgaagacatgatcggagaggaggtcccgtctgaccaatactattgggcacctctggctcaacacgagcggggaagcctggcaagtttggattcccttaggaagggaggaccgcctccccctaattggagacagccagaactccccgaagtgattgctatgttgggatttcgacttgacgccgtaaaaagcaacgcagctgcatacctgcagcacctgtgctaccgcaatgataaggtgaagactgacgttcgaaagctgaaaggtatcccagtgctggtcggactgcttgaccaccccaagaaggaggtccacctgggggcttgtggggcacttaagaacattagctttggtcgcgaccaagataacaaaatagctatcaagaattgcgatggagttcctgctctggtaaggctccttcggaaagctcgggatatggatctcactgaggtaattaccggtactctgtggaatctctccagtcatgatagcattaagatggaaatagtagatcacgccctgcatgcgttaacggacgaagtaatcattccacacagcggatgggagcgcgagcccaacgaggactgtaaacccaggcacatcgaatgggagtccgtactgactaataccgcaggatgcttacgcaacgtaagctccgaaaggagcgaggcgagaagaaaactgcgggaatgtgacgggctggttgatgctcttatatttattgtacaagccgagattgggcaaaaggattcagattccaaactagttgagaactgtgtgtgcttactgcgaaatctgagttatcaagttcatcgggaaatccctcaagctgagagataccaggaggccgcacctaacgttgccaataacaccggaccccacgcggcatcttgcttcggagcaaagaaaggcaaagacgagtggttcagtcgtggcaaaaagccaatcgaagaccccgcaaacgatacagtcgatttccccaaacggacttctcccgcaaggggttacgaactcctctttcagccagaagtggtgcggatctacatttcactcttaaaagagtccaaaactcccgcaatccttgaagcttcggccggtgcgatccagaacctttgcgccggaaggtggacgtacgggagatacatccggtctgcgttaaggcaggaaaaagcgctgtctgcaattgcggacttgctgactaatgagcacgagagggtggtgaaagccgcttccggcgctttgaggaacctcgcagtagacgcgagaaacaaggaactaattgggaaacacgctatccccaatttagtgaagaacctgcccggaggccagcagaacagtagttggaacttctcagaggatacggtgattagcatactgaatacaatcaatgaagtaatagccgagaacctggaggctgccaaaaagttaagagagacgcaaggaatcgagaaattggtgctaatcaataaaagtggaaaccgctcagagaaggaagtgcgcgctgctgctctcgtgttgcagacaatttggggatataaggagctgcgtaagcctctggagaaggaaggttggaagaaatctgatttccaggttaatctgaacaacgcaagtcggtcccagagttcacacagctacgatgatagtactttacccttgatcgacaggaatcagaagagcgataaaaaacccgacagggaagagatacagatgagcaatatgggatccaacacaaagagcctagacaataattactccacaccaaatgaaaggggcgatcataaccggaccctcgatcgttccggcgatctgggtgatatggaaccattgaagggcacaacaccattgatgaagatctag

SEQ ID NO: 217267 - DNA, 2907 bp, synthetic construct
  misc_feature 1..2907: note = Description of Artificial Sequence: Synthetic coding sequence
  source 1..2907: mol_type = other DNA
atggatgatagcgaggtggagtcaaccgcttccatcctggctagcgtgaaggaacaagaagctcaattcgaaaagttaacccgggctctcgaggaggagagaagacacgtgagcgcccaattggagcgggtgagggttagccctcaagacgccaaccccttaatggcaaatgggaccctgacaaggcgccaccagaacggaaggttcgtcggagacgcagacctggaacggcaaaagttctcagacctgaagttaaatggtccccaagaccactcccatcttctgtatagtacaatcccacgcatgcaagagcctggacagatcgtcgagacttacaccgaagaggaccccgaaggtgctatgtccgtggtcagcgtggaaacttctgatgatggtactacgaggcgcactgaaacaacggtgaaaaaggtggtgaaaaccgtgaccactcggacagtgcagccagtcgcaatgggtcccgacggattgccggtggatgccagctctgtatccaacaattatatccaaaccctgggcagggatttccgaaagaatggcaacggaggccctggtccgtatgtagggcaggctggcaccgccacgctaccgaggaacttccactatccacctgatggatacagtcgccactatgaggatggttatcccggtggtagtgataactatggatccttgagccgcgtgactcggattgaggaacggtatagaccttccatggaaggatatcgggctcccagccgccaggacgtttacggcccacagcctcaggtgcgtgtgggaggaagctcagtggacttgcaccggttccatccagagccctacggtctcgaggacgaccaaagatccatggggtatgacgatctggactatgggatgatgagcgactatggtactgcacgaagaacaggcaccccctcggatccgcgacgtcgtctgcgttcttacgaggatatgataggcgaagaggtgccaagtgatcagtactactgggcccctctggcacagcacgagagaggtagcctagcctcgctcgacagcctgagaaagggcggaccgccaccacccaactggaggcagcctgagctcccagaggtgatagcaatgctgggttttaggctcgacgccgtgaagagcaacgctgctgcctatctccagcatttgtgctaccgaaatgataaggtcaagaccgacgtgcggaaactgaaaggaatcccggtgctggtcggtttgctcgatcaccctaaaaaagaggtccacttgggggcatgcggcgctttaaagaacattagcttcggaagggatcaggacaataagatcgccataaaaaactgtgatggcgttcccgcattggtccgcctgctaaggaaggctcgagatatggaccttaccgaggtcataacaggaacgctgtggaatctatcttctcatgactccattaagatggaaatcgtcgaccatgcactacatgcattgactgatgaagtgataataccccatagcggttgggagcgggagcctaatgaagattgcaagccgaggcacattgagtgggagtcagttcttacgaatacagctgggtgcctgcggaatgtctcttctgaacgcagcgaggccaggaggaagctgcgcgagtgtgacggccttgtggatgcccttattttcatcgttcaggcggaaattggacagaaagactcagactcaaagctcgtcgagaactgtgtatgcttgctgcgcaatctgagctaccaggtacatcgcgagataccacaggcagagcggtaccaggaggccgcacctaatgtggctaacaataccggtccccacgcagcatcatgctttggggcaaagaagggcaaggatgaatggtttagtaggggaaagaaaccaattgaggacccagccaacgatactgttgactttcccaagagaacttcccctgccagagggtacgaactgctattccagccggaggtggtgcgcatttatatttctttgcttaaggaaagcaaaacgcccgctattcttgaggcaagcgctggagcaatccagaacctgtgcgctggacggtggacctacggccgatatattcgatcagctctccgacaggagaaggctctgtcagcgatcgctgacctgctcaccaacgagcatgaaagggtcgttaaagcagctagcggagccttaaggaacctcgcagttgatgcacgcaacaaagaactgatcggtaagcatgcaatcccaaatctcgtcaaaaatcttcctggtggtcagcaaaactcttcttggaatttcagcgaggacacagttatcagcatcctaaacaccatcaatgaagttatcgccgagaacctggaggcggctaaaaaactccgggagacacagggaatcgagaagctggtgttaattaataagagcgggaatcgaagcgagaaggaagtccgggcagctgctctggtgctacaaaccatctggggatataaagagttgcgcaagcccctggaaaaagagggctggaaaaagtccgattttcaggttaatctgaataatgcaagccgttcccaatcttcccatagttatgacgactccacattgccactcatagatagaaaccagaagagtgacaagaaacccgatagggaggaaatccagatgtcaaacatggggagcaacaccaagtccctggacaataactacagtaccccgaacgaaagaggggatcacaacaggactcttgaccggagtggagacctgggagatatggagccacttaagggaacaacacctcttatgcaagatgagggccaagagtcattggaggaggagttagatgtgcttgtgttggacgatgagggaggccaggtcagttacccgtctatgcaaaagatctag

SEQ ID NO: 217268 - DNA, 2604 bp, synthetic construct
  misc_feature 1..2604: note = Description of Artificial Sequence: Synthetic coding sequence
  source 1..2604: mol_type = other DNA
atgcaggaaccaggacagatagtagaaacgtacacagaggaggaccctgagggagctatgtctgtggttagtgtggaaacatctgatgacgggaccacccgtcggacagaaaccactgtgaaaaaggtggtgaaaactgttaccacaaggaccgttcagccagtggctatgggtcccgacggactgccagtggacgccagtagcgtctccaataactacattcagacattaggccgtgacttccgtaaaaacggaaacggtggccctggaccctacgttggccaggccggaactgcaacactaccccgtaacttccactatcctccagacgggtacagtaggcactatgaggacggataccccggaggatccgacaattatgggagcttaagcagagtgacccggatcgaagagcggtataggccctccatggagggataccgggcacctagcagacaggatgtctacgggcctcagccccaggtccgtgtgggtggatctagcgtcgaccttcatcgatttcatccggagccatacggtctagaggatgatcaacgttcaatgggttacgacgacctggattacgggatgatgtcagactatggaaccgctcggagaaccgggactccgtctgacccaagacggaggctgcgctcttacgaagatatgatcggggaagaagtgccttctgaccaatactactgggcccctcttgcgcagcacgagcgcggtagcctcgcaagcttggattcgctgcggaagggcggaccccctccccctaattggcggcaacccgaacttcccgaggtgatcgctatgcttggctttcgccttgacgccgtgaagtctaacgctgccgcttaccttcagcacctttgttatcgtaacgacaaagtgaagaccgatgtgagaaaattgaaagggattccagtcctcgtcgggcttcttgaccatcccaaaaaggaggtacacttaggggcttgtggtgcactgaagaatatctcctttggtagggatcaggataacaagatcgctattaaaaattgcgacggcgtgcccgctttggtgcgccttctacgaaaagcccgagacatggatttgactgaagtgatcacaggtaccctgtggaatctttcttcgcacgattccatcaagatggagattgtggatcacgccttacatgcccttactgatgaagtcataatcccccatagcggctgggagagagagccaaacgaggattgtaaacccagacatatcgagtgggagagtgtgctgacaaacaccgctgggtgcctgcgcaatgtgagctccgagcggtcagaggccaggaggaaattgcgggaatgcgacggccttgtcgacgccctgatctttatagtgcaagctgaaattggccaaaaagactccgattcaaagctcgtggagaactgcgtgtgtctgctccggaacctctcatatcaggtccatagagagatcccacaggctgaacggtaccaggaggctgcacccaacgtggccaataataccggacctcacgcggcaagctgtttcggggcaaagaagggtaaagatgaatggttcagccggggaaagaagcccatcgaagaccccgctaatgatacagtcgattttcccaagcgcactagccctgcgaggggatacgaactgctttttcagcctgaagtagtaaggatttacatatcactgctgaaagagtctaaaactcccgctattcttgaggcctctgctggggctatccagaatctgtgtgccggacggtggacatacggacgctatatcagaagtgccctgaggcaggaaaaagccctgtcagcaatagcagatctgctgactaatgaacacgagcgggtggtgaaggccgcttctggggctcttaggaacctggccgtggacgctagaaataaggagttaatcgggaagcacgcgatcccgaatctggttaagaatctgcccggaggacagcagaattcttcctggaatttctccgaggacaccgttatctccatcctgaacaccattaacgaggttattgcagagaacctcgaggcagcaaagaaactcagagagacccaggggatcgaaaaactggtgcttatcaacaagtccggcaaccgatcagaaaaagaagtacgcgctgcagctctggttctgcagaccatctgggggtacaaggagctgcggaaacctctggaaaaagagggttggaaaaagagtgactttcaggtgaacctgaacaatgcttctcgatcccaatcctcgcatagttatgacgattccacgctgcctcttattgaccgcaatcagaaaagcgacaagaaacctgaccgggaggaaatccagatgtctaacatggggtcaaataccaagagtctggacaacaactactccacacctaatgaacggggtgaccacaatcggaccctggatagaagcggtgatctgggagatatggaaccgctaaaggggacaacgcctctgatgcaggacgaggggcaggaatccctcgaagaggaattagatgtacttgtactcgatgatgaaggaggccaggtgtcttacccaagcatgcagaaaatctag

SEQ ID NO: 217269 - DNA, 2499 bp, synthetic construct
  misc_feature 1..2499: note = Description of Artificial Sequence: Synthetic coding sequence
  source 1..2499: mol_type = other DNA
atgcaggaaccaggacagatcgtggagacctacaccgaggaagaccccgaaggggcaatgtcagttgtcagcgtggagacaagtgacgacggtactacaagacggactgagacgacagttaagaaggttgttaagaccgttacaacccgcacagtccagcctgtggcaatggggcctgacgggttgcccgtcgatgccagctctgtctcaaataattatatccagaccctcggtagagattttcgaaagaatgggaacgggggtccgggaccatatgttgggcaggcaggcacagccaccctgcctcggaacttccactacccaccagacggctattcccgtcattatgaagacggctatcctggcggatccgacaattacgggtcactctcacgggtgacaaggattgaagagcgctatcgccctagcatggagggctaccgtgctccttctaggcaggatgtgtatgggccacagccccaggtccgtgttggtgggtctagcgtggaccttcaccgctttcaccctgagccctacggtttagaagacgaccagcgctccatgggctacgacgatctcgactatggcatgatgagtgattacgggaccgcgcgaaggaccggtactcctagcgaccccaggcgcagactccggagctatgaagacatgatcggcgaagaagtaccaagcgatcagtactattgggccccattggcgcagcacgagcgaggaagtctagcaagtctggacagcttgcggaagggcggtcctccccctcctaactggagacagccagaactgcctgaggtcatcgctatgctgggttttcggctggatgctgtgaaatcaaatgcagcagcttacctacaacacctctgttaccgcaacgacaaagtcaagactgatgtccggaagttaaaggggatcccggttctggtggggctcttggatcatcctaagaaagaggtgcaccttggtgcatgtggtgctctcaagaacatcagtttcgggagggatcaggacaataagattgcgattaaaaactgcgatggcgtgccggcacttgtccgactgcttaggaaggccagagacatggacctgacagaggtcatcaccggcaccctgtggaacctgagttcacacgatagtattaaaatggagatcgtcgaccacgcgctgcacgctctgaccgacgaagtgattattcctcactctgggtgggaaagagagcccaatgaagactgcaaacctcggcatatagagtgggaaagcgtcctgaccaacacagcgggttgtctaaggaatgtatctagcgagagatcagaagctcgcaggaagctgagggagtgtgacgggctagtagacgcattaatctttatagtgcaggcagagataggccagaaggatagcgatagtaaacttgtggagaactgcgtttgcctgcttcggaatctgtcttaccaggtgcacagggaaattccacaggccgagaggtaccaggaggctgcccctaacgtggccaacaataccggccctcacgcagcctcttgttttggcgcaaaaaaaggaaaaggcaagaaacccattgaggatcccgctaacgatacggtggactttccaaagcgtacatctcccgctcggggatacgagctgctgttccagccagaagtagttcggatatacatctccctgctcaaagaaagcaagacccccgctattctggaggctagcgccggagccattcagaatttgtgtgcaggacggtggacttacggaagatatatcaggtctgcgctgagacaggaaaaggcgttaagtgctatcgctgaccttttgacaaatgaacatgagcgagtcgtgaaagccgcatctggcgctttgcggaatctcgcagtagatgccagaaataaggagctcatcggcaagcacgcaatccctaacctggtgaaaaacctgccaggaggacagcagaactcctcttggaacttctccgaggacacagttatctccatcctgaataccattaatgaagtcatcgccgagaacttggaagccgctaaaaagctgagagagactcagggtatcgaaaaattagtgctcatcaacaaatccggaaacagatcagagaaggaggtacgcgctgccgcactggtgctgcagaccatttgggggtacaaagagctacggaagcccttagagaaggaagggtggaagaagtcagactttcaggtgaatctgaacaacgcctcaagatcgcaaagcagccacagttacgacgattccaccctcccgcttatcgaccggaatcaaaaatctgacaagaaaccagatagggaagaaattcagatgagcaacatggggtctaatactaagagcctggacaataattattctacccctaatgagcgcggagatcataaccggaccttggataggtccggggatctcggcgacatggagcctcttaaaggaactaccccgcttatgcagaaaatctag

SEQ ID NO: 217270 - DNA, 2802 bp, synthetic construct
  misc_feature 1..2802: note = Description of Artificial Sequence: Synthetic coding sequence
  source 1..2802: mol_type = other DNA
atggatgactccgaagttgagtctaccgcctctatcttggcatctgtcaaagagcaggaggcgcagttcgaaaaactgacaagagcactggaggaggaacggaggcatgttagcgctcagctggaaagggtcagagtatctccacaggatgcaaaccccctgatggcaaacggcacacttactagaaggcaccagaatgggcgtttcgtcggagacgctgacttggaaaggcagaagttcagcgacttaaagctcaacggccctcaggaccactcacatcttctttattctacaatccctcggatgcaggaaccgggtcagatcgtggagacttacaccgaagaggatccagagggagcaatgtctgtggtcagcgtcgaaacgagcgatgatggtacaacacgcaggaccgagacaacagtgaagaaagtggtcaagaccgtaacaaccagaaccgtccaaccagtggccatggggcctgatgggctcccagtcgatgcctctagcgtgagcaataattacatccagactctcggaagggactttagaaaaaatggaaacggcggtccgggtccttacgtggggcaagcaggtactgcaaccctgccccgtaactttcactaccctccggatggatacagtagacattacgaggacggttatcccggagggagcgacaactacggctctctcagccgcgtcactcgcattgaagagcggtatcgaccctctatggaggggtaccgcgctcccagtcggcaggatgtctacggaccccaaccacaggtgcgcgtgggtggatccagcgtcgatttacatcggttccaccctgaaccgtatggactagaggacgatcaacggagcatgggctatgatgacctcgactatggaatgatgtctgactatggaacagccaggcgcacggggacccctagtgaccccagaagacggctcagatcatacgaagacatgataggcgaggaggttcccagcgaccagtattactgggcacctcttgcacagcatgagcggggatctcttgcttccctggattctctcagaaaggggggaccaccaccgccaaactggcgccagcccgaactccctgaggtgattgctatgcttggctttcggctggatgcagtaaagtctaacgcagctgcttatttacaacacctatgctacaggaatgacaaagtgaagaccgacgtgaggaaactgaagggaatcccagttttggtcggtctgctagatcacccaaagaaggaggtgcatctgggcgcatgtggggctctgaagaatatctccttcggcagggatcaggacaacaagattgcaatcaaaaattgcgacggtgtccccgctctcgttcggctgcttagaaaagctcgggacatggaccttacggaggtgattacagggacactgtggaatctgagtagccacgattcaattaagatggagattgtggaccatgccctgcacgccctgacagacgaggtcattatcccccactctggttgggagagggaacccaacgaagattgtaagccacgccacattgagtgggagagcgttctgactaacactgccggttgccttagaaacgtgagctccgaacgttctgaagcaagaagaaaattgagagagtgcgacgggctggtggacgccttgatcttcatcgtacaggcagagatagggcagaaggacagcgactcaaaactggtcgaaaattgtgtgtgtcttctcaggaacctctcgtaccaagtacaccgagagataccacaggcggagagataccaggaggccgctcctaacgtggccaacaacaccggaccgcatgccgcaagttgcttcggcgctaagaagggaaagggaaaaaagcctattgaggatcctgcgaatgacacagtcgactttccaaagcgcacctcaccggctcggggatacgagctgctctttcaaccagaggttgtgcggatctatatctcccttctcaaggaatctaagaccccggctatcctcgaagcctcagctggcgctattcagaatctgtgtgctggacgttggacctatggccgttatatccggagcgccctcaggcaggagaaagcactctcagccattgccgatcttctgaccaatgagcacgaacgcgtcgtgaaagctgcgtccggtgctttgaggaatctggctgtagacgcacgcaacaaggagttgatcggaaagcacgcgattccaaacctagtcaaaaacctgccgggaggacaacagaactccagctggaactttagcgaggatacagttatatccatcctgaatacaattaatgaggtgatagctgagaatctcgaggctgctaaaaaattgcgcgagacccagggcatagaaaagttagtgctaataaacaagtctggcaatcgatcggaaaaggaagtgcgggctgctgcactagtgttgcaaactatctggggctacaaggaattgcggaaacctttggagaaagaggggtggaagaaaagtgacttccaggtgaatctgaacaatgccagccgctcacagtccagtcactcatatgacgatagcaccctgccactaattgataggaaccagaagtctgataaaaagcccgatcgcgaagagatccagatgtccaatatggggtctaacactaaatctctggacaacaattacagcacgccaaacgagcggggagatcacaaccggactctggacagatctggtgatctgggcgatatggagccacttaaagggacaacccccttgatgcagaagatctag

SEQ ID NO: 217271 - DNA, 15 bp, synthetic construct
  misc_feature 1..15: note = Description of Artificial Sequence: Synthetic coding sequence
  source 1..15: mol_type = other DNA
atggacgactcctag

SEQ ID NO: 217272 - DNA, 2802 bp, synthetic construct
  misc_feature 1..2802: note = Description of Artificial Sequence: Synthetic coding sequence
  source 1..2802: mol_type = other DNA
atggatgacagcgaggtggagtcgaccgcctcaattctggcgagtgttaaggagcaggaagcacagttcgagaagctgacccgagcgctggaggaagaacgtaggcacgtttcagcacaactggagcgcgtgcgcgtgtctccacaggatgcaaatcccctgatggccaacgggacacttacccgtaggcaccagaacggacggtttgttggggacgctgacttggaaaggcagaagttctccgacctgaagctcaacggcccacaggatcattcccaccttttgtactctaccatccctaggatgcaggagccaggacagattgtggaaacgtatactgaggaggaccctgagggcgctatgtcagtcgtctcggttgagacgtcggacgatgggaccacccgacggaccgagaccaccgtgaaaaaagtggtcaagacagtgaccacacgaaccgtgcagcccgttgcgatggggccagatgggttgcctgtcgacgcctcctcggtctcaaacaattacatccaaacactcggacgcgatttccggaaaaacggcaatggaggtcccggtccgtatgtgggacaggctggcactgcgactctgcccaggaactttcactatcctccagacgggtactctaggcattatgaggacgggtaccctggaggctcagacaactatgggtccctttcaagggtgacccgtatcgaggagcgatacaggccaagcatggagggttacagagcgccttcccgtcaggatgtatacggacctcagccccaggtaagagtcggcggatcaagcgtcgacctgcatagatttcaccccgagccctacggactggaagacgaccagagatctatgggatacgacgacctggactatggaatgatgtccgattacggcactgctagacgaaccggcacaccctcagatccacggagacgccttagaagttatgaagatatgattggcgaggaggtgccaagtgatcagtactactgggccccactggctcagcatgaaagggggagtctggcgagccttgactcactgaggaaggggggtcctcccccacccaactggcgccaacctgaactgcccgaggtgatcgccatgttgggctttaggctggatgccgtgaaaagcaatgctgcagcttatcttcagcacctgtgctaccgcaacgacaaagtgaaaacagacgtgagaaagttgaaagggataccagtcttagtgggcctactcgatcatccaaaaaaggaagttcacctaggggcatgtggcgcacttaagaatatttcgtttggccgtgaccaggacaacaagatcgctataaaaaactgtgacggagttcccgcattggtccggttactccggaaggcacgggatatggacttgacagaggtgattaccgggactctttggaacctgtcaagccacgattccattaaaatggagattgtggatcacgctcttcacgcattgaccgatgaggtgatcatcccccactcaggctgggagcgagaacctaatgaagactgtaaacccaggcatatcgaatgggagtcagtactgactaataccgccggatgcctccgaaacgtgagttctgagcggtctgaagcccgacgaaaactgcgggaatgcgacggcctggtcgacgcattaatcttcattgtgcaggcagagatagggcaaaaggacagtgattcaaagctggtcgagaactgtgtgtgtctcctgcgtaatctgtcctatcaggtgcacagagagatccctcaagcggaaaggtatcaagaagccgcaccaaatgtcgctaacaacactggcccacacgctgcaagctgctttggagcaaagaagggaaagggtaaaaagccaatcgaggaccccgcaaatgacaccgtggactttccgaagcggacaagccccgcacgtggctacgaacttctgttccagcctgaagtcgtccggatatacatctccctgctgaaggaatcaaagactcccgcaatcctggaggcctccgcaggcgctattcagaatctgtgtgccggacgatggacatatgggcgatatatacgatctgctttacggcaggaaaaggccttgtctgccatcgctgatctgctgacaaacgagcacgaacgagttgtaaaagccgcttcaggtgccctccgcaatcttgcagtagatgcgaggaacaaggaacttatagggaagcacgctatccccaatctagtgaaaaatcttccaggcggacaacagaactcctcttggaacttttctgaggacaccgtcatctccattttgaatacgataaatgaggtgatcgcggaaaacctggaggccgcaaaaaaacttcgcgagacacaggggattgaaaagctggtattgatcaacaaatctggtaatcggagtgagaaagaggtcagagcggcagctcttgttctgcagacaatatggggatacaaagaattgcgaaagcccctcgaaaaggaaggatggaagaaaagcgatttccaagttaacctgaataacgccagtagatcccagtccagtcacagttacgacgatagtaccctgcctctgattgacaggaaccagaaaagcgacaagaaacccgatagggaggaaatccaaatgtctaacatgggtagcaatactaaatcactggacaataactactccactccaaacgagaggggggatcacaatcggaccttggatcggagcggtgacctgggagacatggagccactgaaaggcactactcctctaatgcaaaaaatttag

SEQ ID NO: 217273 - DNA, 1851 bp, synthetic construct
  misc_feature 1..1851: note = Description of Artificial Sequence: Synthetic coding sequence
  source 1..1851: mol_type = other DNA
atgatcggagaagaagtgcctagcgaccagtactactgggccccactggcccagcatgaaaggggtagcttggcctcgttagactcactgagaaaagggggaccccctcctcctaactggcgccagcctgagctacccgaagtcatcgccatgctggggttccgcctcgacgccgttaagtcaaacgcagctgcttatctgcagcatctgtgctacagaaacgataaagttaagaccgacgtgagaaagttaaaaggcataccagtgctggtcgggctgctggaccaccctaagaaggaggtccatttaggggcttgtggagccctgaagaacatcagcttcggtcgtgatcaagacaataagatcgctattaagaattgcgatggagtgcctgcactcgtgcgcctcctgcgcaaagctcgggacatggacctgacagaggttatcacaggaacactatggaatctgtccagtcacgatagcattaagatggaaattgttgaccacgcactgcatgcactcacagacgaggtgataatccctcactctggctgggaacgggaacctaatgaagattgtaagccacgccacattgagtgggagtccgtcctaacaaatacagccggatgtctgcgtaatgtgagtagcgaaaggtctgaagcccgtcggaagttaagagaatgcgatgggttggtggatgctcttatctttattgtacaggccgaaattggccagaaggacagtgactccaagctcgtcgagaattgtgtttgcctgctgcgtaatctgagctaccaggtccatcgtgagatcccccaagcagagcgttaccaggaggcagcccctaatgtggcgaacaatacagggcctcacgccgcaagttgctttggtgctaagaaaggcaaggatgagtggttctcaaggggaaagaaaccaatcgaggatcccgctaacgacaccgtcgattttcccaagcgcacctctccagctcggggatatgaactcctgttccagccagaggtggtccggatctacatttccctgctcaaggaatcaaaaaccccagccatcctcgaggcaagcgccggtgcgatccagaacctgtgtgctgggagatggacgtatgggcgatatatccgatctgccctcaggcaggagaaggccctttccgccatcgccgacctcttaacaaatgaacacgagcgcgtcgtgaaggctgcctccggcgcactgcggaatctcgctgttgacgcacgtaacaaagaactcattggcaagcatgcaattccaaacttagtcaaaaatctccccggtggccagcagaattcttcatggaacttctccgaagatacagtcataagcattcttaatactatcaacgaagttatagctgagaatctggaagccgctaaaaagctgagggaaacacaggggatagaaaaactcgtgctgattaacaaatctgggaacaggagtgaaaaagaggtccgtgccgctgccttggtgcttcagacgatttggggatacaaagagctcagaaaaccactggaaaaggagggctggaagaaatctgattttcaggtgaacttgaataatgcatctcgctctcagagctcccactcctatgacgactctacacttcccctcattgatcggaaccagaagtctgacaagaaaccagatagggaagaaatacagatgtctaatatgggatccaatactaaatccttggacaataattatagtaccccaaatgagcgtggtgaccataatcggactttggatcgaagtggcgatttgggggacatggagcccttgaaaggcactacgccactgatgcagaagatctag

SEQ ID NO: 217274 - DNA, 2727 bp, synthetic construct
  misc_feature 1..2727: note = Description of Artificial Sequence: Synthetic coding sequence
  source 1..2727: mol_type = other DNA
atggcaaacgggacactgactcggaggcatcaaaatgggcgatttgtcggcgatgctgatttagagcggcaaaaattcagcgacttaaaactgaatggtcctcaggatcattcccatctgctttactcgaccatccccaggatgcaggaacccggacaaatcgtggaaacttataccgaggaggacccagagggggctatgtccgtcgtttccgtggaaacatctgatgatggaaccacccgtaggaccgaaactaccgtgaaaaaggtcgtcaagaccgtaactaccagaacggtccagccggtggcaatgggtccagacggattaccagtcgacgccagctcggtcagtaataattatattcaaacgctcggtagagatttcagaaaaaacggtaacgggggacctgggccatatgtcgggcaggctggcactgcaacgttgcctcggaactttcattatccacctgatggttactcaaggcactatgaagatgggtatccaggcggaagtgataattatgggagtctatcccgtgtaactagaatcgaggaaaggtaccgtccctccatggaaggctatcgggctccgagtagacaggatgtgtacggtccccagcctcaggtgcgggttggaggcagctctgttgatttgcacagatttcaccccgagccctacgggttggaggatgaccagcggagcatgggttacgacgatctcgattacggaatgatgtctgactatggcaccgcacgtagaacaggtaccccctctgaccctagacggagattaagaagctacgaagacatgataggggaggaagtgccttcagatcagtactattgggcgccactggcacagcacgaacgaggaagcttggctagccttgacagtctccgcaaaggcggacctccccctcccaattggcgacagcccgagctgccagaagtaatcgcgatgctggggtttcggcttgacgccgtgaagtccaatgcagccgcatacttacagcatctgtgctatagaaacgacaaagttaagactgatgtgcgaaagctcaaaggcattcctgtcctggtcggtctccttgaccatcccaaaaaggaagtccatctgggagcctgcggcgcactaaagaatatctccttcggaagggatcaagacaataagatcgcgattaaaaactgtgacggagtacccgcactagtgcgcctgcttcgcaaggccagagatatggacctaactgaagtcatcacaggaacactgtggaatctcagcagccatgattccatcaaaatggagattgtggaccatgccctccacgccctcaccgacgaagtcataataccccattcaggatgggaacgggagccaaacgaagattgtaagccacgccacatcgagtgggagtcagtcctcaccaataccgcaggttgtctgagaaacgtctcctctgaaaggtccgaggctagaagaaaactacgtgagtgtgacgggctggtggacgcactcatttttatagtgcaggcagagatcgggcagaaggacagcgatagtaaactggtggagaactgcgtttgccttcttcggaatcttagctatcaggttcacagggaaattccgcaagctgagagatatcaggaggctgctcctaacgtagcgaacaacaccggtccgcacgccgcatcttgctttggagccaaaaagggtaagggtaagaagcccatcgaggatccagcaaacgatacggtggattttcctaagaggacaagtcccgctcgaggatatgaactgctctttcagcctgaagtcgtgaggatttatatctccctgctgaaagagtcgaaaaccccagccatactggaagcctccgccggagcaatccagaatctgtgcgctggacgatggacctacggacggtacattcggagtgcactgaggcaggagaaggctcttagcgcaatcgccgacctgctgaccaacgaacacgagagggttgttaaggccgcttcaggtgcactccggaacctggccgtggacgcgagaaacaaggagctgattgggaaacatgccatcccaaacctggtgaaaaacctccctgggggtcagcagaactcgagttggaacttcagcgaagataccgtgatctccatcctgaacactatcaacgaggtgattgctgagaacctggaagctgccaagaaactccgcgagacacaggggatcgagaagctagtgctaatcaacaaatccggaaaccggtctgagaaagaagtccgagctgctgctctggttttacaaacgatctggggttacaaagagcttaggaaacccctggaaaaggagggttggaaaaagtcggacttccaagttaatctaaacaacgctagccgatcacaaagctctcattcttatgacgacagcactctccctctgatcgatcgcaaccaaaagtctgacaagaagcctgatagagaagagatccagatgagcaacatgggcagtaacacaaagtcactggacaataattatagcacccccaacgaaagaggggaccacaatcgcacccttgatcgaagcggcgatctgggcgacatggaaccactgaagggcacaacccccctgatgcaggacgagggacaagagagcctggaggaggagctagatgtcttagttctggacgacgagggtggacaggtgtcctacccctctatgcagaagatctag

SEQ ID NO: 217275 - DNA, 1833 bp, synthetic construct
  misc_feature 1..1833: note = Description of Artificial Sequence: Synthetic coding sequence
  source 1..1833: mol_type = other DNA
atgatcggggaggaagttccttccgaccagtattattgggcccctcttgcccagcatgaacgtggctcactggcgagcctcgactcccttcggaagggtggcccaccacccccaaattggaggcagcccgagctgcctgaagtgatcgcgatgctcgggttccggctggatgctgtgaagagcaatgccgcagcgtacctgcagcacctgtgttacaggaacgataaggtaaaaacagatgtgcgaaaactgaagggcatcccagtcctggtgggcttgctagatcacccaaaaaaagaggttcatctgggggcatgtggggcactgaaaaacatctcgttcgggcgtgaccaagataacaaaattgcgattaaaaattgtgatggcgtgcctgccttagtgcgactgctgcgaaaagcacgggacatggatctaactgaagtgatcactggaacactctggaatctgagctctcacgattcaatcaaaatggaaatcgttgaccacgctctgcacgccctcactgatgaggttataatacctcacagtgggtgggagagagaacccaatgaagactgtaaacccaggcatattgagtgggagtccgtactgacaaacaccgcgggatgtctccgcaacgtcagctctgaacgctcggaagcccgaagaaaactgcgggagtgtgacgggttagttgacgccctcattttcattgttcaagccgagatcggacaaaaggatagtgactcaaagctagtggagaactgtgtatgtttgctgcgcaatctgtcatatcaggtccaccgagagataccacaggccgagcgctatcaggaggccgcaccaaatgtcgccaataacacgggcccacacgctgcctcgtgctttggtgctaaaaaaggcaagggcaagaagccaattgaagacccagctaatgataccgttgacttccctaaacgcacaagccccgcacgcggttacgagctgcttttccaacctgaggtggtgcgcatttacatctccctgctgaaggagtcgaagacccctgcaatcctggaggcttctgcaggagctatccaaaacctttgcgcgggacgctggacctacggacggtacatcaggagcgcactgaggcaggaaaaagctcttagtgcaatagccgacctgctgactaacgagcacgaacgcgtggtcaaggccgcttctggggcattgcgaaatctggcagtcgacgccaggaataaggagctcatcgggaagcatgccattccaaatctggtgaagaacttacccggaggccagcagaattcctcctggaacttcagtgaggatacggtgatcagtattctcaacaccattaacgaggtgattgcagagaatcttgaagccgctaaaaagctgcgcgagacccagggaatcgagaaactagtactcattaataagtctggtaaccggtccgaaaaggaggtgagagcagccgctctggtcctccagaccatttggggatataaggagctacgtaagcccctggaaaaggaagggtggaaaaagtctgatttccaggtcaacctgaacaatgcatcaaggagccagtcttctcactcttatgatgattcaacccttcctctgatcgaccgaaaccagaagtctgacaagaaacccgacagagaggagatacagatgagtaacatgggcagcaacacaaaaagtctcgataataactattctacccccaacgagaggggggatcacaatcgcactcttgaccgcagcggggatctgggagatatggaacccttaaagggaactacgcccctgatgcaaaagatttag

SEQ ID NO: 217276 - DNA, 1938 bp, synthetic construct
  misc_feature 1..1938: note = Description of Artificial Sequence: Synthetic coding sequence
  source 1..1938: mol_type = other DNA
atgataggcgaggaggtgccttcagatcagtattattgggctccccttgctcagcacgagcgcggtagtctggcctcacttgattctctgcgaaaaggaggtccaccccctcccaactggagacaaccggagctgcctgaagtgatcgccatgctggggtttcgcctggacgctgttaaatccaacgctgcagcctatctgcaacacctctgttatcgcaatgacaaagtaaagaccgatgtgaggaagctgaagggcattcccgtccttgttggactcctggaccaccctaagaaagaagttcaccttggagcctgcggggctctaaagaatatatcattcgggagggaccaggataacaagatagctatcaagaactgtgacggggtgcccgctctggtccgcttgctgaggaaggcacgggatatggatctcaccgaagtgatcacaggtaccctctggaacctctcctcacacgattccatcaaaatggaaatcgtcgaccacgccttgcatgcactgaccgatgaagttatcatcccgcattccggctgggaacgagagcctaatgaggattgcaagcctcgtcacatcgaatgggaaagcgtgttgacgaataccgccggatgtttgcgcaacgtctcctctgagaggagcgaagcaaggcggaagctgagggagtgcgatggtcttgttgatgccctgatattcatcgtgcaggcggagatcggtcaaaaggactccgattccaagttggttgagaactgtgtatgtctgctgagaaatcttagctaccaggtgcatcgagaaattcctcaggccgagagataccaggaggccgctcccaatgtcgcgaataatactggccctcacgctgccagctgtttcggagctaaaaaaggaaaggacgaatggttctcgcgcggaaaaaagccaatcgaggaccctgcaaacgatacagttgatttccctaagagaacgtccccagcaaggggctacgagctcctgtttcaaccggaggtcgtcagaatctatatctcgttacttaaagaatccaaaactcctgccatcctggaagcgtccgccggagcgatccagaacctgtgcgccggtaggtggacatatggcagatacatacgttccgccctgcgccaggaaaaagctctcagcgccatcgcagacctcctaacaaacgagcatgaaagggtggttaaggccgcaagcggggcattgaggaatctcgccgtggacgctcgtaataaagagctgattggaaaacatgcgattccaaacttagtcaaaaatctcccgggtggacagcagaattcatcctggaatttctcagaagacaccgtaataagcatcctgaacactatcaacgaagtgatcgccgagaatcttgaagccgcaaaaaaattacgggagacccaaggcatagaaaagctggtgttgatcaacaagtctggtaatcgctctgagaaagaggtgcgagccgctgctctggtgcttcagactatttggggatacaaagagctgcgaaaaccactcgagaaggagggctggaagaagagtgacttccaggttaacctgaataacgcatcaagatcccagtctagccactcatacgacgatagcaccctccctttaatcgataggaatcagaagtcagacaagaaacccgacagagaggagatccagatgagtaacatgggctcaaatacaaagtccctagacaataattatagcacacctaatgaacgaggcgatcacaatcgaaccctggacagaagtggcgaccttggcgatatggagccgctcaagggtacgaccccactcatgcaggacgaggggcaggagtctcttgaggaggagttggacgtcctggtgctggacgatgaagggggtcaagttagctacccatccatgcagaagatatag

SEQ ID NO: 217277 - DNA, 2517 bp, synthetic construct
  misc_feature 1..2517: note = Description of Artificial Sequence: Synthetic coding sequence
  source 1..2517: mol_type = other DNA
atgcaggaaccaggccaaattgtcgagacatacacagaagaagatcctgagggggctatgtcagtggtaagcgtcgagactagtgacgatggcaccacacgtcgaacagagactactgtcaaaaaagtcgtaaagacagtaacaacgaggaccgtgcagccagtggccatgggccctgatggactgcccgtagacgcttccagtgtttccaacaattacattcaaaccctgggtcgtgactttagaaaaaacggcaatgggggacctggcccatatgtggggcaggctggcaccgcaacactgcccaggaatttccattaccctccagatggttactcaagacactacgaagatggctatcccggaggcagcgataactatggcagtttgtccagagtgactcggattgaggaaagatatcgccctagcatggagggttacagagccccatcaaggcaagacgtctacggacctcaacctcaggtacgagtgggagggagctcggttgacctgcaccgctttcacccggagccctacgggctggaagatgatcagcgctctatgggatacgatgatttggactatggtatgatgtcggattatggtacagctagacgaaccggtacccctagcgatccacgcaggagattacggagttacgaggatatgatcggtgaggaagtcccctccgaccagtactactgggctcctctggctcaacatgaacgcggatctttagcatctctggattccttgagaaagggtgggcctccgcctcccaactggagacagcccgaactgccagaagtaatcgccatgttggggttccgactggatgccgtgaagtcaaatgccgctgcttatctccagcatctctgctatcgaaacgataaagtgaaaactgatgtaaggaagcttaagggaatccctgtcctggtagggctgttggatcaccccaagaaggaggtacatctgggcgcatgtggggcactgaaaaatattagcttcgggcgagaccaggacaacaagattgctatcaagaactgcgatggggtacctgcactggtgaggctattgagaaaggctcgcgacatggatctgacggaggtgatcacggggaccctctggaatctctcctcccacgactccataaaaatggagattgttgatcacgccttacacgccctgaccgacgaggtcatcattcctcattcaggctgggagcgggaacccaacgaggattgtaaaccacgccatatagagtgggagtctgtcctgacaaacactgccggatgcctgcggaatgtgtcgagcgagagaagtgaggctcggagaaaactgcgggaatgtgacgggctcgtggacgcattgattttcattgtccaggccgagattggccagaaggattcagattcaaagttagtcgagaactgcgtttgtctgttgcgtaacctctcatatcaggtgcaccgcgaaatacctcaggccgagcggtatcaagaagccgctccaaatgtggccaataacacaggacctcatgctgcctcttgcttcggcgcaaaaaaggggaaggacgaatggttttctagagggaagaagccgatcgaagatcctgccaacgacacagtggatttccccaagaggacaagcccggctaggggctacgagctgctgtttcaaccagaggtcgtaagaatttatatatccctgctcaaagagagtaagactccggcaatcctagaggcaagtgcaggagctatacagaatttgtgtgccggtcgctggacatacggcagatacatccggtccgccttgcgccaggagaaagccctctccgccatcgcagaccttcttacgaatgagcatgagagagtggtgaaagcagccagtggagcattgcggaacctcgccgtggacgcgaggaacaaggaattaatcggaaaacacgctattcccaatttggtgaaaaacctacccggtggccagcagaactcttcatggaactttagcgaggacacagtcatttcgatcctcaacaccataaacgaagtgatcgccgagaatttggaggccgctaaaaaattacgtgagacacagggcatcgagaaactggtcctgatcaacaaaagtgggaacaggtcagagaaggaagtgagggccgcagcacttgtcttgcagacaatttgggggtataaagagctgcgcaaaccactcgaaaaagaaggttggaaaaaatccgattttcaagtaaacctgaacaacgcctctcgctcacaatcatctcacagttacgacgactcaaccctacctctcattgacagaaaccagaagtctgacaagaagcccgatcgggaggagatccagatgtctaatatgggtagcaataccaagtctctcgacaacaactatagcacaccaaacgagagaggcgaccacaatcgcactctggaccggtcaggcgatctcggggatatggagcccttgaaaggcactacgcccctgatgcaaaagatctag

SEQ ID NO: 217278 - DNA, 2640 bp, synthetic construct
  misc_feature 1..2640: note = Description of Artificial Sequence: Synthetic coding sequence
  source 1..2640: mol_type = other DNA
atggccaacggtacactcaccagacggcatcaaaacggacggtttgtcggcgatgccgacctggaaaggcagaagttttcagatctgaagctgaacggaccccaggaccacagtcacctgctgtactccactattcccaggatgcaggagccaggacagatagttgagacctacacagaggaagatcctgagggagctatgtctgtggtttctgttgagaccagtgatgatggcaccacaagacgcaccgagacgaccgtgaagaaggtggttaagactgtgacgactcggactgtgcagcccgttgccatgggtccagacggcctgcctgtcgatgcttcaagtgtttcgaataactatatccaaaccctcggcagagacttccgtaagaacggcaacggaggtccaggcccttacgtcggccaggcaggaaccgctacgctcccacgcaactttcattaccccccagacgggtattcacgacattacgaggatggttacccgggtggcagcgacaactacgggtccttgtctcgggtaaccaggatagaggaaaggtacaggcctagtatggaaggctacagggcgccatcccgccaagacgtgtatggcccacagccgcaagtcagggtagggggaagcagcgtggacttacaccgcttccatccagagccttatggactggaggacgaccagcggtctatgggatacgacgatctggactacggcatgatgtcggactacgggacagcacgcagaacagggaccccgtctgatccgaggaggcgcctgaggagttacgaggatatgataggggaggaggttccatccgatcagtattactgggctccactggcacagcacgagcgcggatctctggccagcctggattctttgagaaaggggggaccgccaccacccaactggcgccaacctgagcttccggaagtcatcgccatgctggggttcaggcttgacgctgtgaagtccaatgcagccgcttacttgcagcacctgtgttaccgtaacgacaaggtcaaaacagacgtgcggaaactgaagggtattcctgttctggtgggcctgctggaccacccgaagaaggaggtgcaccttggtgcgtgcggtgctttaaaaaatatctcatttggacgagatcaggacaataagattgcaattaagaattgcgacggagtaccagctctggtgcgattactgcgaaaggcgcgagacatggatctgaccgaggtgatcactgggactctgtggaatttatcatctcacgattctatcaagatggaaattgtggaccatgcactgcacgcattgacggacgaggtaatcattccccacagcggatgggagagagaaccaaatgaggactgtaaacccaggcatatcgagtgggaaagtgttctcaccaacactgccggatgccttaggaacgtttctagtgagagaagcgaggccagacgaaagttgagagagtgcgacggactcgtcgacgcactaatcttcatcgtgcaagcagagatcggacaaaaagattctgacagcaaacttgtggagaactgcgtgtgcttattgcgcaacctgagctaccaagtccaccgggagattccgcaggcggagcggtaccaagaggccgctcctaatgtggctaataataccggccctcacgcagctagctgcttcggcgcaaaaaagggcaaaggcaaaaaacctatcgaggatcccgctaacgacacagtggattttcctaagaggacgagcccggcacgcggttatgaactcctgttccaacctgaggtagtgcggatctacatcagcctgttgaaggagtccaagacccccgctattctggaggctagcgccggagccatccagaatctgtgtgccggtcgatggacttatggacggtatatcaggtcggcgctgagacaagagaaggcactgtccgccatagctgaccttttgactaatgagcatgagagagttgtcaaagccgcttctggagctctccggaatctggcggtagacgctcggaacaaggaacttattgggaaacatgccatacctaatctggtgaaaaatctacccggtggtcagcagaattcttcctggaatttcagcgaagataccgtgatttccatcctgaacacaattaacgaggtgatagcggagaacctggaagccgcaaagaagcttcgtgagacccagggcattgaaaagctcgtgcttattaataaatcgggaaaccgcagcgaaaaggaggtgcgggcagctgcgctggttttgcagacaatctggggatacaaagaactccggaaaccactagaaaaggaggggtggaagaagagcgacttccaggttaacttaaataacgctagtcgttcccagtcatcccactcttacgacgactctactctccctctcatcgatcgcaatcagaagtctgataagaaaccagaccgggaggagatccaaatgagtaatatgggatccaacacaaagtctcttgacaacaactactctacccccaatgagagaggggaccacaacaggacactagatcgaagtggggacttgggggacatggagccgctcaaggggacgaccccactgatgcagaagatctag

SEQ ID NO: 217279 - DNA, 2640 bp, synthetic construct
  misc_feature 1..2640: note = Description of Artificial Sequence: Synthetic coding sequence
  source 1..2640: mol_type = other DNA
atggccaatgggacattgacaagaaggcaccaaaatggaagatttgtgggtgatgcagatcttgagcggcagaagttctctgaccttaagctgaatgggcctcaggaccattctcatctgctttacagcaccattcccagaatgcaggaacccggacagattgttgagacttacacggaggaagatcccgagggggcaatgagcgtggtctcagtcgagaccagcgatgacggaactacacgcagaaccgagacaacagttaaaaaagtagtaaagacggtgaccacaaggaccgtgcagcctgttgccatgggtcccgatggactacctgtggacgcatccagcgtcagcaacaactacatccagactctaggtcgcgattttcgcaaaaatggaaacgggggtcctggaccatacgtcggccaggccggaacagcaacattgccaaggaattttcactacccaccagatggttattcacggcattacgaagatgggtaccccggtggtagcgacaattacggttctctgagcagagtgacgcgtatcgaggagcgctaccgaccctctatggaaggctatcgggctccatctcgccaagacgtttacggaccacagccccaggttcgcgtcgggggatcgtccgttgacctgcatcggtttcacccagaaccttatggcctagaagatgatcagcgctctatggggtacgacgatctggattacgggatgatgagtgattacggcactgcacggaggactggcactccttctgatccgaggcgcaggcttagatcatacgaggacatgattggtgaagaggtcccatccgatcagtactattgggctccactcgctcagcacgagcgcggaagcctggcatccctggattcactgcggaaaggcggaccccctccacctaactggcgtcagcccgagctgccagaggtgattgcgatgctaggttttagactggacgctgtgaaatccaacgctgcagcctatttgcagcatctgtgctatcgaaacgacaaagtgaagaccgacgtgagaaagctgaaaggaattcccgttttggtgggcctgttggatcacccgaagaaggaggttcatctgggagcctgcggggcattgaagaacatatcattcggaagagaccaagacaataagatagctattaagaactgcgacggtgttcccgctttggttagactgttacgcaaagctcgtgatatggacttaaccgaagtgataaccggtactctctggaacctgagctcccatgattcgattaaaatggagattgtcgaccatgctctccatgcccttaccgacgaagtaataattccacactctgggtgggagcgtgaaccaaacgaagactgtaagccgaggcacattgagtgggagtctgtactgaccaacaccgccggatgcctgcgaaacgtgtcttccgagagatcagaagcgaggaggaaactgagagaatgcgatggtctcgtcgatgccctcatctttatcgtgcaagctgaaatcggccagaaggactccgattcgaagctcgtggagaactgtgtctgtctcctcaggaacttgtcatatcaggttcaccgagagatcccacaggcagaaaggtaccaggaagctgcgcctaacgtcgccaataatacaggccctcacgctgccagttgttttggagccaagaaaggaaaaggcaagaaacccatcgaggatcctgctaatgacacggtggattttcccaaaaggacctcgcccgctaggggctatgaactgttatttcaaccagaagtcgttcgcatttatatctcgctactgaaggagagtaaaacccccgctatcctggaggcgtcagctggcgcaatccaaaatctttgcgccggaagatggacatatgggagatatatcagatctgccttgcgacaggagaaagccctgtccgccatcgcggatcttcttaccaatgagcacgaacgcgtggtcaaagctgcctccggagcgctccgcaatctggcggtggacgctaggaataaggagctcatcgggaagcacgccataccaaacctggtcaagaacttgcccggtggtcaacagaacagcagctggaattttagcgaggatacggtgatctctatcctgaatactataaatgaagtgatagcagagaatctggaagccgctaaaaagctgagagaaactcagggaattgagaaacttgtgctgatcaataagtccggaaatcgcagcgaaaaggaggtgagggcagctgccctcgtgctgcagacgatatgggggtataaagagctgagaaaaccactggagaaggagggatggaagaaatctgactttcaggttaatctcaataatgcctcgaggtcacagtcttcccactcttacgatgactctacactgcccctcattgatcgcaatcaaaaaagtgataagaagccagaccgcgaggagattcagatgtcaaacatggggtcgaataccaaaagtctggacaacaattattccactcccaatgagcgtggagaccacaataggacacttgatcgttccggcgacctgggagatatggagccactgaagggaaccactcctctgatgcaaaaaatttag

SEQ ID NO: 217280 - DNA, 2499 bp, synthetic construct
  misc_feature 1..2499: note = Description of Artificial Sequence: Synthetic coding sequence
  source 1..2499: mol_type = other DNA
atgcaggagcctggacagatagtggagacttacaccgaggaagatccagagggcgcaatgtctgttgttagtgttgagacctcggacgatgggacaacccggaggactgaaacaacagtgaagaaagtggttaagactgtgaccaccaggaccgtgcagcctgttgcaatgggcccagatggcctgcctgtggatgcttcttcagtgtccaataattacattcagacattggggcgagactttcgcaagaatggcaacggaggccctggtccgtatgtcgggcaggccggaacagcaactttgcctcggaatttccactaccctcctgacggatactcccggcattacgaagacgggtacccgggaggttccgacaattacggaagcctgtctcgggttacaaggatcgaggagagatatcggccaagtatggaagggtatagggcgccatcacgccaagacgtgtatggacctcaaccccaggtccgcgtggggggatcgtcagtggacctgcaccgctttcaccctgagccctacggcctggaggatgaccagcgcagcatgggatacgatgacctagattacggcatgatgagtgactacggcaccgcaaggcgcactggcacccctagcgatcctaggcgcaggctccggtcctacgaagatatgattggcgaggaagtacccagcgatcagtactactgggcccctctggctcagcacgagcggggtagcctagcatcactggacagtctgcggaaagggggacccccaccaccaaactggagacagccagagctccccgaagtcattgccatgctgggatttcgcctcgatgcagtaaagagtaacgctgcggcatacttacaacatctgtgctacagaaatgacaaggtcaagaccgatgttagaaagcttaaaggcattcccgtgttggtgggtttgctagatcaccctaaaaaggaggtgcacctgggtgcttgtggtgctctgaagaacattagttttggaagagatcaggacaataaaatagctataaagaactgcgacggcgtgccggcactcgtacgactgctgcgtaaggctcgggacatggacctcacagaagttatcacgggcaccctgtggaacttgtctagccacgacagtattaagatggagattgttgatcacgccctgcacgccctaactgacgaagtgattattccacactcaggatgggaacgagaacccaacgaggactgcaaaccccgacacattgaatgggaaagcgtgcttactaatacagcaggttgccttcgcaatgtgagcagcgagagatctgaggctcgcaggaagttgcgcgagtgtgatggtctggtggatgccctcatttttattgtacaggcagagatcggccagaaggattctgactctaaactggtggagaactgcgtgtgcctgttgcgcaatttaagctaccaggtgcatcgggaaatcccgcaggcggaacgataccaagaggctgcacccaatgtggccaacaacacgggaccccatgctgcctcatgcttcggggctaagaaaggcaaaggtaaaaagccaatagaggatccagccaacgacaccgtggatttccccaaacgaacgagcccagctaggggctacgagttactgttccagcccgaagttgttcggatctatattagtctactgaaggagtcaaaaaccccggcaatccttgaagcctctgcgggtgccatccagaatttgtgtgctggcaggtggacatacgggcgatatataaggtccgccttgagacaggagaaagccctaagtgcgatcgccgacttgttaaccaacgagcacgagcgggtggtgaaagctgccagtggcgctctcaggaacctcgctgtagacgcgcgtaataaagagctgattggcaagcacgcgattcctaacctggtgaagaacctgccgggaggccagcagaattcatcctggaatttttccgaggacaccgtcatctctatccttaacactatcaacgaagttatcgccgagaacctggaggcagccaagaaactgagggagactcagggtatcgagaagctggtgctgattaacaaatcagggaatagaagcgaaaaggaagtgcgcgctgccgctctcgtccttcaaacaatctggggctacaaagaactcaggaagcccctggaaaaagaaggatggaaaaagtctgatttccaggtcaacctgaacaatgcgtctcgctcccaatccagtcacagctatgacgattcaacactcccccttatcgatagaaaccagaagtccgacaagaaacctgatagagaggaaattcagatgtctaatatgggatccaacactaaatcactcgataataattactctacccctaacgaacgcggtgatcataatagaactctggaccgctcaggcgatctcggcgatatggaacccctgaaaggtactactcctctgatgcagaaaatttag

SEQ ID NO: 217281 - DNA, 390 bp, synthetic construct
  misc_feature 1..390: note = Description of Artificial Sequence: Synthetic coding sequence
  source 1..390: mol_type = other DNA
atggccaacggaacacttacccgcagacatcagaacggcagattcgtaggcgacgctgatttggaaagacagaaattctccgacctaaagcttaatggccctcaggaccactcccacttgctgtactccaccatccccagaatgcaggagccgggtcaaattgtcgaaacttacactgaagaggacccggagggcgcaatgtcagtggtgtcggtggagacctccgatgacgggactacaaggagaaccgaaaccactgtaaaaaaagttgttaaaacagtgaccacacgaaccgtgcagcctgtcgccatgggacccgacggactcccagtcgacgcgtcatctgtatccaacaattatatccaaacactggggagagacttccgctag

SEQ ID NO: 217282 - DNA, 2586 bp, synthetic construct
  misc_feature 1..2586: note = Description of Artificial Sequence: Synthetic coding sequence
  source 1..2586: mol_type = other DNA
atgcaggaacctggccagatcgtggaaacatataccgaagaagacccagagggagccatgtccgtcgtatctgtggagacttccgatgatggaaccaccaggcggactgaaactaccgtgaagaaggtcgttaaaacggtcaccacccggaccgtccagcccgtggccatgggcccagatggtttgcccgtcgatgcctcgtctgtatcaaacaactatatccagactttaggacgggactttcggaagaacggaaacgggggtcccggaccatacgtgggccaggcaggcaccgctacgctgcccaggaattttcattatcctccagatggttactcccggcattatgaggacggatatcctggcggtagcgacaattatggcagtctttctcgagtgactagaatcgaggagaggtaccgaccttctatggaaggatatcgtgcgcctagccggcaggatgtgtatgggcctcagccccaagtgagggttgggggttcatctgtcgatctgcaccgctttcatccagagccttacgggctggaagacgatcagaggagcatgggatacgatgacctagactacggcatgatgagcgattacggcaccgccaggaggacaggtacaccctccgacccacggaggaggctgaggtcctatgaggatatgatcggcgaagaggtaccctcagatcagtattactgggcaccacttgcccaacacgagaggggatctctggccagcctggatagtctcagaaagggtggccctcccccaccaaactggcgtcagcctgagctaccagaggttattgccatgttaggctttcgtctcgacgcagtgaaatcgaacgctgcagcctacttgcagcatctgtgttatcgcaacgacaaggtgaaaacggacgttagaaagttgaagggaatccccgtgctcgttgggctgctggatcatcccaaaaaggaggtgcatttaggggcatgcggggctttgaagaatataagcttcggacgagatcaggacaacaaaatcgcaataaagaattgcgacggggtgcctgcactggtaagactccttcggaaggccagggatatggacctcaccgaagtgatcacaggaactctgtggaatctcagttcccacgacagtattaaaatggaaatagtggaccacgcactgcatgccttaactgatgaggttatcatcccgcactccggctgggagcgtgagcctaatgaggattgtaaacctcgtcacattgagtgggaaagcgtgttaaccaatactgcaggttgccttcggaacgtaagttcagaaaggagcgaagcaaggcgcaagttgagagaatgtgacggtctggtggatgccctgatttttatcgtgcaggccgagattggtcaaaaggactccgattctaaactcgttgagaactgcgtgtgcttgctcaggaacctgagctaccaggttcatagggagatcccacaagccgaacgctaccaagaggcagcacctaatgtggcgaataatacagggcctcatgccgcttcgtgtttcggcgctaagaagggcaagggcaaaaagcccatcgaagaccccgctaacgatactgtcgacttccccaagcgcaccagcccagctcgtggttacgagctgctgttccagccagaagtggtgcggatatatatttccctgctcaaagagagcaagacccctgcgatcctggaggccagtgctggagcaattcagaatctttgtgcagggaggtggacctacggacgatatatcaggtccgccttaagacaagagaaggctttgagcgccatcgctgacctcctgactaacgaacacgagcgggtggtgaaggcagccagcggagctctgagaaacctggccgtggacgcacgaaacaaggaactaatcggtaagcatgccatcccgaatctcgtgaaaaacctacccggtggccaacaaaacagttcttggaatttttccgaggataccgtcataagtattctaaatactatcaatgaggttatagctgagaatctcgaagctgcaaagaagctccgcgaaacacagggcattgaaaagctggtcctaatcaataaatctggcaacaggtctgaaaaggaagtgcgcgcagccgctttagtactccagacaatttggggctacaaagaactgcgcaaaccccttgagaaggaggggtggaagaagtctgattttcaagttaacctgaacaatgcttcacgaagccagagttcccactcctatgatgattctacgctgccgctgatcgaccgcaaccaaaagagtgataagaaacctgacagagaagaaattcagatgtcaaacatggggagcaatactaaatcattggataacaactactcaacccccaacgagaggggggatcacaaccgaactcttgacaggtctggagaccttggcgacatggaacccctgaagggaacaactcccttgatgcaggacgaggggcaagaatctctagaggaagaactggatgtcctggttctcgatgatgagggaggccaggttagctatccaagtatgcagaagatctag

SEQ ID NO: 217283 - DNA, 2658 bp, synthetic construct
  misc_feature 1..2658: note = Description of Artificial Sequence: Synthetic coding sequence
  source 1..2658: mol_type = other DNA
atggctaatggaactctgacccggaggcaccagaatggcagattcgtgggagacgccgaccttgagaggcagaaattcagcgatcttaaactgaacggaccacaggaccattcacatctgttgtatagtacaatcccacgtatgcaagagccgggtcagatcgtcgaaacttacactgaagaggatcctgagggcgcaatgtccgtcgtgagtgtggagacctcagacgatgggacaacccgcaggactgagacaacggtcaagaaagttgtgaaaactgtaactaccaggaccgtgcaacccgtggctatggggccagatggcctacctgttgatgcctctagcgtgtcaaacaactacatacagacgcttgggagagacttccgaaaaaatggaaacggagggcctggaccctacgttggccaggcgggaaccgctacactgcctcgtaacttccactaccctcccgacgggtattctcggcattacgaggacggttatcctggcggaagcgacaactatggaagcttgtctagggtaacacggatagaggagaggtatcgccctagtatggaggggtacagggctccttctcggcaggatgtgtatggtccccagcctcaggtgcgggttggaggctcgtctgtcgacctgcacaggtttcacccggagccatacggcctggaagatgaccagcgatccatgggatacgacgacttagactatgggatgatgagtgattacggcactgcccgaaggaccggcacaccttccgaccctcgcagacgtcttcgcagctatgaagatatgatcggtgaggaggtcccgtccgatcaatattattgggcgcctctagctcaacacgaaagagggtctctggcaagcctggatagtctgcggaaaggcggacctcctccacctaactggcgacagcctgagctcccagaagttatagcgatgttgggattcaggctggacgccgttaagtctaacgctgcggcttacctccaacacttatgttacaggaacgataaagttaagaccgatgtccgtaaacttaaagggatccccgtgctcgtggggctgctggatcatccgaagaaggaggttcacttgggtgcctgcggggctctcaaaaacatctccttcgggagggaccaggataataagatcgcaatcaaaaattgtgacggtgttccagcccttgtaaggctcctgcggaaagccagggacatggatttgacggaggtgattactggtacactctggaatctttccagtcatgattctattaagatggagattgtcgatcacgccctgcatgcactgaccgatgaggtaatcatcccacacagtggctgggaacgggagccaaacgaggactgcaaaccaaggcacatcgagtgggaaagtgttttaaccaacactgccggatgtctcagaaatgtctcgtctgaacggtctgaggccaggagaaaactgagagagtgcgacggcttggttgatgccctgatctttatcgtccaggctgagatcggacaaaaagattccgatagcaaattggtggagaactgcgtgtgtctactgaggaacctcagctaccaggtgcaccgagaaataccccaggcagaaaggtaccaggaagccgcacccaacgtggcaaataatacaggtccacacgccgcaagttgctttggtgccaaaaagggaaaagacgaatggttctcccggggaaagaagcccatcgaagaccctgcaaatgacactgtggacttccctaagcgcacatcccctgccagagggtacgaattactctttcagccagaggttgtcagaatctacataagcctgctaaaggaaagcaagactcctgcaattctggaagcatctgccggagctattcagaacctctgtgccggacgatggacttacggacgatacatcaggtcagccctaagacaggaaaaggctctttctgccatagccgacctcctaacaaatgaacacgagcgcgttgtcaaagcagcctcaggtgccttgcggaacctggccgttgacgctcgcaacaaagagctgataggcaaacatgcaatcccgaacctggtcaaaaacctgcctggaggccagcagaatagttcttggaatttcagcgaggatacagtcatcagtatcctcaatactatcaacgaagtaatcgctgagaacctggaggccgcaaaaaagttgagggaaactcagggcatcgagaagctcgtcctcataaataaaagtgggaaccggtctgagaaagaggttcgagcagctgctctcgttctccagacgatatgggggtataaggaattacgtaaacccctcgagaaggagggctggaaaaagagcgattttcaagttaacctgaacaatgcctcccggtctcagagcagtcattcttacgacgactctactctcccgctgatcgacagaaaccagaaatccgacaaaaagcccgatcgggaggagatacagatgagtaacatgggctctaacacaaaatctttagataacaattacagtacccccaacgagcgcggagaccacaacaggacattagaccgtagtggcgatttaggggacatggaacctttgaaaggaacaacaccccttatgcagaagatttag

SEQ ID NO: 217284 - DNA, 1920 bp, synthetic construct
  misc_feature 1..1920: note = Description of Artificial Sequence: Synthetic coding sequence
  source 1..1920: mol_type = other DNA
atgatcggagaagaagtcccgagcgaccagtattactgggctcccttagcccagcacgagagggggtcactggcctcactggacagcttgaggaaagggggacctcctcctcccaattggagacagcctgaactgcctgaggtgatcgccatgctgggctttaggcttgacgcagtgaaaagcaacgcggcagcctatctgcagcatctctgctatcgcaatgacaaggtgaaaaccgatgtgcggaagttaaagggcatccctgtgctggtgggccttctggaccatcccaaaaaagaggtgcatctcggggcttgcggcgcactgaaaaacatctcctttggaagagatcaggacaataaaatcgccattaaaaattgtgacggggtgcctgccctggtacggctgctgcggaaagccagagatatggacctcaccgaggtaattacgggcaccttatggaatctgtcgtcacatgatagcatcaaaatggagatcgtagaccacgcccttcacgccctgacagacgaagtcattatccctcactccgggtgggaacgcgaaccaaatgaagactgcaaaccaagacatattgaatgggagtctgtgctgacgaacactgctggctgtctccggaatgtgagtagcgagagatccgaagctaggcgaaaactgcgggagtgcgatgggctggtggatgccctgatctttattgttcaagccgaaatagggcagaaggactctgattccaaacttgtcgagaattgcgtgtgccttttgcgcaatctgtcataccaagtacacagggaaatcccccaggctgagcggtaccaggaagcagcgcctaatgtagcgaataataccggacctcatgcagcatcttgcttcggggcaaaaaagggcaaggggaagaaacccatcgaggacccagcgaacgatacagtcgactttccaaaaagaacaagccctgcacgtgggtacgaacttctgttccagccggaagtcgtgcgtatatacatatcacttctcaaggaaagcaaaacacctgccatcctggaggccagtgccggagcgatccaaaacctgtgtgcaggacggtggacttatggacgctacatcagaagtgctctgagacaggaaaaggctctgagcgctattgccgatcttctcaccaacgaacacgaacgcgtcgtgaaagccgcttctggcgctctgcggaatctagcagtagacgcgagaaacaaggagttgataggcaagcacgccatacccaatttagttaaaaaccttcccggagggcagcagaattcatcatggaatttctctgaagatactgtaatttccatactaaacacaatcaacgaagtgatcgcggagaatctggaggccgcaaagaaactccgggagacccaaggaatagagaagttggtcctcataaacaagtccggcaaccgctccgaaaaggaggtgcgagctgcggcactggtgctgcaaacaatttggggatataaagaactcaggaagcctctcgagaaggaaggatggaagaaaagtgatttccaggtgaacctcaacaatgccagccgctctcagtctagccactcttatgatgattcaacattacctctgattgacagaaatcagaagagtgataaaaagcccgatcgtgaggaaatccagatgtctaacatggggtccaatacaaagtccctagataacaactacagtactccaaatgagcgaggcgatcataatcggaccttggaccggagtggcgatctgggcgatatggaaccattaaagggtacgacacccctcatgcaggatgaggggcaagagtcactcgaggaggagctcgatgtgctggtgctagatgatgaggggggtcaggtgtcttacccctccatgcagaagatctag

SEQ ID NO: 217285 - DNA, 2499 bp, synthetic construct
  misc_feature 1..2499: note = Description of Artificial Sequence: Synthetic coding sequence
  source 1..2499: mol_type = other DNA
atgcaggagccaggtcagatagtcgaaacatacactgaagaggaccccgaaggagccatgagcgtggtcagtgtagagacctctgatgatggaacaacacggcgaactgaaacgactgtgaaaaaggtcgtgaagacggtgacgacacgcacagtgcagccagtagctatgggcccagacggattacccgtggacgcaagtagtgttagtaataattacatccaaaccctggggagggatttccgcaagaacggcaacggcggtcccggaccttatgttgggcaggccggtaccgcaaccctacctcgcaatttccattacccccctgatgggtattcgcggcattatgaggatgggtaccctggaggtagtgataattacggatctctgagccgtgtgactcgcattgaggagcgatatcgcccatctatggagggctatagagccccatctcggcaggacgtgtatggacctcagccccaagtgagggtgggaggctcctccgtcgatctgcacagatttcatccggaaccctacggactagaggacgatcagcggtcaatgggatacgacgacctggattacggcatgatgagcgattatggcactgcccgacgcacaggtacgcccagcgatcctcggagaaggctccggtcgtacgaggacatgattggagaggaagtgccgagcgatcagtattactgggcaccactggcgcaacatgagagggggtcactggccagcctggactccctgcgcaaaggaggcccacctccaccgaactggcgtcaacccgaactgccggaggtgatcgcaatgctcggatttcggctggatgcagtaaaaagcaatgcagcggcttacctccagcacctttgttatcgcaacgataaagtaaagacggacgttcgcaaactcaaaggaattcctgtgctggtgggtctgcttgaccatccaaagaaagaagtacacttgggagcctgtggagccctgaagaatatctccttcggcagggatcaggacaataaaatcgccattaagaactgcgacggcgtacccgctctcgtacgcctgctgcgcaaggcaagggacatggacctgacagaagtaattaccggtacactgtggaacctgtcctcccacgacagcattaagatggagattgtggatcatgccctgcacgcactgaccgacgaagtaatcattccacattcaggctgggagagggagccaaatgaggattgtaagccgaggcacatcgaatgggagtcagttcttacgaacactgcagggtgcctgcgaaacgtatcatccgaaaggtcagaggctcgtcgcaagcttagagagtgcgacgggctcgtggatgcgctgatcttcatagttcaggctgagattggccagaaggattcggactctaagttagtggagaactgtgtgtgtcttctgcggaacctgagttaccaggtgcaccgcgaaataccccaggccgagcgttaccaagaagctgcacctaacgtagcgaacaatacggggcctcatgctgccagctgcttcggtgcaaaaaagggtaagggtaaaaagcctattgaggatccggcaaacgataccgtggacttccccaagaggacctcaccagcacgcggatatgagctcttgtttcaacccgaagtggtacggatttatatttcccttttaaaagagtccaaaacgcctgcgatcctggaggcaagcgcgggagctatacaaaacttgtgcgcgggtcgatggacatacgggagatacatccgcagcgcactgcggcaagaaaaggccctctcagccatcgcagacctgttaactaacgagcacgagcgcgttgttaaggccgcttccggcgctctgcgtaacctcgctgtggacgcacgaaacaaagaactaatcggaaaacatgcaatacccaatttagtaaagaacttgcccggagggcagcagaatagttcctggaacttctctgaagatacggtcatttccatattaaacactataaatgaggtgatagccgagaacctggaggccgctaagaaactgcgggaaacacaaggcattgaaaagcttgtgttgataaataagtccggtaacagaagcgaaaaggaagttagagccgcagcactggtcctgcagaccatctggggctacaaagaactaaggaaaccgctggagaaagaaggatggaagaaaagcgacttccaggtcaacctaaacaatgcctcacgcagccaaagctcgcactcttacgacgacagtaccctgcccctaattgatcggaaccagaagagcgacaagaagcccgatcgtgaggagattcaaatgagcaacatgggttctaacacaaagagcttagacaacaattactcaactcccaatgagaggggcgaccataatcgcacattggaccgatcaggcgatctcggagatatggaaccgctaaaggggactaccccgttgatgcagaagatctag

SEQ ID NO: 217286 - DNA, 2499 bp, synthetic construct
  misc_feature 1..2499: note = Description of Artificial Sequence: Synthetic coding sequence
  source 1..2499: mol_type = other DNA
atgcaggagccgggtcaaattgtagagacttatactgaagaggacccggagggcgctatgagcgtggtgtcagtggagacaagcgacgatggaacaacgaggagaaccgagaccactgttaagaaagttgtgaaaactgtcacaacacggacggtccagcctgtggccatgggaccagatggactgccggtcgacgcttcgtcagtgtctaacaattatattcagacactcggcagagacttccgaaagaacggaaacggcggacctggtccatacgtgggccaggcgggaactgctacgctgcccaggaacttccattatcccccagacggctatagtcgccactatgaggatggctatcccggtggcagcgataattacgggtcactgagccgagttaccaggattgaagagcgttaccgaccatccatggagggctaccgggcacccagccggcaggacgtgtatggaccgcaacctcaggtgagggtggggggttccagtgtcgacctgcacaggttccatcccgaaccctatgggcttgaagatgaccagcgaagcatgggctacgatgatcttgattatggtatgatgagcgattatgggacggctcgtagaaccggcacgccctcagaccctagacggaggctccggagttatgaagatatgatcggagaagaagtgccgtcggaccagtattactgggctcctctcgcccagcacgaaagaggatcattggcttccctggatagtctgagaaaaggcggtcctccccctcccaactggagacaacccgagctaccggaggtcatcgccatgctgggttttagattggatgccgtaaaatccaatgcggctgcttatctacagcacctctgctaccgcaatgacaaggtcaaaacggacgtccgaaagctcaagggcatcccggttctggtcgggttgctcgatcatcctaaaaaggaagtacacctgggtgcttgtggcgctctgaaaaacatcagcttcggcagagatcaggacaataagattgccattaaaaattgtgatggcgtgcccgcactcgttcgcttactgagaaaggccagagacatggacctcaccgaagtgattacaggaacactctggaatctgtccagtcatgactctatcaaaatggaaattgtagaccacgcactccacgcactgactgatgaagtcatcatcccccactctgggtgggagcgcgaacccaatgaagactgcaagccccgacacattgagtgggagtccgtgctgacaaacaccgccggatgtctgcgcaatgtttcctccgagagatctgaggcccgaaggaagttaagggaatgcgatggtttagtcgatgccctcatattcatcgtgcaagctgagatagggcagaaagattcagactcaaaactggttgagaattgtgtttgtcttctgagaaacctgagttaccaggtgcatcgggagataccgcaggcagaacgatatcaggaagccgctcccaatgtggccaacaataccggccctcacgccgcttcatgtttcggggcaaagaaaggaaaggggaagaaaccaatagaggatccagcaaacgataccgtagacttcccgaaacgcaccagtcctgctagaggatacgagctcttgttccaacccgaagtggttagaatttatatcagcttacttaaagagtccaagactccggcaatccttgaggccagtgccggagcaatccaaaatctttgcgctggtcgctggacatacggcagatacattcgcagtgccctccgacaggagaaggcactgtctgcgattgctgatctgttgaccaacgagcacgagagggtggtgaaggctgccagcggagcgttaagaaatctggccgtggacgccaggaacaaagaactgattggcaagcacgcgatccccaatttagtaaagaaccttccagggggacagcagaactcttcttggaatttttccgaggatacagtgatcagcatacttaatactattaatgaggtgatcgctgagaaccttgaagccgctaagaaacttcgcgagactcagggcattgagaagttagtcctgatcaataagtccggcaatcgctctgaaaaagaggtccgcgctgcagctctcgtcctgcagacaatctggggatataaggaactgaggaaacctttagagaaggagggctggaaaaaaagtgattttcaagtgaatcttaacaacgcctctaggagccagtcaagtcattcctacgatgatagcacccttcccttgattgacagaaatcaaaagagcgataaaaagcccgaccgcgaagagattcagatgagcaacatgggctctaacacgaaaagcttagataacaactactccaccccgaacgaacggggagatcacaataggactttagatcggtccggcgaccttggagatatggaacctcttaagggcacaacaccactaatgcaaaagatctag

SEQ ID NO: 217287 - DNA, 2640 bp, synthetic construct
  misc_feature 1..2640: note = Description of Artificial Sequence: Synthetic coding sequence
  source 1..2640: mol_type = other DNA
atggctaacggcaccctcacacggaggcaccagaatggacggtttgtgggggatgctgatctggagaggcagaaattttcagacctcaagttgaatggacctcaagaccatagtcacctgctgtattcaactattcccagaatgcaggagccgggacagattgtggagacgtataccgaggaagatccagagggcgcaatgtccgtagtctctgtcgagacaagcgatgacggcacaacccggaggacggagaccacagtgaaaaaagtggtcaagactgtcaccacccggaccgtgcagccggtcgcaatgggacccgatgggctgcctgtggacgcatcatcagttagcaacaactatattcaaactctcggccgagactttcgtaaaaatggaaatgggggacctggcccatacgtcggacaggccggaacagccaccctgccccgaaacttccactacccgcctgatggctattctcgccactatgaggacggatacccaggcggaagcgataactatggatccttatcaagggttacccgtatcgaagagagatatcgaccctcaatggagggttatagggctccatcaagacaggacgtatacggaccgcaacctcaggtacgtgttgggggaagctcggtggatctgcatcgttttcaccccgaaccctacggcctcgaggacgatcagaggtccatgggctatgacgatctcgactatggaatgatgagcgactatggaaccgccagaaggaccgggactccttctgatccgagacgcaggctgcggtcgtatgaggatatgattggagaagaggtaccctccgatcaatactattgggctcctttagctcagcacgaacgcggttctcttgcctctctcgatagcttacgtaagggcggtccacctcctcctaattggcggcaacctgaactcccagaagtgatcgctatgcttgggtttaggctcgacgctgtgaaaagtaatgcggctgcctacctacagcacctgtgctaccgcaacgataaagtgaaaaccgacgtacggaagctcaagggtatccctgtgttagttgggctgctggatcaccctaaaaaagaggtgcacttgggagcttgtggcgctctgaagaatatatccttcggtcgcgaccaggataataagatcgccatcaagaactgtgatggtgtgcctgcgttggtcagactgcttaggaaagcgagagacatggacctgactgaggttattaccggaactctgtggaatctttcttcgcacgacagcatcaagatggagatcgtcgaccatgccctgcacgcgttgacggacgaagtcatcataccacacagcggctgggagagagaacctaatgaggactgcaagccacgccacatcgagtgggagagcgtgttgaccaacacggctggatgtcttcgaaacgtctcaagtgaacggtcggaggcccgacggaaactccgcgagtgcgacggcctggtggacgcactaatatttattgttcaagcagaaatcggccagaaagattctgattctaagttggtggagaattgtgtgtgtctactgaggaatctatcatatcaggtacacagggagattcctcaggctgagcggtatcaggaagcagctccaaatgtggcaaataacaccggaccgcacgctgcctcatgcttcggggcaaagaagggtaaggggaaaaaacccatagaagaccccgctaatgacactgtcgactttccaaaacggacttcccccgctaggggctatgagctgctttttcaacctgaagtcgtgaggatttacatctcccttctcaaagagtcgaaaacaccggctattctggaggccagtgcaggcgctatacagaacctgtgcgcgggacgctggacctacggcaggtacatccggagcgccctgagacaggaaaaagcactgagtgcaatcgccgatctgttaaccaatgagcacgagagggtcgtcaaagctgccagtggcgctctgcgcaacctggcagtcgacgcgagaaacaaagagctgatcgggaagcatgctattcctaacttggtgaaaaacctgcccggaggccagcagaattccagctggaactttagtgaggacacagtaatttccattctgaataccatcaatgaagtgatcgctgaaaatcttgaggccgcaaagaaactgcgtgaaacacagggtattgagaagctggtccttattaacaaatccggaaacaggagtgagaaggaggtacgcgcagcagcgttggtcctccagacaatctggggttataaggaactccgtaagccactcgaaaaggaggggtggaaaaagagcgacttccaagtcaatcttaacaatgctagccgatcgcagtctagtcactcgtatgatgactccaccctgcccctaattgatcggaatcagaagagtgataaaaagccggaccgggaggagatccagatgtccaacatgggctccaacactaagagcctggataataattacagtacccccaacgagcggggtgaccataacaggacactcgatcgttccggtgacttgggcgacatggagcctctcaagggcacaacgcccctgatgcagaaaatttag

SEQ ID NO: 217288 - DNA, 2523 bp, synthetic construct
  misc_feature 1..2523: note = Description of Artificial Sequence: Synthetic coding sequence
  source 1..2523: mol_type = other DNA
atgcaggagcctgggcaaatcgtagagacctacactgaggaagatccagagggcgctatgagcgtggtgagcgtggagaccagcgacgacgggacgacaaggcgaacagagacaactgtcaaaaaagtggtgaaaaccgtgactacaaggaccgtgcaaccagttgccatgggtccggatggattgcccgtggacgctagttcggtgagcaataattatatccagaccctcggacgagactttcgcaaaaatggcaacggtggtccaggtccctacgtggggcaagccggtaccgctactctaccaagaaacttccactatcctcccgatgggtattccaggcattatgaggacgggtacccagggggatcagacaactatggatcattgtcgcgggtgacgcggatagaggagagatacagacccagtatggagggctacagagctccctctcgccaagatgtgtacgggcctcagccacaagtgcgagtcggcggatcttctgtggacttacaccgattccatcctgagccatatggtttggaggacgatcagcgctcgatggggtatgatgatcttgattacggtatgatgtccgattacggcacagcaagacggactgggacacctagtgatcccagaaggagactacgctcatacgaagatatgattggcgaagaagtgccgagtgaccagtattactgggcgccactagctcagcacgagcgtggctcacttgctagtctggattcattacgaaaaggaggcccacctccacccaattggcgccagccagaacttcctgaggtgattgctatgctagggttcagactggatgcggtcaagtccaatgccgcagcatatctgcagcacctgtgctacagaaatgataaagtcaagacagacgtcagaaagctgaaaggcattccagtccttgtgggcctcctggaccatccaaaaaaagaagttcacctcggagcatgtggcgcactgaaaaatatctctttcggacgggaccaggataataaaatagccatcaaaaattgtgacggggtgccggctctggtaagattgctgcgtaaagctcgggacatggatctgaccgaagtgattaccggtacgctgtggaacctcagcagtcacgattctataaaaatggagatcgtggaccacgccttgcatgcccttaccgacgaggtgatcattccccactctggatgggagcgcgagcctaatgaagattgtaagcccagacacatcgagtgggaatctgtcctcacaaatactgccggatgcctgaggaatgtttctagcgagcggtcagaagcccgtaggaagctcagagagtgcgacggactcgtggatgctctgatcttcattgtccaggctgagataggtcagaaggatagtgactccaaacttgtggaaaattgtgtatgtttgctaagaaacctctcgtaccaagtgcaccgggaaatcccccaggccgagcgctaccaggaggcagcaccaaacgtggccaacaatactgggccacacgccgcttcttgtttcggagcaaagaaagggaagggcaagaaacctattgaagatcccgctaatgacacggttgattttcctaagcgaacctcaccagccaggggttatgagctgctgttccagcccgaggtggtgcggatttacatcagtctgttaaaagagtcaaaaacccccgctattctggaggcatcagcaggggctatacagaatttatgtgccggacgatggacttatgggcgttatatcagatcagcactgcgccaggagaaagccctgtccgctatcgctgacctgctcacaaacgagcatgagcgggtcgttaaggctgcaagcggagccctccggaacctcgcagtggacgccagaaataaagagttaatcggcaaacacgctatccctaacctagtcaagaaccttcctggcggtcagcagaacagcagctggaatttctcagaagacacagtaatttctattctgaatacgatcaatgaggttatcgccgagaatctcgaggccgctaagaaattgcgcgaaacccagggtatcgagaagctggtgcttattaacaagagcgggaatagatcagagaaggaagtgcgggcagccgctctagtcctacagactatatgggggtacaaagagctgcgaaaacctctggagaaagagggatggaagaaatctgactttcaggtcaacctgaataacgcttcacgctctcaaagttcacatagttatgacgatagcacgcttcctttgatcgatcggaatcagaaatccgacaataactactctacacccaacgagcggggagatcataatagaaccctggaccggtctggtgatcttggcgatatggagcccctaaagggaaccacacccctaatgcaagacgagggtcaggagtccctcgaagaggaactcgacgtgttggtccttgatgatgagggaggtcaggttagttacccttccatgcagaaaatctag

SEQ ID NO: 217289 - DNA, 2745 bp, synthetic construct
  misc_feature 1..2745: note = Description of Artificial Sequence: Synthetic coding sequence
  source 1..2745: mol_type = other DNA
atggccaacggcacattgactcgcaggcaccaaaacggccgtttcgtgggggatgccgacctggaacgccagaaattttcagatctgaaactaaacggccctcaggatcattcgcatcttctatactccaccattccccgtatgcaggagcccggacagattgttgagacttacacagaggaggacccagaaggcgcaatgtccgtcgtgtcagtggagacctcagatgacgggacaactcgaaggaccgaaacaactgtgaagaaagtggtcaagaccgtcaccaccagaactgtacagcctgtagctatgggccctgatggcttgcctgttgacgcatcttctgtgagcaataattacatccagacactcggccgtgattttaggaaaaatggaaatggtggtccgggtccttatgttggacaggccggtacagccactctgcctcgcaactttcactacccacccgacgggtatagtagacactatgaggacggctacccaggcggatccgataattatggtagcctgtcacgagtcacgcgtatagaagaacggtacagacccagtatggaaggctaccgggcaccatctagacaagatgtttatgggcctcagccacaggtgagagtggggggatcgtccgtggacttacatcgcttccaccctgagccatacggacttgaagatgaccagcgaagcatgggatatgatgatctggactacggaatgatgagcgattacggcactgccaggcgaactggcacaccctccgatccccgacgtaggctgagatcgtatgaggatatgatcggcgaagaggtgcctagcgaccagtactattgggcccctctcgcacagcatgagcgcggaagtctggcatctcttgactctcttcgcaagggagggcctcctcccccaaattggcgacagccagagctgccagaggtgattgctatgctgggcttcaggctggatgccgtcaagtcgaacgctgcagcgtacctgcagcatctgtgttatagaaacgataaggtcaaaaccgatgttcggaagctgaaaggtatccccgtgcttgttggcctgctggaccaccccaagaaagaagtccatctgggcgcttgcggagcccttaagaatatctcattcggaagggaccaggacaataagatcgctattaaaaattgtgatggcgtgccagcactggtgcggctcctgcggaaggcacgcgatatggatcttaccgaggtcattacgggcacactctggaatctcagctcacacgacagcataaaaatggaaattgttgaccatgctcttcacgcgttaacagacgaagtgatcattccccattcaggttgggaaagagaacctaacgaggattgtaaacctaggcatatcgaatgggagagcgtgttgacaaacactgccggatgcctaaggaatgtttcctccgaacggtccgaagcacgtcgcaaactcagggaatgtgacggcctggtagacgccctaattttcattgtccaggccgagataggccagaaagattctgattctaaattggtggaaaattgcgtgtgcctgctgcggaatcttagttaccaggttcacagggagattccacaggccgaacgataccaggaagctgcacccaacgtggccaacaatacgggacctcatgccgcttcatgcttcggcgcaaagaaaggaaaggatgaatggttcagccgcggtaaaaagccaatagaggatccagccaatgatactgtggatttccccaagcggacgtcacccgcacggggttatgaattactatttcaacctgaagtggtaagaatctatattagcctactcaaagaatcaaaaacccctgcaatcctggaagcctccgccggtgccatccaaaatttatgcgcgggaaggtggacttatgggagatatatccgaagtgccctccgccaggagaaagccttgtccgctattgcggacttgctgacgaacgagcacgagcgcgttgtcaaagccgcatcaggggcactgcggaatctggccgtagatgcaagaaacaaagagctgatcggtaagcacgccatcccaaacctggttaagaatttaccaggcggtcaacagaacagctcctggaattttagcgaagacacggtgatttccatcctaaacacgatcaatgaggtgatcgccgaaaatctggaggcagctaagaaactgcgcgaaacccaaggcatcgagaaactggtgctgattaataaatctggcaatcgttccgaaaaggaggtgcgtgccgcagcgctggtgcttcagacgatatggggctataaggaactccgcaaacctctcgagaaagaaggctggaagaaaagcgactttcaggttaatcttaataacgccagccgatcgcaaagtagccattcttacgatgactccaccctgcccttgattgaccgcaaccaaaaatccgacaagaagccagacagagaggagattcaaatgagcaacatgggaagcaacactaagagtttggataacaactacagcacccccaatgagcggggtgaccataatcgtacattggacagatccggcgacctaggggatatggaacctttgaaaggcactaccccactgatgcaggacgaaggtcaggagagcttggaggaagaacttgatgtgctggtcttagatgacgaaggcggtcaggtgagttacccttccatgcagaaaatttag

SEQ ID NO: 217290 - DNA, 381 bp, synthetic construct
  misc_feature 1..381: note = Description of Artificial Sequence: Synthetic coding sequence
  source 1..381: mol_type = other DNA
atgatcggcgaggaagtccctagcgaccaatactattgggcgccactcgcgcagcacgaacggggatcactggcttccctcgacagtctgcggaagggtggaccaccacctccaaattggcgccaacctgagctcccagaagtaatcgctatgctcggttttcgccttgatgccgtgaagtcgaacgcagctgcctatttacagcacttgtgttacagaaacgacaaagtgaaaacagatgtgagaaaactcaagggcatccctgtattagtcggtttactggaccacccgaagaaggaggtgcacttaggcgcatgtggcgctctgaaaaacatttccttcggacgagatcaggacaacaaaatagccattaagaattag

SEQ ID NO: 217291 - DNA, 2640 bp, synthetic construct
  misc_feature 1..2640: note = Description of Artificial Sequence: Synthetic coding sequence
  source 1..2640: mol_type = other DNA
atggcaaacggaactctgacaaggcggcaccaaaatggcaggttcgtgggcgatgccgatctcgagcggcagaaattctctgacctgaagctgaacgggcctcaagatcacagccacttgctgtatagtaccattccacgcatgcaggagcccggacagattgtcgagacatatacggaggaggacccagagggagcaatgtcagtggtttcagtagaaacctctgatgatggcactacaagacgaaccgagacaactgtcaaaaaggtagttaagaccgtcacaacgcgaacagttcagcctgtcgcaatgggcccagacggtctgccagtagatgcgtcctccgtgagcaataattatatacaaacattaggaagggacttccgcaagaatggcaacggaggacctgggccatacgtgggacaagccggaaccgccacactgcctaggaacttccactatccgcctgacggctattctcgccactatgaagacggttacccaggtggaagtgataattatggcagtctgtccagggttacaagaatcgaagagcggtataggccttctatggaagggtacagagccccatcacgccaagatgtgtatggccctcagccccaggtgagggtgggcggaagcagtgtagacctgcatagatttcaccccgagccctacggtctcgaggacgaccagaggtccatgggctacgacgaccttgattatgggatgatgagcgattacggaactgcaagacggacaggaacccctagcgatccgaggagacgcctccgcagttatgaggatatgatcggggaggaggttcctagcgaccagtattactgggctccgctggcacagcatgagcgcggaagtctggccagtctcgacagcctgcggaaagggggaccaccacctcctaactggaggcaacccgaacttccagaggtcattgccatgttgggcttcagattggacgcagtgaagtctaacgccgctgcttacctgcaacacctctgttaccggaatgacaaggtgaagacagatgtgcgcaagctgaagggtatccctgttttggtggggttgctcgatcatccaaaaaaagaggttcacctaggcgcatgcggtgctttgaagaatatttcttttggaagggatcaggataacaagatcgcgatcaaaaactgcgatggggtgcctgcactggtacgccttttgagaaaggctagggacatggatcttacagaggtgattacagggaccctttggaacctttcttcccacgactctataaagatggagatcgtggaccatgcactgcacgccttgactgacgaggtgattattccacattcaggatgggaacgagagccgaatgaggattgcaagcccaggcatatcgagtgggagtcagtgttaacaaatacagctgggtgtctcagaaacgtcagctctgaacggagcgaggcacggaggaagctcagggaatgcgatggcctcgtggacgctctcattttcattgtacaggcggaaattgggcagaaagactccgatagcaagctggtcgaaaattgcgtgtgcttgctgcggaacctgtcttatcaggtgcatcgtgagatcccacaagctgaacggtaccaggaggctgctcccaatgtggcgaacaataccggcccacacgcagcttcctgcttcggagcgaaaaaaggcaaagggaagaagccaatagaagaccctgccaatgatacagtggattttccaaagaggactagcccagcgaggggctatgagctgttgtttcagcctgaggtcgtgagaatttacatcagtctgctgaaagaatctaagacccctgccatactggaggcctctgccggagccatccagaacctctgcgcaggaagatggacctacggccgttacatccgcagcgccttaagacaggagaaggctctgagtgccatcgcagatctcttaacaaatgaacatgaaagggttgtcaaggctgcatccggcgctctgaggaacctggccgtagacgcccgaaacaaggaacttatcggaaagcacgccattccaaatcttgtaaagaacttgccagggggtcagcagaatagcagttggaacttctcggaggacacggtgatcagcattctgaacacaatcaacgaagtgattgccgaaaacctagaggctgctaaaaagctcagagaaacacaggggattgaaaaactggtcctgataaacaagtcaggcaatcggtccgagaaagaggtcagagccgctgcgttggtgctgcaaacaatctgggggtacaaagaactgcgaaaaccacttgagaaagaggggtggaaaaaaagcgactttcaagtgaacctcaacaatgcctcaagaagccagtctagccactcttacgacgattccacactacccttaatagacagaaatcaaaagagtgataagaaacccgatagggaggaaattcagatgagcaatatgggcagcaacactaagtccttagataacaactattcgactcccaacgagcggggtgaccacaataggactctggataggagcggagatctgggcgacatggagcccttgaagggcactacacctctcatgcaaaaaatttag

SEQ ID NO: 217292 - DNA, 3678 bp, synthetic construct
  misc_feature 1..3678: note = Description of Artificial Sequence: Synthetic coding sequence
  source 1..3678: mol_type = other DNA
atgttcgcccgaaaacctccgggtgccgcacctcttggcgctatgcctgtgccagatcaaccatcctcagcttccgaaaagaccagtagcctgtcccctggactcaatacatcaaatggcgatgggtccgaaaccgagactaccagcgccatcctggccagtgtgaaggaacaagagctccagtttgaaaggttgactagggaactggaggccgaaaggcagatagtggcctcccagctcgaacgctgcaaactagggagcgagacaggctcaatgagtagcatgtctagcgcggaggagcaatttcagtggcagtctcaggacgggcagaaagacatagaggacgaattaaccactgggttggaactggtagacagctgcatacgctcgcttcaagaaagtgggatcctggacccgcaggattacagcacaggagagcgaccctcacttctgtcccagagcgcgttgcaactcaacagtaagcctgagggctcctttcagtatccagcaagctaccacagcaatcagaccctagctttaggggagactacacccagtcaactcccagcccgtggcacgcaggctcgggcaaccggacagtctttttcccaagggactacatcccgagcaggacatctcgccggacccgaacctgcccctccccctccaccaccccctagggagccctttgctccatcactaggcagcgcttttcatcttcctgatgcgccaccagccgctgcggctgcagccctatactactcttcatccaccttgcccgcacctccgagggggggaagccctctggccgctcctcagggtggatccccgacaaagctgcagcgaggcggttccgctccggagggtgctacctacgcagccccacgcggttcctctcctaagcagtccccaagcagactcgcaaaatcttactccacctctagtccaatcaatattgttgtgagcagtgcagggctgtcgccaattcgggtgacttcgcctccaaccgtgcagagtacaatttctagttctcccattcatcagctgagctcaacaattggcacctacgccaccctcagccccaccaaacgtctggttcacgcaagcgaacagtattcaaaacatagtcaagaattgtacgcaactgccacactgcagagacccggatccctagctgcaggaagcagagcctcttactcttcccagcacggacatttaggaccagagctaagagctcttcagtcccctgagcaccatatagacccaatctacgaagatagggtatatcaaaagccacccatgcgatctctgagccaaagccagggagaccccctgcccccagcgcacactggtacctacagaactagcaccgcgcctagctcacccggtgtggactcagtgcccttgcagcgaacgggcagtcagcacggaccacagaacgccgcagccgctaccttccaacgggcttcctacgccgctgggccagccagcaattatgccgatccttaccgacagcttcaatattgtcctagcgtggagagcccttattctaaaagcgggccagcgttaccaccagaggggactttggctcgcagcccttctatcgattctatccaaaaagatcccagagaatttggctggcgcgaccctgagctccccgaagttatccagatgctgcagcaccaattcccttccgtacagagtaatgctgcagcatatttgcagcacctctgtttcggtgataataagataaaggccgagattcggaggcagggcggaatccagctgttggtggatctgctggaccatcgcatgaccgaggtgcacaggagcgcatgcggagcgctgcggaatctggtctatgggaaggccaacgacgataataagatcgccctgaagaactgtggaggaattccggcattagtgcgtttgctgagaaagacaacggatctggagatccgcgaacttgtaacaggcgtactgtggaatctcagctcctgtgatgccctgaaaatgccaatcatccaggatgccctggcagtgttgaccaatgcagtgataatccctcactcagggtgggaaaactctcccttgcaagatgacaggaaaatccagctgcacagtagccaagtgctgcggaatgctaccgggtgcctgcggaacgtatcgtccgcgggtgaagaagccagacgaaggatgcgggagtgtgacggattgaccgacgctctcctatacgtgatccagtccgccctgggatctagtgaaatagactctaaaaccgtcgaaaattgcgtgtgcatactccgcaacctgagttaccgattagctgccgaaacgagtcagggacaacacatgggcaccgatgagctggatggcctgttatgtggagaggcaaatgggaaagacgccgaatcgagtggctgttgggggaagaaaaaaaaaaaaaaaaaaagtcaggaccagtgggacggcgttggcccactccccgattgtgccgaaccacctaagggcattcaaatgctgtggcacccttcaatcgttaagccatatctgactttgttaagcgagtgctctaatccagataccctggagggtgccgcaggcgcactacagaacctggccgctggtagttggaaatggtcagtctatatcagagctgcagtgcgtaaggaaaagggcctgccaatacttgttgagctacttcgcattgacaacgatcgggtagtatgtgcggttgcgacagccttaagaaacatggccttagatgtgaggaataaagagttaataggtaaatatgccatgagggatctggtccaccgcctgcccggaggaaacaacagtaacaatactgcctccaaagccatgagtgacgatacggttaccgctgtgtgttgtacattgcatgaggtgatcactaagaacatggaaaatgccaaggccctgagggatgccggtggcattgagaagctcgtgggaatcagcaagtctaagggagacaaacactcaccaaaagtagtgaaggccgcatctcaggtattgaacagtatgtggcagtatcgggacttacgctccctctacaagaaggacggctggtcgcagtatcactttgtggctagtagttctacaattgagagggatcgccagcggccttacagcagctctaggacaccctccatcagtcctgtccgtgtctcccccaataaccgaagtgccagcgcccctgcctccccacgagaaatgatttccctcaaagaaaggaagacagactacgagtgcacaggtagtaacgctacataccacggtgcaaaaggcgaacatacgagtcggaaagatgctatgaccgctcaaaacacaggcatctccacgctgtacagaaacagctacggtgcacccgctgaggatatcaagcataatcaggtcagcgctcagcctgttccccaggagccatctcggaaggactacgaaacctaccagccatttcaaaatagcacccggaactacgacgagtccttctttgaggaccaagtgcaccatcgacctcccgctagcgaatataccatgcacctgggccttaaatccactggcaattatgtagatttttatagcgccgcacgaccgtactctgaattgaactacgaaacgtcacattatcccgcatctcccgactcatgggtgtag

SEQ ID NO: 217293 - DNA, 3504 bp, synthetic construct
  misc_feature 1..3504: note = Description of Artificial Sequence: Synthetic coding sequence
  source 1..3504: mol_type = other DNA
atgtttgctaggaagcctcccggagcggctcctctcggcgctatgcccgtgcctgaccagccatcaagtgcctctgagaagacatccagcttatcccctggattaaatacgtctaatggggacgggagcgagacagaaacaacctctgctatcctggcatccgtgaaggagcaggaactgcagtttgaaagattgacaagagagctggaggcagagagacagatcgttgccagccaattagagagatgtaagctgggtagcgagacgggatcaatgtccagcatgtcgtctgctgaagagcaatttcaatggcagtctcaggatggacagaaggatatcgaggacgagttgacaactggcttggagctcgtggattcctgcatacggagtctccaggaaagcggcatcttagacccccaagactatagtaccggggagaggccaagcctgctctcccagtccgccctgcaacttaatagtaaaccggagggttctttccaatacccggcatcctaccactctaaccagactctagctctcggcgagaccacccctagccaactgccagccagaggaacccaggcccgagctacaggccagtcttttagccagggtaccacttcccgcgcaggccatctagccggtcccgaacctgcccctccaccgccaccccctcccagggaaccctttgcgccatctctgggatccgcattccatctgccggatgctccaccggcagcagcagccgctgccctttactatagttcatccacactccccgctcccccacggggtggaagtcctcttgccgcaccacaaggcggatcacctacaaagctgcagagaggcggatctgcccctgagggcgcaacatacgccgctccgcgtgggagtagccccaagcagtccccgtctagactggctaaatcctattctactagttcccccatcaacatagtcgtgtcttcagccggactgagcccaatccgggtcacatccccaccgaccgtccagagcacaatctcctcctcacccattcaccagctgtcctctactattggaacttatgccactctctcaccgacaaagcggctcgtgcatgctagcgaacagtattcaaaacactcacaagagctgtacgctaccgcaacactgcagcgcccagggagtttagccgctggatccagggcttcgtattcctctcagcacggacacctgggacctgaacttagggcgctgcagagcccagagcaccatatcgaccctatttatgaagacagagtctatcaaaagccccctatgaggagtctaagtcagtcacaaggtgaccctcttcctcccgcacacaccggtacctacagaactagcacggccccttcctctcctggcgtcgattccgtccccttgcaaaggacaggcagccagcacggcccacagaacgccgcagctgccacctttcagcgcgcatcttacgctgcaggacccgcttctaactacgccgatccatacaggcagcttcagtattgcccttctgttgaaagtccatacagcaagagcgggccagcgctgcctcctgagggaaccttggcaagatcgcctagtatcgactccatccaaaaggatcctcgcgagtttggctggcgcgatcctgagcttccggaagtgatacagatgcttcagcaccaattcccatctgtgcagtctaatgcagcggcttatcttcagcatttgtgctttggtgacaataagataaaagcagaaatccgtcgccagggcggaattcagctgttggttgacttgctggaccatagaatgacagaagtccaccgatctgcctgcggtgccctaaggaatctggtgtatggtaaagcgaacgatgataacaagatagcattgaaaaactgcggcggtatcccagctctggtgcgcctgctacgcaaaaccaccgatctggagattcgtgagctggttaccggtgtcctgtggaatctgagcagctgtgacgcactgaagatgccaattatccaggatgccctcgcagttctgactaatgcggtaataattcctcactcaggctgggagaatagcccactgcaagatgatcgtaagattcagctgcattcatcacaggtcttgcgtaacgccactgggtgcctgagaaatgtgtcaagcgccggtgaggaggccaggcgtcgaatgcgcgagtgcgacgggttaacagacgccctgctttacgtgattcagagtgccctcggctcttccgagatcgatagcaaaacagttgagaattgcgtgtgtattctgagaaacttaagttatcgtctggcggctgagacgagccagggacaacatatgggtacagacgagctcgatggcctcctttgtggggaagccaacggaaaagatgcagagagtagcgggtgctgggggaagaaaaagaagaaaaagaagtcccaggaccaatggtccgtgtatatcagagcagccgtgcgcaaggagaagggcctgccgatcttggtggagctattacgcatcgacaacgacagagttgtctgtgccgtggccacagctttaaggaatatggcactggacgtccgcaataaagaacttattggaaagtacgcaatgcgggacttggtgcaccgactgccgggtggtaataatagcaacaacactgcttcgaaggcaatgagtgatgacaccgtgaccgctgtgtgttgcactctgcacgaggtgatcacaaaaaatatggaaaacgctaaagctctccgcgatgcagggggtatcgaaaaattagtcgggatttctaagtcaaaaggcgacaagcacagtcccaaagtagttaaggctgctagtcaggtgctgaactcaatgtggcagtatcgcgatctaaggtcactttataagaaagacggatggagtcagtatcattttgtggcctcatcgtctactatagaacgcgaccggcagcggccatattcaagcagccggaccccttctatatctcctgtgcgggttagtccgaacaaccgaagcgctagtgctcccgcatctcctcgggagatgatctccttgaaagagaggaagaccgattacgagtgcaccggttctaacgcaacctaccacggggctaaaggtgagcacacaagtcgcaaggacgcaatgacagcacagaataccggtattagtacactgtaccgcaacagctacggggctcccgcagaggacatcaaacacaatcaagtgtctgctcaaccggtgccccaggaaccatcacggaaggactacgagacgtatcagccctttcaaaatagcaccagaaactatgatgagtcttttttcgaggatcaggtgcaccaccggcctcccgcatctgagtataccatgcacttaggcctaaagtcaaccggtaattacgtggatttttatagcgcggcaaggccttattcagaattaaactacgaaacaagccactaccctgcgtctcccgactcttgggtgtag

SEQ ID NO: 217294 - DNA, 2379 bp, synthetic construct
  misc_feature 1..2379: note = Description of Artificial Sequence: Synthetic coding sequence
  source 1..2379: mol_type = other DNA
atgcgttccctttcccagtctcagggcgatccccttccccctgctcatacagggacctacaggacctccaccgcacccagtagcccaggtgtagatagcgtgcccctccaaaggactggttctcagcacgggcctcagaacgccgctgcagctacttttcaaagggccagctatgcggctgggcctgcttcaaattatgccgacccatatcgacaattacagtactgcccttccgtggaaagcccttattctaagagtgggccagctctccccccagaaggtacactggccagatcccccagcatagattctatccagaaggaccctagggagttcggctggcgagatcctgagttgcctgaagtcatccaaatgcttcagcatcaattcccctccgttcagagcaacgcagccgcatatctccagcacctttgcttcggagacaacaaaatcaaagccgagatcagaaggcagggcggaatccaactcctggtagatttgttggatcacagaatgacggaggttcacagatcagcctgtggggctctacggaacctcgtgtacggcaaggcaaacgacgataacaaaatcgcgctgaagaattgtggcggaatcccagctctagtgcgactgctcaggaagacaactgatctagagatccgtgagctggtgaccggtgtcctgtggaatctgtcatcatgcgacgcactgaaaatgccaatcattcaagatgccctggccgtattgaccaatgccgttatcatcccacattccggctgggagaacagtcctctccaggatgatcggaagatccagcttcattcttcacaagtgctcaggaacgctactggctgcctccggaacgtaagctccgccggagaggaagcacgtcgcagaatgcgagagtgcgacggtctcaccgacgccctattatacgtcatacagtccgcactggggagcagcgagatcgattccaaaaccgtggaaaactgtgtttgcattctgaggaacctgagctaccgactggccgcagagacctcccaggggcagcatatggggacggacgaactagatgggctcttgtgtggggaggctaatgggaaagatgccgaatcaagcggatgttgggggaaaaaaaaaaaaaaaaagaaatcccaggaccagtgggatggggtaggccctctgcccgactgcgccgaacctccgaaagggatacaaatgttgtggcacccaagtattgtgaagccttacctgaccctgctgtccgagtgcagcaatccagatacactcgagggtgctgccggtgccctgcagaaccttgccgcaggtagctggaagtggtctgtctacatacgtgcagccgtacgcaaggagaagggactcccaattctcgtagagctactacgcatcgataacgaccgcgtcgtgtgcgcagttgccacagccctgcgaaatatggccctggatgtgcgcaataaggaactaattggtaagtatgccatgagggatctggtacaccgcctccctggcggaaataactctaataatactgccagcaaagccatgagcgatgacacagtgaccgcggtttgttgcactttgcatgaggtgattaccaaaaatatggaaaatgccaaggccctgagagacgctggaggcatagagaaacttgtggggatcagtaaaagcaagggagataaacacagtcccaaggtcgtaaaagccgcttcacaggtcttgaattcaatgtggcagtacagagatttgcggtctctatataagaaggatggttggtcccagtaccatttcgtagcctccagctcgaccattgagcgggataggcaaaggccctactccagcagccgaaccccttccatatctccagtgcgagtctcacctaataataggtccgcttccgctcccgcttcccctagggaaatgatctcactcaaagagcgtaaaactgactatgaatgtactgggtctaatgccacatatcatggggctaagggggagcatacatccaggaaagatgcgatgaccgctcaaaatacaggaatcagtactctctacagaaactcttacggtgcaccagccgaggacatcaaacacaatcaggtgtcagcacagcccgtacctcaggagccctcccgcaaagactatgaaacctatcagccatttcagaacagcacccggaactacgatgaaagcttcttcgaggatcaagtgcaccatcggccaccagcgtcagagtacacaatgcatcttgggctgaagtctacaggaaattacgtggatttctattctgcagccagaccttactccgagctgaactacgaaacctcccactaccccgcttcacctgattcatgggtgtag

SEQ ID NO: 217295 - DNA, 2667 bp, synthetic construct
  misc_feature 1..2667: note = Description of Artificial Sequence: Synthetic coding sequence
  source 1..2667: mol_type = other DNA
atgagttctatgagctccgctgaggagcagttccagtggcagagccaggatggccagaaggacatcgaagatgagcttaccactggactggaactggtggattcttgcattcgttctcttcaggaaagtggcatcctggatcctcaggactactccaccggcgagacgggttcccgtgcttcctacagttcgcagcacggccatctgggacccgaactcagagcactccagtcaccagagcaccacattgatcccatttatgaggacagagtttatcaaaaaccacctatgcgtagtttgtcgcagagccaaggggaccccctgcctcctgcccatactgggacttaccgaacgtcaaccgctccctcttctcctggcgtcgattctgtacccctgcagcgcactggatctcagcacggcccacaaaacgccgctgcagcaactttccaaagggcatcgtacgccgctggtccagcatcaaattacgccgatccttacagacagctgcagtattgcccctccgtggaatcgccctactcgaagagtgggcctgctctgcctcccgaaggcaccctggccaggtctccgtctatcgacagcatccaaaaagacccaagagaattcggctggcgcgatcctgaactcccagaggtaatccaaatgctgcagcatcaattcccctcggtgcagtctaatgccgcagcttatctgcagcatttgtgttttggggataacaagattaaagcagagatcagacgccaggggggaatccagttgctggtggacctgctcgaccaccggatgacagaggtgcaccgatccgcctgtggcgctctcagaaatttggtgtatggaaaggccaatgacgacaacaagatcgccttgaaaaattgcggagggatacccgcacttgtgcgcctgttgcgaaaaaccacagaccttgaaatccgagagctcgtcactggagtgctgtggaacctttccagttgtgatgccctaaagatgcctatcatccaggatgctctggctgtgttaacgaacgccgtgatcatacctcacagtggatgggaaaattctcctttgcaggatgatcgaaagatccagctgcatagctcccaagtgctgaggaatgcgaccggatgtctgagaaacgtgagctcagcgggagaggaagcacgtcgacggatgcgggaatgcgacgggctcactgatgcactgctgtacgttatccagagcgccttgggctccagcgagatcgattccaaaaccgtagagaattgcgtgtgcatcctacgtaacctctcataccgtctagcagctgagacaagtcagggacagcacatgggaaccgacgaactcgacgggctcctttgtggggaggccaacggcaaggacgctgaatcttctggttgttggggaaaaaagaaaaaaaagaaaaagtcacaagaccagtgggacggcgtgggcccactacccgattgcgccgagccccctaaagggattcaaatgctgtggcacccaagcatcgttaaaccctacctcaccctgctcagtgagtgctctaaccccgatactctagaaggagccgcaggtgcactccagaacctggctgctggctcctggaagtggtcggtatacattcgcgcagccgtccgaaaggagaagggtcttccaatcctggttgaattattaaggatcgacaatgacagagtggtctgcgcggtggccaccgctttaaggaacatggctctggacgtccgaaataaggaactcatcgggaaatacgctatgcgcgacctggtgcaccgtcttcctgggggtaataactccaataataccgccagtaaagccatgagcgatgataccgtcaccgccgtttgttgtaccttgcacgaagttatcactaaaaacatggaaaatgccaaggctcttcgggacgccggtggcattgagaagttggttggcatttctaaatctaaaggagacaagcactccccaaaagtagttaaagccgcatctcaggtgttaaattccatgtggcagtaccgcgacttgagaagcttgtataagaaggatggttggagtcagtatcatttcgttgccagctctagcaccatcgagcgggatagacagcgtccctatagtagctctcgaacccccagtatttcccctgttagggtcagccctaacaatcgttccgcctccgcccctgctagcccacgcgagatgataagcctgaaggaacgcaaaaccgactatgagtgcactggtagcaatgccacttatcatggcgctaaaggtgaacatactagcaggaaggatgccatgacggcccaaaataccgggatcagtactttgtacaggaactcatatggagctccagcggaggatattaagcacaatcaggtctccgcacaaccagtgccacaggagcccagccgcaaagactacgagacataccagcctttccagaatagcacgcgtaactacgatgagagtttctttgaagatcaggtgcaccatagacccccagcctccgagtataccatgcacctgggactgaagagcacaggaaattacgtggacttctactcagctgcccgtccgtactccgaactgaattatgagactagtcactacccagcatctccagactcctgggtgtag

SEQ ID NO: 217296 - DNA, 546 bp, synthetic construct
  misc_feature 1..546: note = Description of Artificial Sequence: Synthetic coding sequence
  source 1..546: mol_type = other DNA
atgtcttcaatgagctcggctgaggagcaatttcagtggcagagtcaagatgggcagaaagacatcgaggatgagctgacaacagggctggaactggtagattcctgcatccgcagcctccaggagagcgggattttagacccccaggattatagtacaggagaacggccttccctcctaagccaaagcgctctccagcttaactcaaagccagagggaagttttcagtatcctgccagctaccactccaaccagaccctggcgctcggcgaaaccaccccatcacaactcccagccagagggacccaggctcgcgcaacaggacaaagcttctctcagggcaccacctctagagctgggcaccttgctggccctgagcccgcacccccaccccctcccccacccagagaaccttttgctccatcgctgggctcagcattccatctacctgacgctccgccagccgcagccgctgcagctctgtattattcctctagtaccctcccagccccacctcgagggggatccccgctggctgctccctag

SEQ ID NO: 217297 - DNA, 963 bp, synthetic construct
  misc_feature 1..963: note = Description of Artificial Sequence: Synthetic coding sequence
  source 1..963: mol_type = other DNA
atgaccgtgtggtgtgcggtggctacggcactaaggaatatggcactggacgtaaggaacaaggagctgatagggaaatacgctatgagggacctggtgcatcgcctgcccggtggcaacaactcgaataacaccgcttctaaggccatgtcagatgatacggttaccgcagtgtgctgtacactgcacgaagttatcaccaagaacatggagaacgccaaagccttgcgggacgcgggaggtattgaaaagcttgtggggatatccaagagtaagggcgacaaacactctccgaaagtggtgaaagccgcaagccaggttttgaattctatgtggcagtatagagacttaagatcactgtacaagaaggacggctggtctcagtatcactttgtggcctcaagctcaacaattgagagggatagacagaggccctatagcagctccaggacaccctccataagtcctgtgcgtgtgagtcctaacaatcgatctgcctctgctcccgcaagcccgagggagatgatttccctgaaggaaagaaagaccgactatgagtgcacgggctcaaatgccacttaccacggtgccaagggagaacacacctcacgaaaggacgcaatgacggctcaaaatacaggcatctctacgctgtatcgcaatagttatggagcacctgccgaggatatcaaacataaccaagtgtcagcacagcccgtgccccaggaaccctcccgtaaggattatgagacgtaccaacccttccagaactcaacacggaactatgatgagtcttttttcgaggaccaggttcaccataggcctcccgcaagtgaatacactatgcacttaggcttgaaatctacaggtaattacgtggacttctactccgccgcaaggccatactccgagctgaactacgagacctctcattaccccgcttcccctgattcttgggtgtag

SEQ ID NO: 217298 - DNA, 246 bp, synthetic construct
  misc_feature 1..246: note = Description of Artificial Sequence: Synthetic coding sequence
  source 1..246: mol_type = other DNA
atgaatcgtgaaggcgctcccggtaaaagcccagaagagatgtacatccagcaaaaggtacgcgtgttgctcatgttgcgaaaaatgggatccaacctcacagcttcagaggaagagtttctgcggacgtacgcaggtgtagtgaactcacagctgtcccagctgccccctcactccatagaccagggagccgaggacgtggttatggctttttccagaagtgaaacagaagatcgaagacagtag

SEQ ID NO: 217299 - DNA, 246 bp, synthetic construct
  misc_feature 1..246: note = Description of Artificial Sequence: Synthetic coding sequence
  source 1..246: mol_type = other DNA
atgaatcgggagggcgctcctggaaagtccccggaggagatgtatatccagcagaaggtgcgggtgctgctgatgctgcgaaagatggggagcaacctgactgccagcgaggaagagttcttgagaacctacgcaggggtggttaattcgcagctttctcagctcccaccccatagcatcgaccagggcgcagaggatgtggttatggcgttttctcgttccgaaactgaagatcggagacagtag

SEQ ID NO: 217300 - DNA, 246 bp, synthetic construct
  misc_feature 1..246: note = Description of Artificial Sequence: Synthetic coding sequence
  source 1..246: mol_type = other DNA
atgaacagagaaggcgcacccggtaagagtccagaggagatgtacattcagcaaaaggtaagggtgctcctaatgctccggaagatggggtcaaatctgacggctagcgaagaagagtttctaagaacgtacgcaggagtggtgaattcccagcttagccagctcccaccgcattctattgatcagggcgcagaagacgtcgtgatggctttctccaggtctgaaacagaggaccgacggcagtag

SEQ ID NO: 217301 - DNA, 246 bp, synthetic construct
  misc_feature 1..246: note = Description of Artificial Sequence: Synthetic coding sequence
  source 1..246: mol_type = other DNA
atgaacagggaaggcgctccgggaaaatctccagaagagatgtacattcaacagaaggtgcgcgtactgctgatgcttagaaagatgggatctaatctgacagctagtgaggaggagttcctgcgcacttacgctggggtggttaattcccaactgagccagctcccccctcatagcatcgaccagggcgcagaggatgttgtgatggccttttccaggtctgagactgaggatcgacgccagtag

SEQ ID NO: 217302 - DNA, 246 bp, synthetic construct
  misc_feature 1..246: note = Description of Artificial Sequence: Synthetic coding sequence
  source 1..246: mol_type = other DNA
atgaaccgagagggcgctcctggcaagtctcccgaggaaatgtacatccagcagaaagtgcgcgtgctgctgatgcttcgcaagatgggctctaatctgaccgcgagcgaagaggagttcctgaggacatacgccggagtggttaattcccagctgtctcagctcccaccacacagcattgaccagggcgctgaggacgtagtgatggccttttcacggagcgagacggaagacagacgtcagtag

SEQ ID NO: 217303 - DNA, 1692 bp, synthetic construct
  misc_feature 1..1692: note = Description of Artificial Sequence: Synthetic coding sequence
  source 1..1692: mol_type = other DNA
atggacgttggcgagctgctgagctaccagccgaaccgcggtaccaaaaggcctagagatgacgaggaggaagagcagaagatgaggaggaaacagacagggacaagggagagagggaggtatcgggaagaagaaatgaccgtggtggaagaggctgatgacgacaagaagaggcttctgcagataattgacagagatggggaagaagaggaggaagaggaagagcccctcgatgaatccagcgtgaagaagatgatcctgacattcgagaagaggtcgtataaaaaccaggagctgagaattaagtttcctgacaatccagagaagttcatggaaagcgaactggaccttaacgacatcatccaggagatgcacgtggtggccaccatgccggatctgtaccatctactcgttgagttaaacgcagtccagtcacttctgggcttgctgggccacgacaatactgatgtctcgattgccgtggtggatctgcttcaagaattgacagacattgatacactgcacgaatcggaagagggagcagaagtcctgatcgacgccttggttgacgggcaagtggttgctcttttggtgcaaaatttggaacgcctcgatgaatctgttaaagaagaggcagacggcgtgcataacaccttagctattgtcgagaatatggccgagtttagaccagagatgtgcactgagggggctcagcaaggcctcctgcaatggctgctgaagcgcctgaaggctaagatgcccttcgatgccaacaagctatactgcagtgaggttctggcaatcctgctgcaggacaatgatgaaaatagagagctcctgggtgagctggatggcatcgatgtattactacaacagctgagtgtttttaagcggcataaccctagcaccgcagaagagcaagaaatgatggagaacctctttgacagcctgtgcagctgcctcatgctgtcgtccaaccgggagcggtttctgaagggtgaaggtctgcagctcatgaacctgatgcttcgcgagaagaagatcagccggagctctgcgctgaaagtactggaccacgctatgattggtcctgaaggcacagacaattgtcacaagttcgttgacattttgggcctaagaaccatttttcctctgtttatgaaatccccacgtaaaatcaagaaggtaggcactactgagaaggaacatgaggagcatgtgtgttctatcctcgcctccctactcaggaacctgagagggcagcagcggaccaggctgctgaacaaatttacagagaacgatagtgaaaaggtcgatcgacttatggaacttcactttaaatatctcggagccatgcaggtggcagataagaagatcgagggtgagaaacacgacatggtgcggagaggagagatcatagataacgacacggaggaggagttctatctgagacgacttgacgccggactattcgtactgcagcatatctgctatatcatggctgaaatctgcaacgcaaacgtacctcagattcggcagcgggtgcatcaaattttaaacatgcggggaagctcaatcaagatcgtccggcacattatcaaagagtacgccgagaatattggggacggtaggagccccgagttcagggagaacgagcaaaagcggatcctcggacttttggaaaacttctag

SEQ ID NO: 217304 - DNA, 1611 bp, synthetic construct
  misc_feature 1..1611: note = Description of Artificial Sequence: Synthetic coding sequence
  source 1..1611: mol_type = other DNA
atgaggcgcaagcagacaggtactagggaacgcggtcgctatcgggaagaagaaatgacagtggtggaagaagcggacgacgataaaaagaggctcttacagatcatagacagagacggcgaggaagaagaggaagaggaagagccgttggatgaatcctctgtgaagaaaatgatactgacatttgagaagcgctcctacaaaaaccaggagcttaggatcaagttccctgataacccggagaagtttatggagagcgaactggatttaaacgatatcattcaagagatgcatgttgtagcaaccatgcctgatctgtatcatttgttagtcgagctcaacgcagtgcagagcttgttaggactgctgggccatgataacacagatgtgtccatcgctgttgtggatctcctgcaggaacttacagatatcgacacactgcacgagagtgaagaaggcgctgaagtgttgatcgatgctcttgttgatggacaggtggtcgccttactcgtccagaatctggaaaggctggatgaaagtgtgaaggaggaagccgacggagtgcacaacacacttgccatagttgagaacatggccgaattcaggccagagatgtgcactgagggtgcacagcaggggttgttgcaatggctactcaagaggcttaaagcaaagatgccttttgacgcgaataaattatattgttccgaagtgctcgctattctgctgcaggataatgatgagaatagagaacttttgggcgagctcgacggaatcgatgtgcttctgcagcagctaagtgtatttaagaggcacaacccttctaccgccgaggaacaggagatgatggagaacctgttcgattccttatgtagctgtctcatgctgtcctcaaatcgggagagattcctcaagggggaggggcttcaattaatgaatctgatgcttcgcgagaaaaaaatttcacgatcaagcgcactgaaagtactcgatcacgccatgatcggcccagagggaactgacaactgccacaaatttgtggacatcctcggccttcgtactatatttccgttgttcatgaagtctcctcggaagatcaagaaggtaggcactaccgagaaggagcacgaggagcatgtgtgcagcattcttgcttcgctccttcgcaatctccgcggacagcagcgaacaaggctgctgaacaagttcaccgagaatgactccgaaaaagtcgatcgcttgatggaactccacttcaaatatctaggagcaatgcaagtggcagataagaagattgagggcgagaaacacgatatggtgcgtcggggtgaaatcatcgataatgatactgaagaggagttctatttaaggagactggacgcaggcctttttgtgctccaacacatctgttacatcatggccgaaatatgcaatgccaatgttccgcagatccgtcagagagttcaccagatcttaaacatgcggggatcatcgataaagatcgttcgtcacattataaaagagtacgcggagaacataggtgacgggagatctcctgagtttcgggagaacgagcaaaaacgaatcctgggactgttggaaaatttctag

SEQ ID NO: 217305 - DNA, 501 bp, synthetic construct
  misc_feature 1..501: note = Description of Artificial Sequence: Synthetic coding sequence
  source 1..501: mol_type = other DNA
atgcgtagaaaacagacgggcaccagggagagaggcaggtatcgtgaggaagagatgacagtggtcgaggaagcagacgatgataaaaaacgattacttcagattattgaccgcgatggagaggaagaggaggaggaggaagaacctctggacgagtcaagcgtgaagaaaatgatccttacctttgaaaaacgcagctacaagaaccaggagcttagaataaaatttcctgataatccagagaagtttatggagagcgaattggacctaaatgatattatccaggagatgcacgtggtcgctacgatgcccgacctgtatcatctgcttgttgaactcaatgcagtccagtctctgttaggtcttctgggccacgataacaccgacgtgtcaatagccgtggtagacctgctccaggagctcactgacattgataccttgcacgaaagcgaggagggcgcagaggtgctgattgatgccctcgttgatggccaggtgtag

SEQ ID NO: 217306 - DNA, 1443 bp, synthetic construct
  misc_feature 1..1443: note = Description of Artificial Sequence: Synthetic coding sequence
  source 1..1443: mol_type = other DNA
atgattcgtgcagctccccctcccctgttcctgctgttgctcctcctcctgctcctcgtatcgtgggcttcacgcggtgaggcagctcccgaccaggatgaaatccagcggttacccggattagccaagcagccctccttcagacaatacagcggatacttaaagggtagtgggtcaaagcatctacattactggtttgtcgagtctcagaaggacccagagaattcgcccgtggtgctctggctcaatgggggacccggatgttcatcactagacggtctgctgactgaacatggcccatttctggtccaaccagatggcgttaccctggagtacaacccttattcctggaatttgatcgctaacgtgctctacctggaaagcccagctggcgtagggtttagctacagcgacgacaaattttacgccaccaacgacactgaagtggcccagtcaaattttgaggcgctccaagatttcttccggcttttcccggaatataaaaataataagctgtttttgaccggtgagtcgtatgccggaatctacatacccacacttgctgtgctcgtaatgcaggatccttcgatgaacctccaggggctcgcggtgggcaacggcctgtctagctacgagcaaaacgataacagtctggtctattttgcctactatcacgggctcctgggcaacaggttatggtcctctttgcaaactcactgctgctctcagaacaagtgcaatttctacgataataaagacctggagtgtgtgaccaaccttcaggaggtggcaaggatcgtcgggaactctggattaaatatctataacctgtatgccccttgcgccggtggcgtgccttcgcattttagatacgaaaaagataccgtagtagtgcaggacctgggaaatatctttacccggttgccgctgaagcggatgtggcaccaggcactattacgctcaggcgataaagtacggatggatcctccatgcactaacacaactgcggcatccacctatctgaacaacccttatgtgaggaaagctcttaacattccagagcagttaccacagtgggacatgtgtaacttcctggtgaacctccagtatagaagactctaccggagcatgaattcacagtatctgaaactgctttccagccaaaagtatcagattctgctgtacaacggggatgtagatatggcctgcaactttatgggggacgaatggttcgtggacagtctcaatcagaaaatggaagtccaacgtcgaccatggttggtgaagtatggggacagcggtgagcagatagccggttttgtgaaggagttttcccacatcgcctttcttaccatcaagggtgccggacacatggtaccgaccgataagcccctcgccgcttttaccatgtttagtcggttcctgaataaacagccatattag

SEQ ID NO: 217307 - DNA, 1446 bp, synthetic construct
  misc_feature 1..1446: note = Description of Artificial Sequence: Synthetic coding sequence
  source 1..1446: mol_type = other DNA
atgacgtcgagcccacgggctcctcccggagagcaaggcagggggggagccgagatgatccgggcagctcctcctcccttgttcctcctgttgctgctgctgctgcttctagtgtcctgggcttcccggggagaagccgcacccgatcaggacgaaatccagcgtctgcccggtctcgccaaacaacctagttttcgacagtattccggttatctgaaaggatctggaagtaaacacctacattactggtttgttgaatcccaaaaggatcccgaaaactccccagtggttctgtggctcaatggcggacctgggtgctcctcattggatggactcctcactgaacatggcccatttttgatcgccaatgtgttgtacctggaatcacctgcaggcgttgggttctcttatagtgatgataaattctacgccacaaacgacactgaggtggctcaaagcaatttcgaggccttacaagacttttttcggttgttcccagaatacaagaacaacaaactcttcctgactggcgagagctatgcagggatctacatcccaactctggctgtgttggtgatgcaagaccctagcatgaatctccaaggcctggcggtcggcaatggtcttagttcttatgagcagaatgacaatagcctcgtctactttgcttactatcacggcctgctcgggaaccggctctggtcctctctccagacacactgctgttcacagaataaatgcaatttttatgataacaaggatctggagtgcgtgactaatctccaggaagtggccaggatagtggggaactccggactcaatatttacaatctgtatgccccttgtgcgggaggggtcccaagccattttcggtatgaaaaggatactgtggtagtacaagatcttggtaatatcttcactcgactcccactgaagcggatgtggcatcaggcactgttgagaagcggcgacaaggttaggatggatccaccttgtacgaataccacagccgcttctacatacttgaataacccttacgtgcgaaaagccctgaacattcccgagcagctcccccagtgggacatgtgtaactttttggtaaatctgcagtaccggaggctctacagaagcatgaattctcagtaccttaaacttttaagctcccagaaataccaaattctactttacaatggcgacgtggatatggcctgcaacttcatgggggatgagtggtttgttgacagcctcaatcagaagatggaggtccagcgcagaccgtggctggtcaagtacggggactctggggagcagatagccggttttgtcaaggagttttctcatattgctttcctcaccatcaagggggctggccacatggtccctacggacaaaccgttggccgctttcacaatgttttctcgtttcctaaacaagcagccctactag

SEQ ID NO: 217308 - DNA, 870 bp, synthetic construct
  misc_feature 1..870: note = Description of Artificial Sequence: Synthetic coding sequence
  source 1..870: mol_type = other DNA
atgattagagcagccccaccccctctttttcttctcctcttgctcttactgctcctggtctcctgggcaagccgaggcgaagccgctcccgaccaggatgaaatccagcggctcccaggtctggcaaagcaaccctctttcaggcagtactccggctatctcaaagggagcggatctaagcaccttcattattggttcgtagagtctcagaaagatccagaaaattctccagtggtgttgtggctgaatgggggtcctggctgttcaagtctggacggactcctaacagaacacggcccttttctggtccaaccggatggggttacactggagtacaatccctattcatggaacttgatcgctaatgtgctgtacctggaatccccagcaggagtggggttttcttactccgatgacaaattctatgcaaccaacgacaccgaggtggcgcagtcaaacttcgaggcccttcaggatttctttagactgtttccagagtacaagaacaataagttatttctgaccggggagtcctacgcaggcatttatattccaactctggctgtgcttgtaatgcaggatccatctatgaacctacagggcttggccgtcggcaacggtctgagctcttacgaacagaatgacaatagcttagtttatttcgcatactaccatgggctgctaggtaaccggctctggagtagcctgcagacacactgctgttcccagaataagtgcaatttctacgataacaaagatcttgaatgtgtgaccaatctgcaggaggtagcgaggatagtggggaacagtgggttgaatatctacaatctttacgctccatgtgctgggggagtgccctcccatttctag

SEQ ID NO: 217309 - DNA, 1497 bp, synthetic construct
  misc_feature 1..1497: note = Description of Artificial Sequence: Synthetic coding sequence
  source 1..1497: mol_type = other DNA
atgacttcttctcctagggctcctcctggcgaacagggaagaggtggtgctgaaatgatccgagccgctccccctccactgtttctgctgttactcctgctcctgttgctcgtgtcctgggctagccggggagaagccgcacccgaccaggatgagattcagcgactgccgggacttgccaaacagccctctttcagacagtactctggatacttgaagggatctggatctaagcatctccactattggtttgtagaatctcagaaagatccagaaaactcaccagtcgtgttgtggttgaatggaggtcctggatgcagctctctggatggcttgctcaccgagcacggtccttttctcgtccagccggacggtgtgactttggaatataacccatattcctggaacttgattgctaatgtcctgtaccttgagtctccagctggggtgggtttctcctattctgacgataagttttacgcaacaaatgacaccgaagtggctcaatccaatttcgaagcactgcaggactttttccgactctttcctgagtacaagaacaataaactcttcctgaccggggagtcttacgctgggatttatattccaactctcgccgtcctggtgatgcaggacccgtctatgaacctgcaaggcctggcagttgggaacggactctcctcctatgagcaaaacgacaattccctggtgtacttcgcatattatcatggcctgctcgggaatcggctgtggtcgtcactgcagacacattgctgcagccagaataagtgtaatttctatgataacaaggatctggagtgcgtgacgaacctgcaggaagttgcacgtattgtgggtaattcagggctgaatatctacaacttgtacgccccatgtgctgggggagtgcccagccacttccggtacgagaaggataccgttgtggtacaggatctaggcaacattttcaccaggcttcctctgaagaggatgtggcaccaggctctgctgaggtcaggcgataaagtgcgaatggacccgccttgtaccaatactaccgccgcaagcacgtatctcaataacccttacgtgagaaaagcgttgaacatcccagagcagttgccccagtgggatatgtgtaattttttagtaaacctgcagtatcggcgtttgtatcgaagcatgaactcccagtacctgaaactgctctcttcccagaagtatcagatactgctgtataacggcgatgtggacatggcgtgtaactttatgggtgacgaatggttcgtggactccctcaaccagaaaatggaagtgcagagacggccttggctggtgaagtatggggatagtggagaacagattgcgggttttgtaaaggagttcagtcacattgcatttctgaccataaaaggtgccggacacatggtcccaaccgataagccactcgccgcttttaccatgttctcccggttcctgaataagcagccatactag

SEQ ID NO: 217310 - DNA, 1038 bp, synthetic construct
  misc_feature 1..1038: note = Description of Artificial Sequence: Synthetic coding sequence
  source 1..1038: mol_type = other DNA
atgataagggccgctcccccacccctgttcctattgctgctgttgcttcttttacttgtctcgtgggcttctcgtggcgaggctgcccctgaccaagatgagatccagcgtttgccgggacttgccaaacagcctagcttccgccagtacagcggttacttaaagggctcagggagcaagcatttgcactactggttcgttgagtcccagaaggatccagagaattcccctgtggtgttatggctgaacgggggacctggctgctcctctctggacggactgcttaccgagcacggcccattcttgatcgctaacgtgttatacttagagtcgcccgctggcgtggggtttagctatagtgatgataagttttatgcgactaacgatactgaggtggcacagagcaattttgaagcactgcaggacttcttccgcctcttcccagagtacaagaacaacaaactctttctcacaggtgagagctatgccggaatatacattcctactctagcagtgctagtcatgcaggacccgtcaatgaacctacaggggctggccgttggtaatggcctcagttcttatgagcaaaacgataacagccttgtctattttgcctactaccacggcttgcttggaaaccgcctgtggagctctttacagacccattgctgctcacagaacaagtgcaacttctacgacaacaaggatctcgaatgtgtgactaatttgcaagaagtagcccgaattgtcggcaacagtgggcttaatatatataacttgtatgccccttgtgctggcggtgttccatcgcactttcgctacgaaaaggacactgtagtggtgcaggaccttgggaacattttcacccggctaccactgaaaaggatgtggcatcaggctctgctgagatcgggagataaagtgcgcatggaccctccctgtacaaatactacggccgcttctacatatctgaataatccatatgttcggaaagccctcaacattcccgaacagcttccacagtgggatatgtgctag

SEQ ID NO: 217311 - DNA, 1149 bp, synthetic construct
  misc_feature 1..1149: note = Description of Artificial Sequence: Synthetic coding sequence
  source 1..1149: mol_type = other DNA
atgatgtttcctggactgctcgcacccccagctgggtacccctctctgctgcgcccaactcccactctaacgctgccccagtcactccagagcgccttctccggtcactccagcttcctggttgaagatctcatccggatctccaggccccctgcttatttgcctcgctcggtgccgactgcctctatgtcaccccctcgtcagggggctccgaccgctctcacggacaccggagcctctgacctcggttctcccggtcccggatccaggaggggtgggagtcccccaacagccttttcgcccgcttccgagactacatttctgaaattcggagttaatgcgatactaagctctgggccacgcacagaaacgtccccggctctgctccagagtgttccacccaaaaccttcgcatttccatatttcgaggggtctttccagccctttattcgctctagttactttcctgcctcatcttctgtcgtgcctatccccggtacgttcagctggccgcttgctgctcgaggaaagcctcggagaggaatgctgagacgagcagtcttctccgacgttcagcgcaaggctctggagaagatgtttcaaaagcaaaagtatatctccaaacccgaccggaagaaactcgctgccaaactgggcctgaaggattcccaggacaccgctaggaggactgaaccagctcccgactctaccccacggccacgggcttcccccggagccccagacctcacctcagcatccccttttttctctcccgctggcactttccaggtgaagatttggttccagaacagacgcatgaaatggaggaactcaaaggaacgtgagctcctgtctagtggaggctgcagggagcagactctcccgaccaaactgaatccccacccagatctgtccgatgtgggacagaagggccctggtaacgaagaagaagaggaaggacctggcagccctagccaccgtctggcctaccacgcctccagcgacccccagcatctgcgggatcccagattgccgggacctcttccaccatcacccgctcatagttccagccctggaaaaccctccgacttttctgacagtgaggaagaagaggaaggcgaggaacaggaggagataaccgtgtcctag

SEQ ID NO: 217312 - DNA, 1341 bp, synthetic construct
  misc_feature 1..1341: note = Description of Artificial Sequence: Synthetic coding sequence
  source 1..1341: mol_type = other DNA
atgggcgcaggcccatcttgcgacacaccagcgaattgcacctacctcgaccttctggggacttgggtgtttcaggtcggttcctctggcagccagcgtgatgtcaactgctccgttatgggacctcaggaaaaaaaggtggtcgtttatctccagaaactcgataccgcttatgacgatctcggaaactcagggcactttactattatatataaccagggcttcgagattgtcctaaatgactataagtggttcgcattcttcaaatacaaggaggaggggagcaaagttacgacttactgcaacgaaaccatgaccggctgggtacacgatgttctcgggaggaattgggcatgtttcaccggaaaaaaagtcggcaccgcttccgagaacgtgtatgtgaatattgctcacctgaagaattcacaggaaaaatactcaaaccggttgtacaaatacgaccacaattttgtgaaagccattaacgcaatccagaagtcatggacagccaccacatacatggagtacgaaaccctgacgttgggagacatgataaggcgctctgggggacacagtaggaaaataccaagacccaagcccgcacccctgactgccgaaatccaacagaagattctgcatctgcccacgagttgggattggcggaatgtccacggcattaactttgttagccctgttagaaaccaagcatcgtgcggcagttgttatagctttgcctccatgggcatgcttgaggcccgtatcaggatcttgaccaataattctcagacgcccattctgtctccccaggaagtggtgagctgctcgcaatacgcacaagggtgcgaagggggatttccttatttgatcgctggaaagtacgcgcaggatttcggacttgtggaagaggcctgttttccgtataccggtactgactccccatgcaaaatgaaggaggattgcttcagatactatagctccgaataccattatgtgggcggattctacggagggtgtaacgaggccctcatgaaattagagctggtacaccatggtcctatggctgtggccttcgaagtgtatgacgactttctccactacaaaaagggaatctaccaccacacaggcctgcgcgatcccttcaatccctttgagttgaccaatcacgccgtgctcctggtgggatacggcaccgactcagcctcaggaatggattactggatcgttaagaattcgtggggcaccggatggggagagaacggatatttccgaattaggcggggtacagacgaatgcgctatcgagtccatcgccgtggcagcgaccccaattccgaagctgtag

SEQ ID NO: 217313 - DNA, 414 bp, synthetic construct
  misc_feature 1..414: note = Description of Artificial Sequence: Synthetic coding sequence
  source 1..414: mol_type = other DNA
atgggcgcaggcccttccctgcttctggccgctttgttgctactcctctccggcgatggggctgtgcgctgcgacactccggctaactgcacatacctggacctgctgggaacctgggtgttccaggtggggtcctccgggagccagagggatgtgaattgctcagtgatgggccctcaggaaaaaaaagtggtggtctatctacaaaagctggacacagcgtacgatgatctgggaaactctggtcacttcacgatcatttacaaccaaggttttgagatcgttttgaatgattacaagtggtttgcctttttcaaggacgtgacagacttcattagtcatctgtttatgcaacttgggaccgtgggcatttacgacttgccacatctgaggaacaagttggtgataaaatag

SEQ ID NO: 217314 - DNA, 426 bp, synthetic construct
  misc_feature 1..426: note = Description of Artificial Sequence: Synthetic coding sequence
  source 1..426: mol_type = other DNA
atgggagcagggccatctctgctgctggctgccctactgctactgctctctggagatggagccgtgagatgcgatacccctgctaattgcacctacctggacctactagggacctgggtattccaggtgggctcatcaggctcacagagagacgttaactgttccgttatgggaccccaggaaaagaaagtggtagtctatctgcaaaagctggataccgcatatgatgacctgggtaactcaggtcatttcactatcatctataaccagggcttcgaaattgttctgaacgactataaatggtttgccttttttaaagatgtgacagatttcatttcccatctcttcatgcaactcggaaccgttgggatctatgacctgccgcacctaagaaataagctggccatgaataggcgatggggctag

SEQ ID NO: 217315 - DNA, 1191 bp, synthetic construct
  misc_feature 1..1191: note = Description of Artificial Sequence: Synthetic coding sequence
  source 1..1191: mol_type = other DNA
atgaaaacactcttactgcttttactggtgcttctggagctcggcgaggcccagggatcacttcatagagtgcctttgaggaggcatcctagtctgaaaaagaagctgagagcacggtcccagttgtcagagttctggaaaagccataatttggacatgatccagttcaccgagtcatgcagcatggatcaatccgcaaaggagccactaattaactacctagatatggaatactttgggaccatcagcataggttccccaccacagaacttcacggtaattttcgacacaggcagttcgaacctctgggtcccgagcgtctattgtacatcccccgcttgtaaaactcactctcgatttcagccttctcagagtagcacatattcccaacctgggcaatcattcagtatccaatacgggaccggctcacttagcggcatcatcggcgctgatcaggtgagtgtagagggcctaaccgtagtgggtcagcagttcggggagtcagtcacagaaccgggacagactttcgtcgatgccgagtttgatggaatcctgggactgggatacccaagcttggccgtgggcggtgttaccccagtatttgataatatgatggcccaaaacctagtcgatctgcctatgttttccgtatacatgtccagtaatcctgagggcggtgccggtagcgagctgatttttgggggttatgaccattcacatttctccggttcacttaattgggtgccagttacaaaacaggcttattggcagatcgctcttgacaatatccaggttggcggtaccgtaatgttttgttctgagggctgtcaggcaatagttgacacaggcacaagtttgatcacagggccatccgataaaatcaagcaactccaaaatgccattggcgctgcccctgtggatggtgaatacgctgtggagtgcgccaaccttaacgtgatgcccgatgtcacatttactatcaatggggtcccctacactctatcccccacagcctacaccctgttggactttgttgatgggatgcaattctgtagtagtgggtttcagggtttagatatccaccctcccgctgggcctttatggattctcggagacgtcttcatcagacagttttattctgtgttcgacagggggaacaaccgggtggggctggctcccgcagtcccttag

SEQ ID NO: 217316 - DNA, 1092 bp, synthetic construct
  misc_feature 1..1092: note = Description of Artificial Sequence: Synthetic coding sequence
  source 1..1092: mol_type = other DNA
atgaaaactctgctgctgctcctgctggtgctgctggagttaggggaggcccaaggctcactgcatcgggtgcccctccgacgtcatccaagtttaaagaaaaagctgcgcgcacggtcccagcttagcgagttttggaagtcccataatctggatatgatccagttcaccgaatcttgcagcatggatcagagtgccaaggagcctctgattaattatctcgatatggagtattttggcactattagcatcgggtcacccccacagaactttaccgtgatctttgataccggcagcagcaacctgtgggtgccaagtgtatactgtacatctccggcttgtaagacccactctaggttccagccttctcaatcctccacatattctcagcccggtcagagcttttcaatccagtacggcaccggaagcctgtccggaattatcggcgcagatcaggtgagtgtggagggtctgacagtggtgggtcagcagtttggcgagtccgtaactgagcctgggcagactttcgtggatgccgagtttgatggcatcctgggattagggtatccttccctggcagtcggaggtgtcacccccgttttcgataacatgatggctcagaatctggtggacctgccgatgttctctgtgtatatgtctagtaacccagagggtggggcaggatctgagctgatctttggtggctacgaccatagccatttttctgggagcctgaattgggtgcccgttactaaacaggcctactggcagattgcgctcgataacatgctgtggtctgtgccaacactgacgtcatgtcgcatgagcccgtctccccttaccgagagccccatcccttcagctcagctgcctactccctactggacaagctggatggaatgttccagtgctgccgtcgccttcaaagaccttacttcgaccctgcaactgggacctagcgggagctgggggatgagtagctttgatagtttcacgcagagcctgaccgtaggaattaccgtgtgggattggcctcaacagagcccaaaggaagggccttgcgtgtgtgcatgtctgtcggatcgaccatag

SEQ ID NO: 217317 - DNA, 1206 bp, synthetic construct
  misc_feature 1..1206: note = Description of Artificial Sequence: Synthetic coding sequence
  source 1..1206: mol_type = other DNA
atgaaaacactgctgttattgttactcgttctattggaacttggggaggctcagggttcccttcatcgggttccgcttcgtagacacccttctcttaagaagaaactgcgagcccgatcccaactgtccgagttctggaaaagccacaacctggacatgattcaattcaccgaatcatgttccatggatcagtctgcgaaggagcccctgattaactacctggacatggagtactttggaacaatctcaatagggtctcctccgcaaaatttcaccgttatcttcgataccggatcttctaatctatgggtgccatctgtctactgtacgtcccccgcttgtaagactcattccaggttccaaccatcacagtcttccacttactcccaaccaggacaatcctttagtattcagtatgggactggctctctgtcgggtattatcggagctgaccaggtgagtgccttctcttatcaggtcgaaggcctgaccgtcgtgggccagcaattcggggaatctgtgacagagccgggtcagactttcgtggatgccgaatttgacgggatcctgggcttagggtatcccagtttagcagtggggggagtgactcccgtgttcgacaacatgatggcacagaacctcgtcgacctgcccatgttttctgtgtacatgtctagcaatccggagggaggggcagggagcgagctgattttcggaggctacgaccactctcatttttccgggtcccttaattgggtgccagtcacaaagcaggcatactggcaaatcgctctggataacattcaggtgggtggaactgttatgttctgctccgagggctgccaggctatcgttgataccggcacctccctgatcacgggtccaagtgacaagatcaaacagctgcaaaatgctatcggcgctgccccagtagacggagagtatgctgtggagtgcgccaatctgaacgtgatgccagatgtgaccttcactataaatggagtgccttatacactaagtcccactgcatacactctgcttgactttgtggacggaatgcagttttgctcttctggcttccagggcctggacatacatccccctgccggacctctgtggatactgggcgacgttttcattcggcaattttatagcgtgttcgaccgcggtaacaatcgtgtgggcctcgctccagctgtgccatag

SEQ ID NO: 217318 - DNA, 867 bp, synthetic construct
  misc_feature 1..867: note = Description of Artificial Sequence: Synthetic coding sequence
  source 1..867: mol_type = other DNA
atggaatacttcggcaccattagtatcggtagccctccgcagaactttaccgttatctttgatacaggatcatccaacctgtgggtcccctcagtctactgtacctctccggcatgcaaaacccacagccggtttcagccgagccagtcttctacatacagccagccaggccagtcatttagtattcagtacgggaccggaagcctgtcaggcattatcggagccgatcaggtgtctgtggaggggctgaccgtggtgggacagcagtttggtgagtcagtcaccgaaccgggacagactttcgtggacgccgaattcgatggaatcctcggactcggatatccttcattagcagttggcggagtgactccggtgttcgacaacatgatggcacagaatctggtggacctgccgatgttttctgtctatatgtccagcaaccctgagggcggtgctggtagcgaacttatttttggaggttacgaccactctcatttcagtggctccctgaactgggttcccgttaccaaacaggcttactggcagatcgcgctggacaacatgctgtggtctgtcccaacactgacgtcatgtcggatgtccccgagccccctaactgagtccccaattccctccgctcagcttcctaccccctactggacttcctggatggagtgcagttccgctgcggtggcgttcaaagacctgacatctactttgcaactggggcctagtggctcctggggcatgtcaagcttcgatagtttcacccagagcctgactgttggcataacggtatgggactggccacagcagtcacccaaggaaggaccctgcgtgtgtgcctgtctgagcgacaggccgtag

SEQ ID NO: 217319 - DNA, 1455 bp, synthetic construct
  misc_feature 1..1455: note = Description of Artificial Sequence: Synthetic coding sequence
  source 1..1455: mol_type = other DNA
atggcgccttggctccagcttttaagtctgctgggactcctgcccggtgccgttgcagccccagcgcagccccgtgccgcatcattccaagcatggggaccaccgtcccctgagctgttagcacccactaggttcgctctggagatgtttaacagggggcgtgccgcaggcactcgtgcggtattgggactagtccgagggagagtccggagagcaggccagggcagtctctacagcctggaggcgacactggaggaacccccttgtaacgatcccatggtgtgcagactccctgtgagcaaaaaaacgttgctgtgcagctttcaggtgctcgatgagctcggtaggcatgtgttgctccggaaggattgcgggccagttgacactaaagttccgggagctggcgagcctaaaagtgcctttacccagggctcagcaatgattagcagcctgtctcagaaccaccccgacaataggaacgaaaccttcagctctgttataagccttcttaatgaggaccctttgtctcaggacctgcccgtgaagatggccagcattttcaagaactttgtgattacatacaataggacttatgagagtaaggaggaggcaagatggcggctatcagtgttcgtcaacaatatggtccgcgcacagaagattcaggccctagatagaggcacagcacagtacggcgtgaccaagttctccgacctgaccgaggaggagttccgtacaatctatcttaacaccctgctgaggaaggaaccaggcaacaaaatgaaacaggccaagagcgtgggggatctggcccctcccgaatgggactggcgcagcaaaggtgccgtgacaaaggtcaaggaccaggggatgtgtggcagctgctgggccttcagcgtgaccgggaacgttgaggggcagtggttcctcaaccagggcacacttctcagtttgtccgagcaggaacttctggactgtgacaaaatggacaaggcttgcatgggcggtctcccttccaacgcgtactctgccataaagaatttgggcggtctggaaaccgaagacgattatagctatcagggccatatgcaaagctgcaatttctcggccgagaaagctaaggtgtacataaatgactctgtcgagctgagccagaacgagcagaagctcgctgcctggctggccaaacggggtccaataagcgtcgccatcaatgcctttggaatgcagttttaccggcatggaatatctcgccctctgcggccattgtgtagcccttggctcatcgatcacgctgtgctactcgtagggtacgggaaccgaagtgacgtcccattctgggctataaaaaacagctggggcaccgactggggtgagaaaggctattattacctgcatcgagggtccggcgcttgcggagtcaacaccatggccagctccgccgtggtggattag

SEQ ID NO: 217320 - DNA, 675 bp, synthetic construct
  misc_feature 1..675: note = Description of Artificial Sequence: Synthetic coding sequence
  source 1..675: mol_type = other DNA
atggccgcagccgtgccacagcgcgcatggaccgtggagcagctgcggagtgagcagttacccaaaaaggatataattaagttcctgcaggagcatggaagcgacagctttcttgctgaacacaaactcttggggaacattaagaacgtggccaaaactgcgaacaaagaccaccttgtaacagcatacaaccacctgttcgagacaaagaggtttaaggggactgagtccatctccaaggtatctgaacaggtcaagaacgtcaagctgaatgaggataaacctaaagaaacgaaaagtgaggagaccttggatgaaggacccccaaagtatacaaaaagtgtgctgaaaaaaggtgataagactaacttcccaaagaaaggggatgtcgtccattgctggtataccggaacattacaggacggcactgtgtttgatacgaacattcagacttctgcaaaaaaaaagaagaatgctaaacctttgagttttaaggtgggggtaggaaaggtgattcgaggatgggatgaagcactcctcaccatgtccaagggcgaaaaggccaggcttgagattgaacctgaatgggcctatggcaagaaagggcagcccgacgctaaaatcccacctaatgcaaaacttactttcgaagttgaactagtcgatatcgactag

SEQ ID NO: 217321 - DNA, 801 bp, synthetic construct
  misc_feature 1..801: note = Description of Artificial Sequence: Synthetic coding sequence
  source 1..801: mol_type = other DNA
atgagctccgtcttcgggaaacccagagccggttccgggccacagtctgcaccactcgaggtaaatttggcaattctgggccgacgcggtgccggaaaatccgcacttaccgtcaagtttcttacaaagcggttcattagcgagtacgatcccaacctggaagacacttactcgagtgaggagaccgtggaccaccagccagtgcacctgagagtgatggatactgctgatctggatacccctagaaactgcgaaaggtacctcaactgggctcacgcattcttagttgtttattcagttgatagccggcagagtttcgattcttccagctcatatttagagctgttggctcttcacgcaaaagagacccagcggtcgatacctgcgctgcttctgggcaacaaactcgacatggcccagtatcgacaggtgacaaaggccgaaggagtagccctggcaggtcgatttgggtgtctgttcttcgaggtgagcgcttgtctcgacttcgagcatgtgcagcacgtctttcacgaagcagtcagagaagcacggagggagcttgaaaaatctcccttaacacgacctttatttatctccgaggagagggcgctgccccaccaagcccctttaacagcgagacacggtcttgccagctgtacattcaatacactgtccacaataaatctgaaagagatgccaactgtggcccaggccaagttagtgaccgttaagtcctcccgcgcacagagtaagcggaaagcacctaccctgactctccttaaaggttttaagatcttttag

SEQ ID NO: 217322 - DNA, 972 bp, synthetic construct
  misc_feature 1..972: note = Description of Artificial Sequence: Synthetic coding sequence
  source 1..972: mol_type = other DNA
atgtgggccactttgcccctgctttgtgctgccgaactttgcgttaattccctggagaagtttcatttcaagtcctggatgagtaagcacagaaagacttatagtaccgaggagtatcatcacaggctacaaacgtttgcctccaattggcgtaagattaatgcccacaataacggcaaccacacattcaagatggcactgaaccaatttagcgacatgtcgttcgctgagatcaagcacaaatatctgtggtctgaacctcagaactgcagcgcaacgaaaagtaattacctcaggggcacaggtccctatccccctagcgtggactggcgtaaaaagggcaattttgttagcccggtgaagaaccagggcgcttgcggcagttgctggaccttctctactactggtgccttggagtccgcaatcgctatcgcgacggggaagatgctttcactagcagagcagcagctggtggactgcgcccaagacttcaataatcacggctgccaaggaggcctgccctcccaggccttcgaatacattttgtataacaagggaataatgggcgaggacacttacccctatcaggggaaggatggctactgcaagttccagcctggcaaagcaattggttttgtcaaagatgtcgccaatatcacgatatatgacgaggaggctatggtggaggccgtggccctttataacccagtgtcattcgcctttgaagtaacccaggatttcatgatgtacagaacaggcatctattcttcaacgtcctgccataaaacaccggataaagtgaatcatgccgttcttgctgtcggctatggcgagaagaatggtatcccctactggatcgtaaagaacagctgggggccacaatgggggatgaacggatacttcctgattgagcgcggaaagaatatgtgcggcctcgctgcatgtgccagttaccccattccgctcgtatag

SEQ ID NO: 217323 - DNA, 621 bp, synthetic construct
  misc_feature 1..621: note = Description of Artificial Sequence: Synthetic coding sequence
  source 1..621: mol_type = other DNA
atgtgggcaacgctcccgctgctgtgcgctggagcgtggctgcttggagtgcctgtttgcggagctgcggagctgtgtgtcaattcccttgaaaaatttcattttaaaagctggatgtcaaagcaccgaaaaacttacagcaccgaggaataccaccacaggttgcaaacattcgctagcaattggcggaaaatcaatgctcataacaacgggaatcacacattcaaaatggctcttaaccagttttctgacatgagctttgccgagatcaaacataaatacttgtggtctgaaccccagaactgttccgccaccaaaagcaactatttacgtgggactggaccttacccaccatcggttgattggaggaagaaagggaacttcgtctccccagtcaagaatcaagtgtgccttgctatatctatcttgtccttgcagaacggccatactccccgacagtacacaagaaagaataattccaaagggccacagaatcatcacaagcatatacccgcttcagtttcttcccgtcacctgagccctgggaggccctctctgccccagctgcgtgagatctgtgaagggaaaagattgggcgaggcctccgtgaatttaggttag

SEQ ID NO: 217324 - DNA, 990 bp, synthetic construct
  misc_feature 1..990: note = Description of Artificial Sequence: Synthetic coding sequence
  source 1..990: mol_type = other DNA
atgtggggactgaaagtgctgctcctgcctgtagtctccttcgcgctgtacccagaagagatacttgacactcactgggagctgtggaagaagacccacaggaaacagtacaacaacaaagttgatgaaatttcccgacggctgatctgggaaaagaacctgaagtatatttccatccacaacctcgaggccagccttggagtccacacttacgagttggctatgaaccaccttggcgacatgactagtgaagaagtcgtgcagaaaatgacagggctgaaggttccgctctcccacagtcgctccaacgacactctgtacatccctgaatgggaaggcagagccccagattcagttgactatcgcaaaaagggctatgtgacccctgtgaaaaaccagggacagtgcggcagttgctgggcctttagttccgtgggggctttggaaggtcagctcaagaaaaagaccgggaaactgttaaatttatctcctcagaatttggtggactgtgtcagcgaaaatgacggatgcggcggaggttatatgacaaacgccttccaatatgtacagaagaaccgcggtatcgattcggaggacgcatatccctatgtgggccaagaagagtcctgcatgtataaccctaccggcaaagctgccaaatgcagaggttatagggagattccagaaggcaatgagaaagcactgaagcgggctgtcgcccgagttggtccagtttccgtggctattgatgcctctctgacctctttccagttttatagcaagggagtgtattatgatgaatcatgcaatagtgataatctaaatcacgccgttttggccgttgggtatggcatacagaaggggaataagcactggatcattaagaattcatggggagaaaattggggaaacaaaggatatatactgatggcaagaaacaaaaataacgcctgtggaatagccaatctggctagctttcccaaaatgtag

SEQ ID NO: 217325 - DNA, 777 bp, synthetic construct
  misc_feature 1..777: note = Description of Artificial Sequence: Synthetic coding sequence
  source 1..777: mol_type = other DNA
atgcacaaagagaacgaagaaatctataacgtgagcgagaatagaaaacactgcccaatttttccatgtcctctgttaacgcgttctggcaaagtgcccgagtttagacatgaacgagaagagagactggaggagatgatcagacgccagaatctcgacggaaacctctcattcgtgatgtggggattgaaggtattgttactgcctgtcgtaagtttcgccttgtacccagaagagattctagacacgcactgggagttatggaagaaaactcatcggaagcagtacaacaataaagtggacgaaatctcacgaagactgatctgggaaaagaatcttaaatacattagcattcataacctcgaagccagcctgggagtgcatacatatgaactggccatgaaccacctgggggacatgacctcagaggaagttgtgcagaagatgactggacttaaggtacccctttcacactcccgatccaacgatacactgtatatacctgaatgggaaggacgggcacccgatagcgtggattaccggaagaaaggttatgtgacccccgtgaaaaaccagggacaatgcggaagttgttgggcattttcgagtgtgggagctctagaagggcagctaaagaagaagactgggaaactgctgaacctatcgccacagaacctcgtggactgtgtatctgaaaatgatgggtgcggagggggttatatgaccaacgcgtttcagtatgttcaaaagaaccgaggaatcgatagtgaggattag

SEQ ID NO: 217326 - DNA, 1005 bp, synthetic construct
  misc_feature 1..1005: note = Description of Artificial Sequence: Synthetic coding sequence
  source 1..1005: mol_type = other DNA
atgaatttaagtcttgtgctggctgccttttgtctgggcatcgcaagcgcagtcccaaagttcgatcagaaccttgataccaaatggtatcaatggaaggccacacaccggagactgtacggtgccaatgaagaagggtggagacgagccgtctgggagaagaacatgaaaatgattgaactccacaacggggagtacagccaaggcaagcacgggttcaccatggccatgaatgcctttggtgacatgactaacgaagaattccggcagatgatggggtgttttcggaaccagaagttccgtaagggaaaggttttcagggaaccgctgttcctagatcttcccaagagtgttgactggagaaagaagggatatgtcactcccgtgaagaatcagaaacagtgcgggtcttgctgggcctttagcgcgaccggcgcattagagggtcaaatgtttcgcaaaacaggaaagctcgtatccctgtcagagcagaatctggttgactgtagccgacctcaggggaatcagggctgcaatgggggattcatggcacgggcatttcagtatgtcaaggagaatggcggacttgactccgaggaatcctatccatatgtagcagttgacgagatctgcaaataccgcccagagaactccgtggcgaacgatacaggctttacagtggtggccccaggaaaggaaaaagctctgatgaaagctgttgcgacagtggggcctatctccgtggcgatggatgcgggtcactcgtcgtttcagttctacaaatccgggatttattttgaaccagactgttccagcaagaacctggatcatggcgtgctggttgttgggtatgggttcgagggcgcaaactctaacaattccaagtactggttagttaaaaattcctggggcccagagtggggatcaaatggatatgtgaagatcgccaaggataagaacaatcactgtggcattgctacagccgcttcttatccgaatgtctag

SEQ ID NO: 217327 - DNA, 1005 bp, synthetic construct
  misc_feature 1..1005: note = Description of Artificial Sequence: Synthetic coding sequence
  source 1..1005: mol_type = other DNA
atgaatctatccctcgtgcttgctgcattttgcctgggtattgcctcggctgttccgaagtttgatcaaaatcttgacacaaagtggtatcagtggaaggccactcaccggagactgtatggagccaatgaggaaggctggagacgggctgtttgggagaagaacatgaagatgatagagctgcataacggagagtactcgcaagggaaacatggttttaccatggctatgaatgccttcggtgacatgaccaatgaggagttcagacagatgatgggctgttttaggaatcaaaaattcagaaaggggaaagttttccgcgagcctttgttcctcgatctccctaaaagcgtggactggcgaaaaaagggatacgtcacacccgttaagaatcagaagcagtgtggctcctgttgggccttcagcgctacaggggcactcgagggtcagatgttcagaaagaccggcaaattagtgtcgctgagtgagcagaaccttgtagattgttctcggcctcaaggaaaccaggggtgtaatggaggatttatggccagagcgttccagtacgtcaaggagaacgggggactagacagcgaggagagctacccctacgtcgctgtggacgaaatctgcaagtatcgcccagaaaactccgtcgccaacgacactggattcacagtcgtggccccaggcaaggagaaagctttaatgaaggctgtggcgaccgtgggccctatcagtgtagcaatggatgccggtcactctagctttcaattctataaatcgggaatttatttcgagcccgattgcagttctaaaaacctggatcacggagtgctcgtcgtcggatacggttttgaaggagcaaatagcaacaattcgaaatactggctcgtgaagaactcgtggggcccagagtggggttcgaatggatacgtgaaaattgctaaggataaaaacaatcattgtggcatcgccactgctgctagctatcctaatgtctag

SEQ ID NO: 217328 - DNA, 996 bp, synthetic construct
  misc_feature 1..996: note = Description of Artificial Sequence: Synthetic coding sequence
  source 1..996: mol_type = other DNA
atgaagagactcgtgtgcgtacttctggtgtgctcgagcgccgtcgcacaactgcacaaggacccaacattggatcatcactggcacctgtggaaaaaaacttatggaaagcagtacaaggaaaagaatgaggaggcagtaagacggctgatttgggagaagaacctgaagttcgtgatgctccacaatctggagcactccatggggatgcactcttacgatttagggatgaatcatctgggcgatatgacaagtgaagaggtaatgtccctcatgagtagcctgcgggtgccgagccagtggcaacgtaatataacctacaagagcaacccgaaccgtatactccctgattccgttgattggcgagagaagggctgtgttacggaagtgaagtatcagggcagctgcggtgcatgctgggccttttccgctgtcggcgcactggaggcacagctaaagctcaagactggcaagcttgtgtctttgtccgcccagaacctggtcgactgttcaacagaaaagtatgggaataaagggtgcaacggaggcttcatgaccaccgcattccagtacatcattgataataagggcatcgatagcgatgccagttatccttataaggcaatggatcagaaatgtcagtacgactccaaatatcgggctgccacctgcagtaaatataccgagctgccctacggccgagaggacgtgctcaaggaggctgttgctaacaaggggcctgtgagtgtcggggtggatgcaagacaccctagcttcttcctctatagaagcggtgtctactatgagccttcgtgcacacagaatgtaaaccacggggtgctagtggtcggctacggcgacttaaatgggaaggagtattggcttgtgaaaaactcctggggacataattttggcgaggaagggtacattagaatggctcgtaataaaggaaatcactgcggcattgctagcttcccgagctatcccgagatttag

SEQ ID NO: 217329 - DNA, 846 bp, synthetic construct
  misc_feature 1..846: note = Description of Artificial Sequence: Synthetic coding sequence
  source 1..846: mol_type = other DNA
atgaagaggctggtgtgtgttttattagtgtgctctagtgcagtggctcagctgcacaaggatcctacgctagaccatcactggcacctgtggaaaaagacgtatggcaagcagtacaaggagaagaacgaagaggccgtaaggcggcttatttgggaaaaaaacctcaaattcgtgatgttacacaatctggagcattccatgggcatgcacagttacgatctgggaatgaatcatctgggcgatatgggatcctgcggtgcatgttgggcgttcagcgcagttggcgcactagaagcccagctgaagctgaagacaggtaaattggtgagcctgtctgcccaaaacttggtggattgttcgactgagaaatatggcaacaagggttgtaacggagggtttatgactactgctttccaatatatcatagacaacaaaggcatcgactcagatgcaagttatccctataaggcgatggaccagaaatgtcagtacgactcgaaatatagggctgccacctgctccaaatacaccgagctaccctacggcagggaagacgtgctcaaagaagcggtggcgaacaagggtcccgttagtgttggtgtggatgctcggcacccgagctttttcttgtacagatccggcgtatactatgagccctcgtgtactcagaatgtgaatcatggggtcttggttgtcggctacggcgacctcaacgggaaggaatattggttagtgaagaatagctgggggcataacttcggcgaggagggctacatccggatggctcggaacaagggtaaccattgcgggatcgccagctttccctcctaccccgaaatttag

SEQ ID NO: 217330 - DNA, 1131 bp, synthetic construct
  misc_feature 1..1131: note = Description of Artificial Sequence: Synthetic coding sequence
  source 1..1131: mol_type = other DNA
atggctctcacagcccaccctagttgcctgcttgcactcttggtcgccggactggcacaaggaatacggggtccactgcgcgctcaggatctcggaccccaacctctggagttgaaagaagcatttaaactgtttcagatccagttcaatcgctcttacctgtccccagaggagcatgcccatagactcgacatcttcgctcataacctagcgcaggctcaaagactgcaggaggaagacttaggcacagcagaatttggagtaaccccgttctctgacctgacagaggaggagtttggacaactgtatggataccgccgagctgcgggtggtgtgccctctatggggcgagagatcagatccgaggaacctgaagaatccgtgcccttctcctgtgactggcgcaaagtcgcatctgctatcagccctatcaaggaccagaagaattgcaactgttgttgggccatggcagcggcaggcaatatagaaacgctatggcgcatctccttttgggatttcgtggacgtgagcgtgcaagagcttctggattgcgggaggtgtggcgatggctgccacgggggttttgtctgggatgcctttataaccgtcctaaataattcgggcttggcttctgaaaaggattatccctttcaggggaaggtcagggctcatagatgtcacccaaagaagtaccagaaggtggcttggattcaggatttcataatgctccagaacaacgagcaccgcatcgcacagtacttggccacatatggcccaatcacagttaccattaatatgaagcccctgcagttgtacagaaagggggtgattaaagccaccccaaccacctgtgatccccagttagttgaccattccgtcttactggtcggttttgggtccgtgaaaagcgaggagggaatctgggctgaaacagtgtcctcacaaagccagccccagccccctcatcccaccccatattggatccttaagaattcttggggcgcacagtggggcgagaagggatactttcggctacatcgaggctcaaatacttgtggtatcacaaagttccctcttacagcacgggtgcagaaaccggacatgaagcctcgtgttagctgccccccttag

SEQ ID NO: 217331 - DNA, 2679 bp, synthetic construct
  misc_feature 1..2679: note = Description of Artificial Sequence: Synthetic coding sequence
  source 1..2679: mol_type = other DNA
atgacggaccccttctgcgtcgggggaaggcgactgccaggatcttcaaagagcggccctgggaaggacggctccaggaaggaagtcaggttgccaatgttacatgatcccccaaagatgggtatgcctgtagtcaggggcggtcagactgtaccagggcaagctcctctgtgcttcgatcctgggtcacccgctagcgataagacagagggaaaaaaaaaaggccgacctaaggcagaaaaccaagccttaagggatattcctctgagtttgatgaacgactggaaagacgagtttaaagcccattctagggttaaatgtccaaatagcgggtgttggctggagttccctagtatttacgggctaaaatatcactaccagagatgtcagggaggagctatctccgaccggttggcctttccatgtcccttttgtgaagctgcattcacctcaaagactcagctcgagaaacaccggatctggaaccacatggataggccccttcctgcgtcaaagcctgggccaatctcccggcctgttactatttctcgcccagtgggagtgtcaaaaccgattggcgtttcaaagcccgttacaatcggtaaacctgtgggtgttagtaagcccattggtatttctaagcccgtctccgtcgggaggcccatgccagtgacaaaagcaattccagtcacaaggcccgtgcccgtgaccaagccagttaccgtgagtagacccatgccagtcacaaaggcgatgcccgttaccaaacccattactgttacaaaatcggtgccagtaacaaaacccgtgccggtgaccaaacccatcactgtgaccaagctcgtgaccgtgacaaagccagttcccgtcacgaagcccgtaaccgtgtcacgtcccatcgtggtgtctaagccggtaactgtctcccgcccaatcgcgatatctcgtcacacccccccttgtaaaatggtcttgctcactagatccgagaacaaagcgcctagggccacagggcgaaactctggcaaaaaacgcgcagctgactcccttgatacatgtccaatccccccaaagcaagcaaggccggagaatggcgaatacggaccaagcagcatggggcaatcgtccgccttccagctgtccgccgacacctcatctggttcactctcacccggatcaaggccatctggtggtatggaagccctaaaggcagcaggtcctgcttcaccaccagaggaagaccctgagcgcacgaaacacagacgcaaacagaaaacccccaagaagtttactggggaacaacccagtattagtgggacatttggcctgaagggacttgtgaaagccgaggataaagcgcgagtacatagatccaagaagcaggagggccctggccctgaagatgcacgcaaaaaagtccccgctgcccctatcacagtgagcaaggaagcaccggctcctgttgctcatccagcacccggtggccctgaagaacagtggcagcgcgctatccacgagcggggagaagctgtctgcccaacctgcaatgttgttaccaggaaaactctggtgggcctgaagaagcatatggaggtatgccagaaactccaggatgctctcaaatgtcagcactgccggaagcagtttaaatccaaggcaggcctgaactaccacaccatggctgagcattcggccaagccaagtgacgccgaagcctctgaggggggtgaacaagaagagcgtgaaaggctgcgcaaagtgctgaagcaaatgggccgtttgcgttgtccacaggaaggctgcggggcagcgttttcatcattgatggggtaccagtaccaccaaaggagatgcggaaaacccccatgtgaagtggacagtccaagctttccatgcacgcattgcggcaagacatatcggagtaaggcagggcatgattatcacgtccggtctgaacacaccgcccctccccctgaagaaccaactgataagtctcccgaagcagaggacccccttggtgtcgagagaaccccctcaggacgtgtccgtcgcactagcgcccaagtggcggtcttccatctgcaggaaattgcagaagatgagttggcaagggactggactaaaaggaggatgaaggacgatctcgtgccagagactgccaggttgaactacactcgaccaggactgcccactctaaacccacagcttctcgaagcttggaagaatgaggtgaaggaaaaaggccacgttaattgccctaatgattgttgtgaagctatatattccagcgtgagtgggcttaaggcacacctggcctcctgtagcaaaggggcacatctggcaggcaaatatcgttgcttgctgtgccctaaagaattttcatcagagtccggggttaaataccacatcctcaagacccatgccgaaaactggttcaggaccagcgccgatcccccacctaagcacagatcccaggatagcctcgtcccgaaaaaggagaaaaaaaagaatttggctggcggaaaaaaacggggacgcaagccaaaggagcgcacgcctgaggaacctgtagcaaaactgccacccagacgcgatgactggcctccgggatgcagggataagggcgctcggggtagcactggacgcaaggtcggggtctcaaaggcccctgaaaaatag

SEQ ID NO: 217332 - DNA, 2343 bp, synthetic construct
  misc_feature 1..2343: note = Description of Artificial Sequence: Synthetic coding sequence
  source 1..2343: mol_type = other DNA
atggatcagaattcagtgcccgaaaaagctcagaatgaagctgataccaacaatgccgacaggtttttccgcagccattctagtcccccacaccatcgccctggtcattctagggctctccatcactatgaattgcatcaccatggagtcccacatcaacggggtgagtcccaccatcctcccgagtttcaagacttccacgatcaggccctcagtagtcacgtgcatcagtcccaccatcactcagaagcgagaaaccacggtcgggctcatgggccaactgggttcggactggccccatcgcagggtgctgttcccagccaccgctcctacggcgaggactaccacgatgaactgcaaagggacggcagacgccaccatgatgggtcccagtacggaggattccaccaacaaagtgattctcactaccaccgtgggagccatcacgggagacctcagtaccttggagagaacctctcccactactcttctggcgtgccacatcatggggaagcctcccatcatgggggatcgtatttgccacatggcccaaatccatactccgagagtttccaccactcggaggccagccacttgtctggtctacagcatgacgagtcccaacaccatcaggtccctcatcggggttggccacaccatcatcaggtccaccaccacggaagatccagacatcacgaggcccaccaacacggcaagtcaccccaccacggcgaaacaatctccccacattcttccgtgggatcttaccagagaggaatctctgattaccatagcgagtatcatcagggagatcaccaccctagcgagtaccaccacggtgaccacccccaccacactcaacatcattaccatcagacacacaggcatagggattatcaccagcaccaggatcatcatggggcttaccacagtagctatctgcacggtgactacgtccagtcaacaagtcaactaagtatacctcatactagtcgatccctcatacatgatgcgcctggacccgctgcatccaggacaggagtgtttccctaccacgtggctcacccacggggaagcgcccacagtatgacgaggtcatcgtccacaattcggagtagggtgacacagatgtccaagaaggtgcacacccaggacatcagcacaaagcattcagaggactggggcaaggaagagggccagttccagaaaaggaagaccgggagactgcaaagaacccggaagaaaggccactcaacaaatcttttccagtggttgtgggagaagttgacctttctcatccagggcttcagggagatgattaggaatctcactcagagcctggcctttgagaccttcattttctttgtcgtctgcctaaacaccgtaatgctagtggctcaaaccttcgcggaggttgagatccggggtgaatggtacttcatggcccttgattcgatattcttctgcatctacgttgtggaggctttgttgaagattatcgccctcgggctgtcctattttttcgatttttggaataatctggacttcttcattatggccatggccgtactcgatttcttactcatgcagacacatagttttgccatttatcaccagtcactctttcgtattcttaaggtttttaaatcccttcgggctcttcgcgctatacgcgtgctgcgacgcctgtccttcctgacgagcgtgcaagaagtcacaggcaccctgggacagagtttgccgagtatagcagccattctaatcctgatgttcacatgcctgttcctatttagtgccgtcctacgtgctttatttcggaaaagcgatcccaagcggttccagaatatcttcaccacaatttttaccctgttcaccctgctcaccctcgacgactggagcctcatctatatggatagccgtgctcagggagcctggtacatcattcctattctagtgatttatattattatccaatattttatattcctgaacttggtcatcacagtactggtggactctttccagacggcactcttcaaagggctggagaaagcaaaacaagagcgtgccgctagaatacaggagaaactgttggaagactccttaacagaacttcgagcagccgagcccaaagaggtcgcttccgaaggtaccatgttaaaaaggttaatcgagaaaaagtttggtacaatgacagagaagcaacaggaactgcttttccattaccttcaactggtcgcctccgttgaacaagaacagcaaaagttcagatctcaggctgccgtaattgatgagattgtggatacaactttcgaggccggtgaggaagacttcagaaactag

SEQ ID NO: 217333 - DNA, 1197 bp, synthetic construct
  misc_feature 1..1197: note = Description of Artificial Sequence: Synthetic coding sequence
  source 1..1197: mol_type = other DNA
atgtcgcagcatcgccatcagcgccactctcgggtcatcagctccagccctgttgacacaacttcggtaggattctgccctacttttaagaagtttaagaggaatgacgatgagtgtcgggctttcgtgaagcgggtcattatgagcagattcttcaaaatcataatgatctccacggtgactagcaacgctttttttatggcgctgtggacatcttatgacatccgctacagactgttcaggctgcttgaattttcggagattttctttgtgtcaatttgtaccagtgaactttccatgaaggtgtacgtagacccaattaattactggaaaaatgggtacaatcttctggatgtgatcattatcattgtgatgttcctgccatatgctttgaggcaactcatgggtaagcaatttacttacctctatatcgcggatggaatgcaaagcctgaggatccttaaacttattgggtattctcagggaatcagaacccttatcacagcggtgggtcagactgtatacacagtcgcatctgtcctgctactgctgtttctgttaatgtacatctttgcgatcttgggcttttgcttattcggttcaccagacaacggcgatcacgacaactggggtaatttagctgctgctttttttaccctgttctcactagcaactgtcgacggatggactgatctgcagaagcaactggacaaccgcgagttcgcactctcccgagctttcacaatcatcttcattctcctggcctcttttatctttctgaatatgttcgtcggcgttatgattatgcacactgaggactcgattaggaagtttgaacgggagctgatgctggagcagcaggagatgctgatgggagaaaagcaggtgatcctgcagaggcagcaggaagagatctctcgtctcatgcatatccagaagaacgccgactgtaccagctttagtgaactggttgagaatttcaagaagacgctctctcatacagaccctatggtgttagacgacttcggcaccagtctgccatttattgacatctatttttcaaccctggattatcaggatactacagttcataagttgcaagaactgtactatgaaattgtacacgtgctctccctcatgctggaagacttaccccaggagaagcctcagagtctcgagaaggtcgacgagaagtag

SEQ ID NO: 217334 - DNA, 1419 bp, synthetic construct
  misc_feature 1..1419: note = Description of Artificial Sequence: Synthetic coding sequence
  source 1..1419: mol_type = other DNA
atgcgggataatgagaaagcatggtggcaacagtggactagccatacggggctggaaggctggggagggacacaggaggacaggatggggttcggaggggctgtagcagctcttcgaggtagaccctcacccctccagtctactattcacgagtcgtacggccgtcctgaggagcaggtgctgatcaacaggcaggagatcacaaataaagctgatgcttgggacatgcaggagtttatcacccatatgtacattaagcaattactgcgccaccctgcctttcagctcctgctggccctcctgctggttatcaacgctatcactatcgcgctgcggacaaattcttaccttgaccaaaaacactatgaactgttttctacaattgacgacatcgtccttaccatcctgttgtgtgaagtcctcttaggctggctgaacggcttctggatcttctggaaggatggttggaatatactgaattttattatcgtattcatcctactgcttcggtttttcattaacgagatcaatataccctcaattaactacacattaagggcactgaggctcgtgcatgtatgcatggctgtggagcctctggctcggattattcgcgtcattctccaatctgtgcccgatatggctaatatcatggtcctaatattattttttatgctggttttttccgttttcggtgtaaccctcttcggggcatttgttcccaagcacttccaaaacatacaggtggccctctatactctttttatttgtatcactcaagacggttgggtggacatctacagcgatttccagaccgaaaagagagagtacgccatggagatcgggggagccatctactttaccatttttattacaattggggcttttattgggataaacctgtttgtaattgtggtgacaactaacctagaacagatgatgaaggccggagagcaagggcagcagcagcgcatcacattctcggaaaccggcgctgaggaggaggaagaaaacgaccagcttcccctagtgcactgcgtcgtggcaagaagcgagaagagcggccttttgcaggaaccactagccggaggccctttatctaacttaagcgagaacacttgcgacaacttttgcttagtattagaggccatacaggagaatctgcgtcagtacaaggaaatcagagatgaattaaatatgattgtggaggaggtacgagcaattcgtttcaatcaagagcaagagtcggaagtgctgaaccgacgatctagtacatccggaagcctggaaacgactagctcaaaagacattagacagatgagtcagcagcaggacctgctgtctgcactggtttctatggaaaaggtacacgatagttcatctcagatacttctgaaaaaacacaagagcagccactag

SEQ ID NO: 217335 - DNA, 3351 bp, synthetic construct
  misc_feature 1..3351: note = Description of Artificial Sequence: Synthetic coding sequence
  source 1..3351: mol_type = other DNA
atggagtctcccctgatctacgtttcagttttgcttctcaatatctttgaattcagttctggcattgtttacaataaagatgacacagaaaagcgattcgcttgcagcaataaggggtttcctcaggaaaatgaaatcattaagctatacctgtttcttgaaaacctaaagattcagtgctttttccagactgaaaacgagattgctagcaaggccatgttatccgtgttcacgtcagggggactggccccttctctaggaatcatgaattccacctataatggcatctttcactttaatctgaccctgttctccgaccgtatactttggttagtcgacattccccgtgagaacatcacacagtccacggacatcgccgcagttgaggagtggttagtgcggattacgctgcaccatggccttaacatctacgccactgagggcacgctgctggatgtaattcgcgagccgatactccagtggaccccaggggatgtcatccctgaaagcgagatctccaagctatacccccatgtggttgatctgaaggtcacaaagtgcccttgcgctaatgacgtcgcgcttctcggtttcattgtggatacaatagttgatggcgtctacattggcattacattcggaggcttttggcatgactatgacacaacctggttcaacatgacacagaccatttatagccagttgcaggaagagtacgaggatctttctctcgtggacatggtgcttaccaatcactttctagtcattctgaccagtcttgggttgttcgtatctgaagacctacggtacccctcccgacacagtctctccttttccagggcagacttttgcggcttcgagagggtcgattacgtaaagggcaaattgtggtacaacgagcgctgctttgctaacagagagcactttgaagtggactacgtgactgtgacttttgagcgtaatagaactctttccgagagcagctcttgcttttactcgcaggaaccttttcttgagtgggttccctgcctaccccacatcttcaaaggaatcaagatttttccaacagtcctaaccttcctggtggaccaggagcggggtactggcgtatacctattttacaataaagttcggaagacagccatcgcgtcagtttcaactttgagaaataacgagccaaattcacagtctaagtttccaatctttagatttccgagttccttttcctcaccagttggcatggtgttccaccctagatctcattttctctacgcgtatggtaatcaaatttggctttcggtcgatggcggtaataccttccaactgatagctaatttccacgacgacataattaagaagaccttccactccttttatacatccgccatcaccttcgtctcgcagagaggaaaggtttattctactaaggctgggatggggagatattcagcagtggggtccgtcactgagaggatcttcacgttgtactatgatcatcttgggttcttgcacaaactgaccctggggagattcgaggccagtgggcctcctaccgcctttggaaactctcgtaatctttttggacagcctcctgacatggggttcgaaaccgccttagcccctcagcatacctccctagatgaaatcattttttttgcttacgttccggaaaatgaaccacaggagacaatatattctaaaaaattcggtaacatccactacgggaaggttatccattccggaaagacaggaagagcctatataaggaaggttttgcagcacactactcccaaggggttcctgtcctcggtaatcgctgagatgaaggagccattcggcctggaagaagtgaacgaaagcagttgtctcagctcctctctgctcatcaacaaggctgggaacgtctacaaattgaccctcgatagccaagtggttcaggccctgtttgaagacactgatattgagaaaaccgtcgttctcccgggttactctagctttttgattacctccatactagataataagaatgcactggcaatcgcaaccatgcctgaaagcgcccctaataatatgaccttcttaaaaagtacttggttcttatacaatttcggccagagaaatggccgaacgtggaagatatattcaaagccatgtaactactggttccaacacgatgacagtccgagcttgaatatcgtgaaatacattgacctgggcaattcatatgttctgaaggcaaaggttatcaggaatgcaaagggctttcggatgctggaaattccgcttctcacagtgttcgtaggaaatcccaacctgttggaagtcaccgcagaggttacctttgacgacactgatagctacgtgattactatctcggccgctagcaaagtccttcaccagggctccacgtctttggctttcatcatgtggtctgcttcaacagagtgcttcgtaactaccatggtaccgactcttaaaagtagttgcagctacctgaggtctatgcatcatattcccagcaagtttatacccttcgaagactggatatcgggagtccataaggactcccagggctttaacttaatcaagaccttaccgatcaactaccgtccaccctcgaacatgggcatcgcaataccacttacagataacttttatcacgccgacccttccaaaccaatccccaggaacatgtttcacatgtcgaagaaaactggcaagttcaaacaatgtgctaatgtttctaccagggaggaatgcaactgtactaaggatcagaagttctctcatgcagtggcattctctgattgcagggaaaaggttccacgttttaaatttccaataacccaataccctgttagtctagagatcatcaatgaggacggacgcgttcctctgcagtcaccttatctggtgactgtgacggaggtgaacatgagacataactggaaacttaagcacaccgtgccagagaacattaagcgcatgaaacagcttgttgagccaattctgggggctgccgtgtacaacccctccgggctgaacctgtctatcaaaggttctgagctctttcactttagggtcactgtgatctccggcgtcaccttctgtaatttaatcgaagagttccaaatttacgtggacgaggcacccctccccttccctggccatacccttatcgcggtagccacagcagtggtactcgggggtctgatctttattgcatttatgttccagctgcagggcattcacccatggcgaacattccagaggtggattaggcggaaccaagaaaagttctcctcaataagtctgtccgaacttatccaccggagcaagtcagaggagtag

SEQ ID NO: 217336 - DNA, 225 bp, synthetic construct
  misc_feature 1..225: note = Description of Artificial Sequence: Synthetic coding sequence
  source 1..225: mol_type = other DNA
atggagtcacccttgatctacgtgagcgtgctgttactgaatatcttcgagttttccagcggtattgtgtataataaagatgacaccgagaagagatttgcctgcagcaacaaggggtttccccaggaaaatgaaattattaagctgtacttatttcttgagaaccttaaaatccagtgcttcttccagaccgagaacgaaatcgcttctaaggccatgttatag

SEQ ID NO: 217337 - DNA, 303 bp, synthetic construct
  misc_feature 1..303: note = Description of Artificial Sequence: Synthetic coding sequence
  source 1..303: mol_type = other DNA
atggagagcccattgatctatgttagtgtgctgctgctgaatatttttgagttctccagtggcattgtgtacaataaagatgacaccgagaagcgctttgcatgctcaaataaggggtttccacaggaaaacgagattatcaagctgtacttgtttctggagaacctgaaaattcagtgtttcttccagacggagaatgaaattgcctcaaaggcaatgctatcagtgtttacgtcgggtgggctcgctcctagcctgggcatcatgaacagtacttataacggcatcttccatttcaattag

SEQ ID NO: 217338 - DNA, 225 bp, synthetic construct
  misc_feature 1..225: note = Description of Artificial Sequence: Synthetic coding sequence
  source 1..225: mol_type = other DNA
atggagtcccccttgatatacgtgagcgtcctgctcctcaatatttttgagttcagctcaggaatcgtctataacaaagacgatacagagaaacggttcgcgtgctccaataaaggctttcctcaggagaatgaaatcataaaactttatctgtttcttgagaacctgaagatacagtgcttcttccagacggagaacgagattgccagtaaggccatgttgtag

SEQ ID NO: 217339 - DNA, 795 bp, synthetic construct
  misc_feature 1..795: note = Description of Artificial Sequence: Synthetic coding sequence
  source 1..795: mol_type = other DNA
atgcataaccctgacggaagcgccagcccaacagcggacccagggtctgagcttcagacactgggacaagcagccaggaggccccctcctccccgtgctggacacgatgcccctcgacgtactcggccatcagcgagaaaacctttatcctgtttttcccgaagacctatgcctacccgcgagccccctaagacgcgtggcagccggggacacctgcacacacacccccctggacccggacccccactccagggactagcccctcgaggtctaaagaccagcgcaccacgccctccctgtcagccccagcctggcccacataaggccaagaccaagaagatcgttttcgaagacgagctcctgtcacaggcgctgctgggagcgaaaaaacccatcggcgctatcccaaagggacacaagccacggcctcacccagttccagactacgaattgaagtatcccccagtcagcagtgaaagagaacggtctcgctacgtcgccgtttttcaagatcagtatggcgagttcttggagctgcagcatgaggtagggtgcgcccaggcaaagcttcgacagctggaagcactgttgtcatcactgcccccaccgcaatcccagaaggaggcacaagtggctgcacgcgtttggagagaattcgaaatgaaaaggatggaccccggatttctcgacaagcaggccagatgtcattatctcaagggtaagctccgccacctgaagacgcaaatccaaaaattcgatgatcagggggactccgagggttcggtgtacttttag

SEQ ID NO: 217340 - DNA, 3480 bp, synthetic construct
  misc_feature 1..3480: note = Description of Artificial Sequence: Synthetic coding sequence
  source 1..3480: mol_type = other DNA
atgtgtggccctgcaatgttcccagctgggccaccttggcccagagtccgcgttgtgcaagttctctgggcactcctggccgtgctgctggctagttggagactttgggctatcaaagacttccaggagtgtacatggcaggtagtgctaaacgagtttaaacgggtgggcgagagtggcgtgtcagacagcttcttcgagcaagagccggtggacacagtgagctccctgtttcacatgctggttgactcacccatcgatccatcagaaaaataccttggattcccttactatctgaaaataaattactcctgtgaagaaaagccctctgaggacctggtccgcatgggccacttgaccgggctcaaaccattggtgctcgtgacctttcagtctccagtgaacttctatcgctggaaaatcgagcaactgcaaattcagatggaagctgcacctttccggagtaaggaaccttgtatggcagaggaagtctgcagcatgtcctggtatacacccatgcccatcaaaaaaggctcagttgtgatgcgggtggatatttcttctaatggtctgggcacttttattccggataaaaggtttcagatgaatatcaatggcttccttaagcgggatcgcgacaataatatccagtttaccgtcggggaagagctttttaaccttatgcctcagtatttcgtgggcgtttcctcccggcctctgtggcacaccgtcgaccagagcccggtcttaattctgggcggaatccccaacgagaagtatgtcctcatgacggacacgtcctttaaggacttttctttagtggaactttctatcgactcctgttgggtcggcagtttctattgtccccattccgggttcaccgcaaccatctacgatactatagctaccgagagcactttgtttataaggcagaatcagctggtgtactactttaccgggacttacaccacattatatgagcgaaatagaggctccgggtcctggatccgcgtgttagctagcgagtgtatcaaaaagttgtgcccagtgtactttcattcaaatgggtctgaatatatcatggcactgacaaccggaaaacacgaaggttatgtgcacttcggaacaatccgagatgggcaagttagttttgagatgttacccaggcagtggagcgtatgcgagcagatcggggtgacaacgtgttctatcatctggtcggagtatatagccggagagtataccttattgcttcttgtggagagcggctatgggaacgcctccaaacgctttcaggtggtgagctataataccgctagtgacgacctggagctcttgtaccacataccggagtttattccagaagcacgagggttagagttccttatgatcttaggcaccgagtcttatactagcaccgctatggctcccaagggcatcttctgcaatccatacaacaacttaatctttatttggggcaactttttgctgcagagctcaaacaaagagaattttatatacctggctgatttcccaaaagagctgtcaatcaagtacatggcaaggagttttcggggagccgttgctatagttactgagactgaggaaatttggtacctgctggagggatcttaccgggtctaccagctgtttccgagcaaaggctggcaggtgcatatttcactgaaactcatgcagcagagttctttgtatgcatcaaatgaaaccatgctcaccctgttttacgaggactccaagctctaccagctcgtatatcttatgaacaaccagaaaggacagctagtcaaaagactggtgcccgttgagcaattgcttatgtatcaacagcacacgtcccattacgatctagaacgcaagggagggtaccttatgctgtcttttatcgatttctgcccctttagtgtcatgagactacggtccttgccatcaccacagaggtatactagacaagaaaggtaccgggcaaggcctccgcgtgtgcttgagcggtcggggtttcacaatgagaatagtctggcaatttaccagggtcttgtgtactacctgctttggctgcacagtgtgtacgacaaaccttacgcagaccccgtgcacgaccctacctggcggtggtgggccaacaataaacaggaccaagactattacttcttccttgcgagtaactggagaagcgccggaggggtctccattgagatggactcatacgagaaaatatacaatcttgagagcgcctatgagctacctgaaagaatattcctggacaaaggcaccgaatactccttcgcaatttttctgtccgctcagggtcatagcttccggacacagtctgagctaggcactgcttttcagttgcacagtcaggtggacgtcggggttgtgctggccgacccagggtgtattgaggcctccgtgaagcaggaggttctgataaatagaaattctgtgctgttttcaattactctaaaagacaagaagctctgctatgaccagggaatttccggacatcaccttatggaaactagcatgacagtgaacgtcgtgggctcctccggactgtgcttccaagagacccatctcggaccgcacatgcagggtaacctcatggttcccgtgttcatcggctgcccacccggaaagagactggccttcgatattacatacacacttgagtactcgcgcctcaagaacaaacactatttcgactgcgtgaacgttaatccggaaatgccctgctttctgttccgcgatatcttctaccccttctttctgatacaggacctggtgactggagatagcggtagtttccagggttcctatgtgctcctggtggtgggcggaggtcccaccctggattccctcaaagactatagcgaggacgagatctatcggttcaacagtcccttggataaaaccaactccctcatttggaccacacgcaccacgcggaccacaaaggattcagccttccacataatgagccacgaatcacctggaattgaatggctgtgtcttgagaatgccccatgctacgacaacgtgccccagggtattttcgcccctgaatttttttttaaggttctggtttccaatcgtggggtggacactagcacctactgtaattatcagctgacttttctccttcatattcacggcttgccattatccccaaagcgagccttgtttataatcatggtgtcagcatccgtcttcgtgggcctggtcattttctacattgcattctgtctactttggcccctcgtggtgaagggctgtaccatgatccggtggaagattaacaacctcatcgcttccgaatcctattatacctatgcttccatttccggaatttcaagcatgccatcactgcgtcattctaggatgggctctatgtttagctcccggatgaccgaagatcgagctgagcccaaagaggccgttgaacgtcaattgatgacgtag

SEQ ID NO: 217341 - DNA, 3480 bp, synthetic construct
  misc_feature 1..3480: note = Description of Artificial Sequence: Synthetic coding sequence
  source 1..3480: mol_type = other DNA
atgtgtgggcctgctatgtttcccgctgggccaccatggccccgagtgagagtggttcaagtactgtgggcactgcttgcggtcctcttagctagctggcgcctgtgggccatcaaggattttcaagagtgtacttggcaggtggtgctgaatgagtttaagcgcgtcggcgagagtggagttagcgatagtttctttgagcaagagccagtggatacggtgagctctttgttccacatgctggtggattccccaatagatccatctgaaaagtatcttgggtttccgtactacctcaaaatcaactactcctgtgaggagaagcccagtgaggacctagttaggatggggcatctgacaggcttaaagcccctcgtgcttgtgaccttccaaagtccggtgaacttttataggtggaagattgaacagctgcagatccaaatggaggcagctccctttcgtagcaaggagccgtgtatggccgaggaagtttgcagtatgtcctggtatacccccatgccaataaagaaaggctccgtggtgatgagggtggacatttcttcaaatgggctagggacttttattcctgacaaacggttccagatgaacatcaacggattccttaaaagggaccgggataacaatatacagttcacggtgggtgaagagcttttcaacctcatgccccagtacttcgtgggcgtgtcctctcgccctctatggcataccgtggaccagtccccagtgttaatcctgggcggaatcccaaacgagaaatacgtgttaatgacagacacttctttcaaggatttcagcctcgtagaactgtctatagactcatgctgggtgggctctttctattgcccccatagtggcttcactgccacaatctatgataccattgccacggaatccacactgttcatccggcagaatcaactggtctactattttacaggtacgtacaccaccctgtacgaacggaacagaggttctgggtcctggattcgagtccttgcctccgagtgcatcaagaaactctgccctgtctacttccatagcaatgggtccgagtacataatggccttgactacaggaaagcatgagggatacgtccatttcgggacaatcagggacggtcaggtctcttttgaaatgctgccaaggcaatggtccgtgtgcgaacagatcggagtgacgacctgctctatcatttggagtgaatatattgccggagaatacacactgctgcttcttgttgagtcaggatatgggaatgcgtcgaaaagattccaggtggtctcttataacacggccagcgacgaccttgaactcctctaccacatccctgagtttatacctgaggccagaggactcgagtttctgatgatcctgggaaccgaatcttatacgagtactgctatggctcccaagggtattttctgcaacccctataataacctcatttttatctgggggaacttcctgcttcagtctagtaacaaggagaattttatctatctcgcggacttccctaaagaactttccattaagtacatggccagaagttttcgaggcgctgtggcaattgtgacagaaaccgaggagatatggtacctgcttgagggaagttatcgcgtttaccagctattccccagcaagggttggcaggtccacatttcactgaaactgatgcagcagtcatccttgtatgcttccaacgaaacaatgttgacccttttctacgaagacagcaagctgtatcaactggtgtacttgatgaacaatcagaaaggacagttagtgaagaggctggtccctgttgaacaattgctcatgtaccagcagcataccagccactacgacctggagaggaagggcggatatctaatgctttcatttatcgacttctgcccctttagcgtgatgcggctgaggtccctcccatcacctcagagatataccaggcaggaaagataccgagcacgtccacccagggtactggagagaagcgggtttcataatgaaaactcactcgccatttaccagggcctcgtatactatctcctttggctgcattccgtgtatgacaagccctacgcagatccagtccacgatccaacctggaggtggtgggccaacaacaaacaggaccaggattattactttttcctggcatctaactggcgaagtgcagggggagtctctattgagatggacagttatgagaagatctataacctcgagagcgcatacgagttgcccgagcgcatcttcttagataaaggcacagagtacagttttgccatctttctgagtgcgcagggccactctttccggacccagtcagaactgggcaccgccttccaactccattctcaagtggacgtcggcgtggttttggcggacccagggtgtatcgaagcatctgtaaaacaggaggtactgattaacagaaactctgtcttgtttagcataactctcaaagataaaaagttgtgctacgatcaggggataagtggccaccaccttatggagacttcgatgacagtgaatgtcgtgggttctagcggattgtgtttccaggagacacacctcggtccccacatgcagggaaacctgatggttccagtttttatcggatgcccgccaggcaaacgcttggcctttgacataacatatacattggaatattcaagacttaagaacaagcactatttcgattgcgttaatgtgaaccccgagatgccttgtttcctcttccgggatatcttttacccttttttcctgattcaggacctggttacgggggattctgggtctttccagggttcttatgtgttattagttgtcgggggagggcctacccttgacagcctcaaggactattcagaagatgagatctacagattcaattcaccattggacaagactaatagtctgatctggacgactagaactaccaggacgaccaaggattccgcgttccacatcatgtctcacgagagccctggaatcgagtggctgtgcctggaaaacgcaccttgttatgacaatgtgccccagggcatctttgcaccggagttcttcttcaaggttttagtatccaataggggggtggacacttccacgtattgtaattaccagttgacatttttattgcatatccacggccttcctctgtcacccaagcgcgcactgttcataatcatggtgtctgcaagcgtctttgttggactggtgatattctatatcgccttttgtctgctgtggccgctcgttgtaaaggggtgcacaatgatccggtggaagattaataatctcattgcctcagagagctattacacctacgcctcaatttctggcatcagctccatgcccagtctgcgacattctaggatggggagcatgttcagctccaggatgacagaggatagggccgaaccaaaggaagccgtagaaaggcagctgatgacatag

SEQ ID NO: 217342 - DNA, 1983 bp, synthetic construct
  misc_feature 1..1983: note = Description of Artificial Sequence: Synthetic coding sequence
  source 1..1983: mol_type = other DNA
atggacgtcctcgtaagcgaatgctcagccagactgctacagcaagaagaagaaattaaatctctgaccgctgaaatcgaccgcctcaaaaactgcggttgtcttggggctagtcctaatctagagcaattgcaggaggaaaacctcaaattgaagtacagactgaacatattacgcaagtctctgcaggccgaaagaaataagccaacaaaaaacatgatcaatatcataagcaggctgcaggaggtctttggacacgcaattaaggccgcatatcctgacctcgaaaacccaccgctactggttaccccttctcagcaggccaagttcggggactaccaatgtaattcagctatgggcatctcacaaatgctgaagaccaaggagcagaaagtcaacccgagggaaatcgccgagaacatcacaaagcatctccccgacaacgagtgtatcgagaaggtggagattgcgggtcctgggtttattaacgtgcacctgcgaaaagatttcgtgagcgagcagctgacaagtctgttggtcaacggggtgcagctgccagccttgggagagaacaaaaaggtaattgtcgatttttctagcccaaatatcgccaaagagatgcacgtggggcacctgagatctacgattatcggagaatccatctcaagactctttgaatttgcagggtacgacgtcctgcgcctgaaccatgtcggggattggggcactcaattcggaatgctgatcgcacatttacaggataaatttccagactatctgacggtctcaccaccaataggagatttgcaagtgttttacaaagagagtaagaaaagattcgacacggaggaggaatttaaaaagcgcgcttaccagtgcgtcgtgctgctgcagggaaagaaccccgatattacaaaagcttggaagcttatatgcgatgtgagtaggcaggaattgaacaaaatttacgacgctctggacgtgtctctaatcgaacgcggtgaatctttttatcaggaccggatgaacgatattgttaaggagttcgaggacagaggatttgtccaggtcgacgatggcaggaaaatcgtgttcgtgcccggatgcagcatacccctgacaatcgtgaagtcagatggcggttatacatatgacacatcggacttagccgctatcaagcagaggctttttgaggagaaggccgacatgataatctacgtcgtggacaatggacagtcagttcactttcagactatctttgcagccgctcaaatgatcggctggtacgaccccaaggtgacccgtgtgttccacgccggattcggagttgtcctgggtgaggataagaagaaattcaaaaccagaagcggtgaaaccgtgcggctcatggaccttttgggcgaggggctaaaacgatccatggacaagctgaaggagaaggagagagacaaggtgctgaccgctgaagaactgaatgccgcacagacttccgtggcctatggctgcatcaagtatgcggatctgtctcataaccgactcaatgactacatttttagttttgacaaaatgctagacgaccgcggaaacaccgctgcttatctgctctatgcctttaccaggattagatctattgctcggctagcgaatatcgatgaagaaatgcttcagaaagcagcaagggagaccaaaatcctactggaccacgagaaagagtggaagctgggtagatgtattctcagatttcccgagatcctgcagaagattcttgacgatctgtttctgcatactctctgcgattatatctatgaactcgcaacagcctttactgagttttacgacagctgctactgcgtcgagaaagacagacagaccggcaagatccttaaggtgaatatgtggcgcatgttactgtgtgaagcagtcgccgctgtaatggccaaaggctttgatatcctcgggatcaagcccgtgcagcggatgtag

SEQ ID NO: 217343 - DNA, 465 bp, synthetic construct
  misc_feature 1..465: note = Description of Artificial Sequence: Synthetic coding sequence
  source 1..465: mol_type = other DNA
atgtgctggactcgcattcggccaggtacaccgtctagccccggtgctcagcggccaactccctacgagtggatgcgtaggtccgtagcagctggaggcggaggtggcagcggcaaaacccggaccaaggacaaatacagagtggtatacaccgaccaccagcgcctggaactcgagaaagaatttcactattccaggtacattacgattcggaggaagtcggagctggcggctaacctgggcttgacggaacgacaggtgaagatttggttccagaatagacgggctaaagagcggaaggtgaataagaaaaagcagcaacaacagcagccccctcagccaccaatggctcacgatatcacagccacgcccgcaggacccagcttgggaggtctgtgtcccagtaatacgtccctgttagccaccagctctccaatgcccgtgaaggaagaattcctgccatag

SEQ ID NO: 217344 - DNA, 183 bp, synthetic construct
  misc_feature 1..183: note = Description of Artificial Sequence: Synthetic coding sequence
  source 1..183: mol_type = other DNA
atgaggggaggtcctcgcggacaccacgtctgtgggctgtgtgccggacaaggctttgctcgggtaccgagaccctctcaggcctcgcagcctcggcctggaccagcatctctttgcccaagcaatacaagcttgctagccactagcagccccatgcctgttaaggaagagtttttaccttag

SEQ ID NO: 217345 - DNA, 942 bp, synthetic construct
  misc_feature 1..942: note = Description of Artificial Sequence: Synthetic coding sequence
  source 1..942: mol_type = other DNA
atgtacgttagctacctgttggacaaagacgtctccatgtacccatcctctgttcgtcactcagggggtctgaatctcgccccacagaattttgtgtcaccccctcaatatcccgattatggtggctaccacgtggccgctgctgccgcagcggcagctaatctggactctgcgcaatcacccggtccttcttggccggctgcttacggagcccctcttagagaagactggaacggctacgcacccggaggcgcagctgcagccgctaatgcagtcgcccatggattgaacggcggttcgccggcagctgcgatgggctattcgagccccgctgattatcatccacatcaccatccacaccatcatccccaccaccccgcagctgcaccttcttgcgcaagtgggttattacagacactgaaccctggcccacccggaccagccgctaccgctgcagcagaacagctgagccctggagggcagcgccgtaacctctgtgagtggatgaggaaaccagcccagcaaagtctcggaagccaggtgaaaactaggacgaaagacaagtaccgcgtggtatacactgatcaccagcggcttgagctggaaaaggaattccactattcacgttatataaccatcaggaggaaggctgaactcgctgcaacactcggcctgtcggaaagacaggttaagatctggttccagaatcgacgggctaaggagcgcaaaattaacaaaaagaagctccagcagcagcagcagcaacagccaccgcagcctcctccaccacctcctcagcctcctcagccccagccgggaccgctacggtcagtacctgaacctctttctccagtgagcagcctgcaggcatcagtaccagggtctgtgccgggtgtgcttggccctacaggaggagtcctgaaccctaccgtgacacagtag

SEQ ID NO: 217346 - DNA, 855 bp, synthetic construct
  misc_feature 1..855: note = Description of Artificial Sequence: Synthetic coding sequence
  source 1..855: mol_type = other DNA
atgtatggctcttgtctgctcgaaaaggaggcgggaatgtaccccggtactctcatgagccccggaggagacggaacagccggaaccggtggcaccggcggtggcggaagcccaatgcctgcgtctaactttgcggctgcccctgctttctcccactacatgggatatccacatatgccctccatggatccacattggccatcccttggtgtctgggggtccccctactccccaccacgagaagactggtccgtgtacccgggaccttcttcaacaatgggaacagtacctgtgaatgatgtcaccagtagcccagcagccttctgttccactgactattccaatcttggtccagtaggcggagggaccagtggaagttctctaccaggccaggccggaggtagcctggtgcctaccgacgccggagcggcaaaagcttcatccccttcaagatctagacattctccctatgcctggatgcgaaagacagtccaggtgacgggaaaaacacgaacaaaggaaaagtacagggtggtttacaccgaccatcaacgccttgaactagagaaagaattccactgcaatcggtatatcaccatccagaggaaatccgaactggcagtcaatctggggctgtcggaaaggcaggtgaaaatctggtttcagaatagacgagctaaagaaagaaagatgataaagaagaagatttcacagtttgaaaactctgggggttcggttcagtcagacagcgacagtatttcgccaggggagctacctaacacattcttcaccaccccgtctgctgtcagggggttccagcccattgagatccagcaagtaatcgtatcagagtag

SEQ ID NO: 217347 - DNA, 456 bp, synthetic construct
  misc_feature 1..456: note = Description of Artificial Sequence: Synthetic coding sequence
  source 1..456: mol_type = other DNA
atgatggctgaagagcacacagacctggaggcccagatcgttaaggatattcactgtaaggaaatagatttagtgaatagggacccaaaaaacattaatgaagacatcgtgaaagtggacttcgaagacgtcatagcggaacctgtgggtacctacagttttgacggtgtttggaaagtgagctacacgacattcacagtctcaaagtactggtgttacaggcttctctccactctcttgggcgtgccgctggccctcctgtggggattcctattcgcctgtatctccttttgtcacatatgggccgttgtgccttgtatcaagtcatatttgattgaaatccaatgtatctcacatatctactctctgtgtatcagaacgttctgtaaccctctctttgctgctttaggacaagtctgctcatctatcaaagtggtcctaagaaaagaggtgtag

SEQ ID NO: 217348 - DNA, 456 bp, synthetic construct
  misc_feature 1..456: note = Description of Artificial Sequence: Synthetic coding sequence
  source 1..456: mol_type = other DNA
atgatggcggaagaacatactgatctggaggctcagattgtcaaggatatccattgtaaggaaatcgaccttgtcaatagagatcccaaaaatattaacgaggatattgtgaaggtcgacttcgaagatgtgatcgctgaacctgtcgggacatattccttcgacggtgtttggaaggtttcctataccacattcacagtgtcgaaatattggtgctatcgcctcttgagcacactacttggagtgcctctcgcactcctgtggggattcctgtttgcttgcatttccttctgccacatttgggcagttgtcccttgcatcaaatcgtacctgatcgagattcagtgtatcagtcatatttatagcctctgcatcaggacattctgtaatccactgttcgccgcactggggcaggtatgctcttctatcaaagtcgtcctgcggaaggaggtgtag

SEQ ID NO: 217349 - DNA, 813 bp, synthetic construct
  misc_feature 1..813: note = Description of Artificial Sequence: Synthetic coding sequence
  source 1..813: mol_type = other DNA
atggctgaccacatgatggcaatgaatcacggtcgttttcccgacgggactaacgggctgcatcatcatcccgctcataggatgggaatgggacaattcccaagtccacatcaccaccagcagcagcagccacagcacgccttcaacgctcttatgggcgagcacatacactatggtgccggaaatatgaatgctacctctggcattaggcatgccatggggcctggtacggtgaatgggggtcatcctcctagcgcgttggctcctgctgcaagattcaacaacagccagtttatgggccctccggtagcctcccaagggggatcactccccgcttccatgcaactgcagaagctcaataatcagtactttaaccaccacccctatccacataaccattatatgccagatctacatcccgcagccggtcaccagatgaacgggaccaatcagcactttagggactgtaatccgaagcactcgggaggtagtagtactccagggggatcagggggaagctctacccctggcggttcgggtagttctagcggaggtggagcagggtcctccaattccggcggagggtctggctctgggaacatgcccgctagcgtggctcatgttcctgccgctatgctcccgccaaacgtgatcgacactgatttcattgacgaagaggtccttatgagcctggtgatagaaatggggctggaccgaattaaggaacttccggaactctggttggggcaaaatgagtttgacttcatgaccgatttcgtatgtaagcagcagccctcccgggtgtcttgttag

SEQ ID NO: 217350 - DNA, 645 bp, synthetic construct
  misc_feature 1..645: note = Description of Artificial Sequence: Synthetic coding sequence
  source 1..645: mol_type = other DNA
atggcggaccatatgatggcgatgaaccacggccgattcccagatggtactaacggcctgcatcatcacccagcccacaggatgggtatgggacaattcccgtctccacaccaccaccagcaacagcaacctcagcacgctttcaatgccctcatgggggaacatatacactatggcgcaggtaatatgaatgccacttctggaatcaggcacgcgatgggacctggcactgtgaacgggggacatccaccttccgctctggctcccgctgcccgtttcaacaattcccaatttatgggccctccggtcgcttcgcagggcggatcgcttcctgcaagcatgcaattacagaagctgaataaccaatattttaatcaccacccttacccccataaccactatatgccggatctgcacccggctgcaggtcatcagatgaatggtactaaccaacatttccgagactgtaaccctccaaacgtcatcgacacggatttcattgatgaagaggtgcttatgtctcttgtgatagaaatgggcctagacagaataaaagagctgccagaactgtggttaggccagaacgagtttgacttcatgactgatttcgtatgcaaacagcagccaagtagagttagttgctag

SEQ ID NO: 217351 - DNA, 813 bp, synthetic construct
  misc_feature 1..813: note = Description of Artificial Sequence: Synthetic coding sequence
  source 1..813: mol_type = other DNA
atggctgaccacatgatggccatgaaccacgggagatttccagacggaactaatgggctgcaccatcacccagcccatcgcatggggatggggcaattccccagtccgcatcatcaccagcaacagcagcctcagcacgcattcaacgcactaatgggcgagcacattcattacggtgccggtaatatgaacgctacctctggcatacgccatgctatgggacctggtacggtcaatggaggacatcctccttctgccttagcccctgcagccagattcaataatagccagttcatgggccctcccgtggcctcccagggaggctctctgcctgcgtccatgcagctgcagaaactcaacaaccagtatttcaaccaccacccctaccctcataaccattacatgcccgatctgcaccctgcagccggtcaccagatgaacggcacaaatcagcacttccgggactgtaatccaaagcatagtgggggatcttccaccccgggtggatctggaggctcttcaactcctgggggatctgggagttcatcaggaggaggagctgggtcttccaactcgggaggtggcagcgggagcggtaatatgcccgcatcagtagcccatgtgccggcagcgatgctccctccaaatgtgatcgataccgattttatcgatgaagaagtgctcatgtccttagtgatcgagatgggcttggataggatcaaggaattgccggagctgtggctgggccaaaacgaatttgattttatgaccgacttcgtttgcaaacaacagcctagccgggtgagctgttag

SEQ ID NO: 217352 - DNA, 813 bp, synthetic construct
  misc_feature 1..813: note = Description of Artificial Sequence: Synthetic coding sequence
  source 1..813: mol_type = other DNA
atggccgaccatatgatggctatgaaccacggccgattcccggacggcaccaacggcctgcaccatcaccctgcccaccgcatggggatggggcaattcccgtctccccaccaccaccagcagcagcagccccagcacgcatttaatgcactgatgggcgagcacatccattatggcgcaggaaacatgaacgctacttccggcatccgccatgcaatgggcccaggcacagtgaacggtggacaccccccatccgctctagcacccgctgccaggttcaataattcacagttcatggggccacctgtggcaagccagggagggtcccttcctgcaagtatgcagcttcagaagctgaataatcagtacttcaaccaccatccgtacccacataatcactacatgccggacttacaccctgccgctggccaccaaatgaatgggactaaccagcattttagggactgcaaccccaaacacagtggagggtctagcacccccggaggttccggtggcagctcgactcccggagggtctggctcatccagtggcggaggtgccggatcctctaatagtgggggtggctcgggctccggtaacatgcctgcgagcgtagcccatgtgccagccgctatgctgcccccaaacgtaattgataccgattttattgatgaagaagtgctgatgtcccttgttatcgaaatggggctggacagaataaaggaattaccagagttatggctcgggcagaacgaattcgactttatgactgactttgtgtgcaagcaacagccaagcagagtgtcttgctag

SEQ ID NO: 217353 - DNA, 1797 bp, synthetic construct
  misc_feature 1..1797: note = Description of Artificial Sequence: Synthetic coding sequence
  source 1..1797: mol_type = other DNA
atggagaatagttctgcagccagcgcttcctctgaagcagggtcctcacggtctcaggagatcgaggagctagagagattcatagacagctacgtgctcgaataccaggttcaaggtttattggcggacaagactgaaggagatggcgaatcggagcggacccagagccacattagccagtggactgcagactgcagcgaacctctggattcatcctgcagcttctcacgcggtcgtgcccctccccaacagaacggatccaaagacaactccctggatatgctgggaaccgatatctgggccgcaaataccttcgactcatttagcggggctacatgggacctccagcctgagaaactggacttcacacaattccaccggaaggtgcgacacacccccaaacagcctctaccccatattgaccgcgagggatgtggcaaaggcaagttggaggacggagacggaataaacctgaatgacatagagaaggttctgcctgcttggcagggctatcatccaatgccccatgaggttgagatagcacataccaagaaattattccgaaggcggcgaaacgaccgtcgccgacagcagcgacccccagggggaaataagccacagcaacacggagatcaccagcctggctctgccaagcataacagagatcaccagaaatcttaccagggaggttcggcccctcatccctctgggagacctacgcaccatggctatagccagaataggcggtggcaccacgggaatatgaagcatcctccaggagataagggcgaggccggtgcacacagaaacgccaaggagactatgacaatcgagaatccaaagctggaggacaccgcaggagataccgggcacagttcactggaggctcctaggagccccgacaccttggccccagtcgcgtcagagcggctcccacctcaacagtcaggagggccagaggtggagacaaagcgcaaggattcaatactgcctgaaagaattggcgaacggcctaaaatcaccctgctccagtcttctaaagaccggctccgcagaaggctcaaagagaaggacgaagtcgccgtcgagacaactaccccccaacagaacaagatggacaaactcatcgaaatcctcaacagcatgcgcaataatagttctgacgtggatactaagctcaccacttttatggaagaagcgcaaaattcaacgaactccgaggaaatgttgggagaaatcgttcgtacaatttatcagaaggcggtaagcgatcggtcttttgctttcacagccgcaaagctgtgtgacaaaatggctctgttcatggtggaaggcactaaatttcgcagcctcctgctgaatatgctgcaaaaggacttcacagtgagggaggagctgcagcagcaagatgttgagcgttggcttgggttcatcacctttctgtgtgaagtattcggaacaatgagaagtagtaccggcgagccatttagggtactggtttgtccaatttatacatgtctgcgcgagttattacagtctcaggatgtgaaggaggacgctgtcctgtgctgttctatggaacttcagagtaccggaaggctgcttgaggaacagctcccagaaatgatgaccgaactattggcgagtgcaagagataaaatgctttgtcctagcgaatccatgcttactcgctccctgctgcttgaagtaattgagctccacgctaattcttggaaccctctcactccccctatcacccagtattacaatagaaccatccagaaactaacagcctag

SEQ ID NO: 217354 - DNA, 1803 bp, synthetic construct
  misc_feature 1..1803: note = Description of Artificial Sequence: Synthetic coding sequence
  source 1..1803: mol_type = other DNA
atggaaaattcgtccgccgctagtgcttcatctgaagccggttcttctcgctcacaggagatcgaggagttggagcgcttcatcgatagctacgtactggaatatcaagtgcagggccttctggccgataagaccgaaggagacggcgagtctgagcggactcagtcccacatctctcagtggaccgcagactgttccgaaccactggattcctcttgctccttctctagaggacgcgctccaccacaacagaatggatccaaggataactcactcgacatgctcggtactgacatatgggccgctaacacttttgactctttcagcggggctacctgggatctgcaaccagagaaactcgactttacacagtttcacaggaaagttcgacacacccctaagcagcctctgcctcacatcgacagggaaggatgtgggaagggaaagctggaggatggcgatgggatcaatctaaacgatatcgagaaagttctgccggcttggcaggggtatcaccctatgccacatgaagtcgaaatcgcacatactaaaaagttgtttaggcgaaggcggaacgataggaggcgacaacaacgaccaccgggaggcaataagccccagcagcacggagatcatcaacctgggtcagcaaaacacaacagagaccatcagaagagttaccaaggaggtagcgccccacaccctagcggacggccaacacaccatggttatagccagaacaggagatggcaccatgggaacatgaaacacccgcctggtgataagggcgaagccggtgcccaccggaatgctaaagagacaatgaccatagaaaaccccaagctggaagacaccgctggggacacagggcactcgtccctggaagcccctcgtagtcctgacacattggcgccagtagcaagtgagcggcttcctccccagcagagcggcggacctgaggtggagacaaaacgcaaggactccatcttgcccgaacggataggcgagcgcccaaaaataactcttctccagtcgtcaaaggacagactccgtcgcagactcaaggagaaagtgccagatgaagtcgcagtcgaaactacaactcctcagcagaataagatggacaaactgatcgagattctgaacagcatgcggaacaactcctctgacgtggacacaaagctcaccacattcatggaggaagcccagaattctaccaacagcgaagaaatgcttggagagatagtccggacaatttatcagaaagccgtttcggatagaagctttgctttcactgcagcgaagctatgtgacaagatggccctgttcatggtggaagggacaaagtttaggtccttgcttttaaacatgctacagaaggatttcaccgtaagggaagagctacagcagcaggatgttgagcggtggctggggtttataacatttctgtgcgaagtgttcgggacaatgcgctcttctaccggcgaaccctttcgggtgctcgtgtgtccaatttatacctgccttagagaattactgcaatctcaggacgtgaaagaggacgcagtgttgtgttgttcgatggagcttcagtcaaccggccgtctactggaagaacagttacctgagatgatgaccgaattgctggcctctgccagagacaagatgctgtgtcctagtgaatccatgcttacgcgctccctgttgcttgaggtcatcgagctgcatgctaactcctggaacccgctgactccaccgataactcagtattacaaccgcactatccagaaattaaccgcctag

SEQ ID NO: 217355 - DNA, 1947 bp, synthetic construct
  misc_feature 1..1947: note = Description of Artificial Sequence: Synthetic coding sequence
  source 1..1947: mol_type = other DNA
atgggcaggctgccctgtgggccactgcctggacagtggacggcagattgcagtgagcctcttgattcctcatgcagctttagtaggggacgggctcctcctcagcagaacggttcgaaggacaatagcctcgatatgctggggaccgacatctgggctgcaaatactttcgatagcttcagcggcgctacctgggacttgcaaccagagaaactggatttcactcaattccaccggaaagtgagacatacacctaagcagccactaccccacatcgaccgagagggatgcggcaagggaaagctggaggacggagatggaattaacctcaacgatatcgagaaagttctgcccgcttggcaggggtaccatccaatgccacatgaagttgaaattgcacacactaagaagttgtttcggagaagacgaaacgaccgacggcgacaacaaaggccccctggcggaaataaaccccagcagcatggcgaccaccaaccaggctcagcgaaacataatagggaccaccagaagagctatcaggggggttcagcccctcacccctcaggacgtcccacccaccacggatacagtcagaataggcggtggcatcatggcaacatgaagcacccacccggagacaagggggaagccggagcccatcgaaatgccaaagagaccatgactattgagaaccccaagctggaggatactgccggtgatacgggtcacagctctcttgaagccccacggagtcctgatacactggcaccggtggcttccgagaggctgccacctcagcagtccggtggccctgaggtggagactaagagaaaagatagtattctgcccgaacggatcggagagcggccaaaaatcacgctgctccagagttccaaagatcgactccgccgacgcctaaaggagaaggatgaggtagcggtcgagacaacgacaccacagcaaaacaagatggataaattgatcgagattcttaactctatgcgtaataattcctccgacgtggacaccaagctcactacctttatggaggaagcacagaacagtacgaactctgaagagatgctcggagagatcgtgcggaccatctaccaaaaggcggttagcgataggagcttcgcctttactgcagcaaaactttgcgataaaatggcccttttcatggttgaagggactaaatttcgtagcttactcctgaatatgcttcagaaggattttacggtccgagaggaactccaacagcaggacgtagagcgatggctcggcttcattacatttttatgcgaggtctttgggaccatgcggtctagtaccggtgagcccttccgcgttctcgtgtgtcccatctacacgtgcctccgcgaactactccaatctcaggatgttaaagaggacgcagtgctgtgctgctctatggagctgcagagcacaggcagacttctggaagagcagctgcctgagatgatgacggagcttttggcaagcgccagagacaagatgctctgtccgtcagagagcatgcttaccagatctcttcttctcgaggttattgagctccacgcaaatagttggaatcagggagcatggcaggccgctcacggccagctgggtccttggtgcactggcccagacggccaggcaggtggacaaggctggccttggcgggagaaagaaatgggcagaagggccggtcgcgtgggcggacagtctggcgctagagcctgtaaactgacacccatccgtgaggcgtgtttctttttcctggtagctctggccctccccttcctaaccccagcctctccgctaccaatccgtccaatcccacacggggcattatgtgaaggaagccacagatgcgacagttcggaaactttggccgcttcccatgccggtgccccactaggtagcgagcgaacttctgaaggctag

SEQ ID NO: 217356 - DNA, 1077 bp, synthetic construct
  misc_feature 1..1077: note = Description of Artificial Sequence: Synthetic coding sequence
  source 1..1077: mol_type = other DNA
atggaatccgccgatttttacgaagccgaaccccgtccaccaatgtcaagtcatttgcagtctccacctcacgcaccatcatccgcagccttcggatttccacggggtgcagggcctgctcagcctcctgccccacctgccgcacctgaacccttgggaggaatatgtgagcatgaaacaagcatcgacataagtgcatacattgacccggcagcctttaatgacgagttcctggctgatctctttcagcatagtcgacaacaggaaaaggctaaggccgctgtgggtccaaccggtgggggaggcggtggcgactttgactaccctggagcgccagccggacccggaggagccgtgatgccgggaggcgctcacggtccaccccctggttatggatgcgccgcagctggctacttagacggaaggctggagcccctttacgagcgggtgggcgctccagccctccgccctctcgtcatcaaacaagagccaagagaggaagacgaggctaagcagctggccctcgccggactatttccctatcagccaccccctccgccaccccctagccatccccatcctcatcctccgcctgcgcacctcgccgctccgcatctgcagtttcaaattgcccattgtggccagactaccatgcatctgcagccaggccatcccaccccccctccaactcctgtgccgagtcctcacccagcccctgcactgggggctgcgggactcccgggaccaggctcagccctgaaaggactcggggctgctcacccagacctcagagcatctgggggtagtggtgccggaaaggcgaagaaatctgtggacaagaacagcaacgaatacagggtccggagggagagaaacaatattgccgtaaggaaaagcagggacaaagctaaacagaggaacgtcgaaacacaacaaaaagtgcttgaactgacatccgacaacgaccgcctgagaaagagagttgagcaactttccagagagttggacacattgaggggaatctttcgacaacttcccgagtcttccctggtgaaggccatgggcaactgtgcctag

SEQ ID NO: 217357 - DNA, 810 bp, synthetic construct
  misc_feature 1..810: note = Description of Artificial Sequence: Synthetic coding sequence
  source 1..810: mol_type = other DNA
atgtctgcagccctcttcagcctcgacggccctgcgagaggcgcaccttggccagccgagccagcgccattctatgagccagggcgagctggtaagcccggtcgtggagccgagccaggagccctgggcgagcctggagcagcagccccagccatgtatgacgatgaaagcgcgatagatttttcagcttatatagatagtatggccgcagtgcctaccctcgagctttgccatgacgaattgtttgccgatttgtttaacagtaaccataaagcagggggtgcgggtcccctggagctattgccaggaggccctgcacggccattggggcctggacccgcagcgccacggctgctgaaacgcgaaccggattggggcgacggagatgctcctgggtctttgctgcctgcccaagtcgcagcctgtgcccagacggtagtgtccctggcagccgcagggcaaccaaccccacccaccagcccagaaccccctcgctcgtcccctcgacaaacaccagcccctgggcctgcacgcgaaaagtctgccggaaagaggggcccagatcggggatcgcctgagtataggcagcgaagggaacggaacaacattgcagtcagaaaatcccgggataaagctaagcgccgtaatcaggaaatgcaacagaaactggtggaactgtcagctgaaaacgagaaacttcaccagagagtggagcaattaactagggacctggcaggacttaggcaattttttaagcagctgccttctcctccatttttaccagctgccggaacagccgactgtcggtag

SEQ ID NO: 217358 - DNA, 402 bp, synthetic construct
  misc_feature 1..402: note = Description of Artificial Sequence: Synthetic coding sequence
  source 1..402: mol_type = other DNA
atgtctgcagctcttttttccctcgacggaccagccaggggagccccttggcctgctgaacccgctccattttatgagccagggagggctggcaaacctggcagaggagcagagcccggagctctgggagagcccggagctgccgcaccggctatgtacgatgacgagtctgctatcgacttctccgcttacattgacagcatggcagcagtcccaacactggaattatgtcatgacgagctctttgcagacctgtttaactcaaaccacaaggccagagctccttgggcccgtgcccttccactaccagcgtgctcaagcgcaagcccaacaggagccactgccacccgcccagccaggtgttgccccaggcgctggccgagggcgcacagaccatggtag

SEQ ID NO: 217359 - DNA, 1092 bp, synthetic construct
  misc_feature 1..1092: note = Description of Artificial Sequence: Synthetic coding sequence
  source 1..1092: mol_type = other DNA
atggccagtggcgacttttgtagccctggagagggcatggaaatccttcagcaagtgtgttcaaaacaactcccgccttgtaatctttccaaagaagacctgctgcagaacccatactttagcaagttattgttaaatctatctcagcacgtggacgaatctggcctatccctgacactggcgaaggagcaggctcaggcctggaaagaggtacggctccataagactacttggttgcgctcagaaatccttcaccgcgtgattcaggaactgctggttgattattatgttaaaattcaagatacgaatgtcacctctgaagacaagaagttccatgagactcttgaacagcgcctgctggttaccgagttgatgagacttctgggcccatcgcaagagcgggaaatacctcctctgctcggtctggagaaagcagacctgcttgagctgatgcctttgagcgaagatttcgtgtggatgcgcgcacgtctgcagcaggaagtcgaggagcagctgaaaaaaaagtgctttaccctcctctgctattatgaccccaactcagacgccgactccgagaccgttaaggcggctaaggtatggaagctggccgaggtgctggtcggcgagcagcagcagtgccaggatgctaagtctcagcagaaggaacagatgctattattagagaagaagtctgcggcatactcacaagttttgcttagatgcttaacacttctccagagactgctgcaggagcaccgccttaagacccagtctgaactggatagaatcaacgcacagtacttggaggttaaatgtggtgcaatgatcctcaagcttaggatggaagagcttaaaatcctgagcgatacctatacggttgagaaagtcgaagtccatcgcttgatacgggaccgtcttgaaggcgctattcacttgcaggagcaggacatggagaatagcagacaggttcttaatagctacgaagtgctgggcgaagaattcgacagattagttaaagagtacactgtgctaaagcaggccaccgagaataaaagatgggctcttcaggagttctccaaagtgtatcgctag

SEQ ID NO: 217360 - DNA, 1359 bp, synthetic construct
  misc_feature 1..1359: note = Description of Artificial Sequence: Synthetic coding sequence
  source 1..1359: mol_type = other DNA
atgggctcatcgcagtccgttgaaatacccggagggggaactgaaggttaccatgtccttcgggtgcaggaaaattcccctgggcatagagccggattagaacccttttttgatttcattgttagcattaacggcagccgcctgaataaagacaacgatacacttaaggacctgctgaaggccaacgtggagaaaccagtgaagatgctcatctatagcagcaagacgttagagctccgtgagaccagcgtcaccccttctaatctgtggggagggcaggggctgctaggagtgtctatccggttttgcagcttcgacggggctaacgaaaatgtatggcacgtgctagaggtggagtctaacagcccagcggctctcgcaggcctgcgtccccatagcgattatattatcggcgcagatacggtgatgaacgagtctgaggacctgttttccctgatcgagactcacgaagctaagcctctgaagctgtatgtgtacaatacagacaccgacaattgtcgcgaagttattattacccctaatagcgcctggggcggtgagggaagcctcggctgtggcataggctacgggtaccttcacaggatccctactcggccatttgaagagggcaaaaaaattagcttgcctgggcagatggccggaacaccgataactcccctcaaggacggattcaccgaggttcagctctcctccgtgaatcccccatccctgtcgccccctgggacaacaggcattgaacagagcctgaccgggttatcaatttccagtaccccaccggctgtctcttccgtcctcagcactggagttccaacagtccccttgcttccacctcaagtcaaccagtcactcaccagtgttccaccgatgaacccggctaccactctcccaggccttatgcctttacctgctggcctaccaaacctgccgaacctgaacctgaacctacccgcaccacatataatgcccggagtcggactgcccgagctggtgaacccgggactcccacccctccccagcatgcctcctagaaatcttccaggcatcgcacctctgccactgcctagcgagtttctcccttcttttcccctggttcccgaatccagctccgcagcatcaagcggagaattattgtcctcgctgcctccaacatcaaatgcccctagcgaccctgcaaccaccacagccaaggccgacgccgcaagttcccttaccgtggatgtcacccccccaacagccaaggcccctaccacagttgaggatcgggtgggagactcaactccagtgagtgagaaaccggtaagcgcagctgtggatgctaatgcgtctgagtccccctag

SEQ ID NO: 217361 - DNA, 2997 bp, synthetic construct
  misc_feature 1..2997: note = Description of Artificial Sequence: Synthetic coding sequence
  source 1..2997: mol_type = other DNA
atggccgctgttaaggagcccttggaatttcacgcaaaaaggccttggagacctgaggaagctgtcgaagacccagacgaagaggacgaggacaacaccagcgaagcagaaaacggctttagcctggaagaagtactccggctcggcggaactaagcaggattatctcatgttggccactcttgatgagaacgaggaagtgattgacgggggaaaaaaaggtgctatagacgatctgcagcagggcgaactcgaggcttttattcagaatctcaacctagctaaatacactaaagctagcctcgtggaagaagatgagccagctgagaaagagaactcgagcaaaaaggaagttaaaattcccaaaattaacaataaaaataccgcagagtctcaaagaaccagcgttaataaggtgaagaataagaaccgcccagagccccactccgacgaaaatggctctaccacacctaaggtgaagaaagataagcagaacatctttgagttcttcgaacgtcagaccctcctcttaaggcccggtggcaagtggtatgatctggagtattcaaatgaatactcccttaagccacagccgcaggatgtcgtatccaagtacaaaaccctggctcaaaagctttatcaacacgagatcaacctgtttaagagtaaaacgaacagtcagaaaggcgcatcctcgacctggatgaaagcaatcgtctcttcaggaacactgggagataggatggctgctatgattctccttatccaggacgacgcggtgcacactctacagtttgttgaaacattggtgaatctcgtcaaaaaaaaaggcagcaaacagcagtgccttatggcccttgacacctttaaggagctgctcattactgatctcctgcccgacaatcggaagctgagaattttctctcaaaggcctttcgataaacttgagcagctgtcatccgggaataaggactcacgtgaccgccgactgattctgtggtatttcgaacatcagcttaaacacctcgtggccgaatttgtgcaggtcctggagactctgtcccacgatactctagtgactacaaaaacccgcgctctgaccgtggcgcatgaactcctgtgcaacaagcccgaagaggaaaaggcacttctggttcaggttgtgaacaagctcggcgatccccaaaatagaatagcaactaaagccagccaccttctagaaaccctgttgtgtaaacatcctaacatgaagggcgtcgtcagcggagaggtggaacggctgttattcaggtcgaatatctcatccaaggctcagtattacgccatctgctttctaaaccaaatggcactgtctcacgaggagtctgaactggctaataagctgataacggtgtacttttgttttttcagaacatgtgtgaagaagaaggatgtggaaagtaaaatgttgagcgctctcttaaccggcgtgaacagagcctacccctactcccaaacaggcgatgataaggtgagagaacagatcgataccctgtttaaggtgctgcacatcgtcaactttaatacatccgtccaagcgctcatgctcttatttcaggtgatgaactcgcagcagactatttccgaccggtactatacagccctttacagaaagatgctggatcctgggcttatgacctgctccaagcaggctatgtttctcaacttggtgtacaagtctctgaaagctgatatagtattgcgcagggtgaaagcctttgtaaaaaggctccttcaggttacatgccagcagatgcccccttttatttgcggggcactttatctggtcagcgaaattcttaaggctaaacctgggctgaggtctcagctggacgaccaccctgagtcagacgatgaggaaaactttatcgatgccaatgacgatgaggatatggagaaattcacggatgcggacaaggaaactgaaatcgtgaagaaattggagaccgaggaaaccgttccagaaacggacgtagaaactaaaaagccagaggtcgcctcttgggttcacttcgataacctcaaaggtgggaagcagctgaacaagtacgaccctttctctcgaaatcccttgttctgcggagctgaaaacacatctttgtgggaattgaagaagctaagtgtgcatttccatccttctgtcgctttgttcgcaaaaaccattttgcagggcaattatatccagtacagtggggatcctttgcaggatttcacacttatgagattcctcgacaggtttgtgtaccgtaacccaaagccacataagggcaaagaaaataccgattccgtggttatgcagcccaagagaaagcactttattaaggacatccgacatctgcccgtaaacagcaaggagtttcttgcgaaagaggaaagccagattcccgttgacgaagtgttttttcatcgttactacaagaaagttgcagtgaaagagaaacagaagcgggatgcagatgaggaatccattgaggacgttgacgatgaggaattcgaggagcttatcgacacatttgaggacgataactgcttttcaagtggaaaagacgatatggattttgcgggtaacgtgaaaaaacgaacaaagggagcgaaggataacactctggacgaagattcagagggaagtgatgatgaacttggcaacctggacgatgatgaagttagcttaggatcaatggacgatgaggaatttgctgaagtcgatgaggatggcggaacttttatggatgtgctggatgatgaatcagaaagcgtccctgagcttgaagtgcacagtaaggtttccacaaaaaagagcaagcgaaaaggcactgacgacttcgatttcgccggatcgttccagggcccacgcaagaagaaaaggaacttgaacgactcttccctgtttgtgagtgcagaggagttcggtcacttattagacgagaacatggggtctaaatttgacaacattgcctag

SEQ ID NO: 217362 - DNA, 1992 bp, synthetic construct
  misc_feature 1..1992: note = Description of Artificial Sequence: Synthetic coding sequence
  source 1..1992: mol_type = other DNA
atggctgccactgagatatccgtgttgtccgagcaatttacgaagatcaaagagctcgagctgatgccggaaaaaggcctcaaagaagaggagaaggatggcgtttgccgcgagaaagatcatagatccccatccgagctggaggcggagagaacgtccggggcatttcaggattcggttctggaggaggaagttgaactggtcctggccccaagcgaggaatctgagaaatatatcctgactctacagactgtacattttacaagcgaggccgtagagctgcaggacatgtctctcctgtccattcaacagcaggaaggagtgcaggtagttgtgcagcaacctggacctggtcttttgtggctggaagaggggcctcgtcagtcactccagcagtgcgttgccatctccattcagcaagaactctacagccctcaggaaatggaggttctgcagttccacgccctcgaggaaaatgtgatggtggcgtcggaggattccaagctggccgtctccctagctgagacaacaggcctgatcaaactcgaagaggagcaagagaaaaaccagttgcttgctgaacgaaccaaagagcagctgttcttcgtcgaaacaatgtcaggggatgagcgctctgacgaaatagtgctgacggtgagcaattctaacgtggaggagcaagaagatcagcccacggccggacaggctgacgctgaaaaggccaaaagcaccaagaaccagcgcaagactaagggagcgaaaggcacattccattgcgacgtttgtatgtttacctcgtctaggatgagctcctttaaccggcacatgaaaacccataccagcgaaaaaccccatctatgtcacttatgtcttaaaacctttagaaccgtgactctcctccggaaccacgtgaacacacacacaggtacacgcccttataaatgtaacgattgcaacatggcctttgtgaccagtggcgagctggtcagacaccggcgttacaagcacacacatgagaagcccttcaaatgctctatgtgcaagtacgcaagcgttgaggcttccaaactcaagcgccacgttagatctcatacaggggaacggccttttcagtgctgccaatgctcttatgcttctcgcgatacttacaagctgaagaggcacatgcgaacccacagtggtgaaaagccatatgaatgtcatatttgccacacccggtttacccagtctgggaccatgaagattcatatcctacagaaacatggcgagaatgtccccaaataccagtgtcctcattgtgcgactattatcgccagaaagagtgatctgcgcgttcacatgaggaatctacatgcctattcagccgctgagctcaaatgccgctattgctctgccgtatttcacgagcggtacgccctgatccagcaccagaaaacccacaagaacgagaagcgtttcaaatgtaagcactgcagctacgcttgtaagcaggaacgtcatatgacagcccatatcagaacccacacaggcgagaaacccttcacttgcctttcatgcaataagtgctttaggcagaaacagctgttgaacgctcattttcgcaaataccacgacgcaaacttcatccctactgtgtacaaatgctccaagtgtggaaagggtttcagccgctggataaatttgcacaggcactccgagaagtgcgggtccggggaggccaagtccgccgctagcggcaaggggcgaaggaccaggaagaggaagcagacgattctgaaggaagccacgaagggacagaaagaggccgcaaagggctggaaagaggcagccaatggcgacgaggccgcagcggaggaggcttctacaacaaaaggagaacagttcccgggtgaaatgttccccgtggcttgccgcgaaacaacagcgagggttaaggaggaggtcgatgaaggggtaacctgcgagatgctgttgaatacaatggataagtag

SEQ ID NO: 217363 - DNA, 1992 bp, synthetic construct
  misc_feature 1..1992: note = Description of Artificial Sequence: Synthetic coding sequence
  source 1..1992: mol_type = other DNA
atggctgctactgagattagcgtcctgagcgaacaatttaccaagatcaaggagctcgaattgatgcctgaaaaaggtttgaaggaggaggagaaggacggcgtttgtcgcgagaaagatcacagatcaccatctgagcttgaggccgagagaacttccggggcatttcaagacagtgtgctcgaggaagaagtggaactggtgttggccccttcggaggaaagtgagaaatatattctcaccttgcagaccgtgcactttacctctgaggccgtggagctccaggacatgtctctgctttcaatccagcagcaagagggtgttcaagttgtagtgcagcaaccaggcccaggcttgctgtggctggaggagggtcccaggcagtcactgcagcagtgtgttgccataagcatacagcaagagctgtattccccccaagaaatggaggtgctgcagtttcacgctctggaagagaatgtgatggttgcatccgaagattcgaaactggcagttagcctggccgagaccactggcctaattaaactggaggaggagcaagaaaaaaaccaactgcttgccgagaggaccaaagagcagttgttcttcgtggagacaatgtctggggacgaacgctccgatgagatcgtgttgacagttagcaacagtaacgtggaagaacaggaggaccagccaacagctggccaagcagacgccgagaaagccaagtcaacgaaaaatcagcgtaaaacaaaaggggctaagggcacctttcattgtgatgtttgcatgttcactagttcgcgcatgagcagctttaaccgtcacatgaaaacgcacacctctgagaaaccacacctgtgtcacttatgtctcaaaactttccgcacggtcacactcctgcggaaccacgtgaatactcacaccgggaccagaccatataaatgtaatgactgtaatatggccttcgtgacaagtggcgagttagtgaggcaccggcgatataaacatacccacgaaaaacctttcaagtgtagcatgtgcaagtacgctagcgtggaggcctccaagttgaaaaggcacgtgcggtctcacaccggcgagcggccattccaatgctgtcaatgctcttacgccagcagagacacttataagctgaaaagacacatgcggacacattctggcgaaaaaccctatgagtgccacatttgtcatactcgctttacccaaagcggaaccatgaaaattcatattttgcaaaagcacggagagaatgttcccaagtatcagtgcccccactgcgccactatcatcgccaggaaaagcgacctgagagtccacatgcggaacctccatgcttattccgctgccgaattaaaatgtaggtattgctctgccgtgttccatgagcgctacgccctcatccagcatcaaaagacgcacaaaaatgagaagaggtttaagtgcaaacactgctcatacgcatgcaagcaagagcggcacatgactgcgcatattcggacccatactggtgagaaacccttcacttgcctgtcttgcaacaaatgtttccgacagaagcaattattgaatgcacactttaggaaataccacgatgccaattttatcccaacagtttataaatgttccaaatgcgggaagggcttttcacggtggatcaatctgcacagacactcagagaagtgcggaagtggtgaggcgaagagtgcggcttctggcaaaggtagacgcactagaaaacgcaagcagactatccttaaagaagcaaccaaaggccaaaaggaggctgcaaaagggtggaaagaggcagctaatggagacgaggccgctgccgaggaggcctccactactaagggcgaacaatttccaggtgagatgtttcccgtcgcctgtcgagaaacaactgctcgggtgaaggaagaagtagacgaaggagtgacatgcgaaatgctcctgaatactatggacaagtag

SEQ ID NO: 217364 - DNA, 1284 bp, synthetic construct
  misc_feature 1..1284: note = Description of Artificial Sequence: Synthetic coding sequence
  source 1..1284: mol_type = other DNA
atggcggctacagagatatcggtcctgtcagagcagttcaccaagattaaggagctcgagctgatgccggagaagggtttgaaagaggaggagaaagacggggtctgtagggagaaagaccaccgcagtccctccgagctagaggcggagcggacttctggagcattccaagactctgtcttggaggaggaagtggaactagtcctggcgccttcagaggaaagtgagaagtacatcctgacactgcagacagtgcacttcacttcagaagctgtggagctgcaggatatgtccctgctctcaattcagcaacaagaaggcgtgcaggttgtggtgcagcagccaggtccaggactactgtggctggaggaagggcctcggcagtccctgcagcagtgtgtggcaataagcattcagcaggagttgtacagccctcaggagatggaagtcctgcagtttcatgccctggaagagaatgtgatggtggcatcagaggacagcaaacttgccgtttccctggctgagacaaccggactcattaagctcgaggaagagcaggagaagaatcagctgttagctgagaggaccaaggagcagctgtttttcgtggagacgatgagtggggacgagagatccgacgagattgtactgaccgtgtcaaacagtaacgtggaagagcaggaagatcagccgacggcagggcaggcagatgcagaaaaggccaaatccaccaaaaatcaaaggaaaaccaagggtgctaagggcacgtttcattgcgatgtgtgcatgtttaccagcagccggatgtctagctttaacagacacatgaagacccacacaagcgaaaagccccacctgtgccatctgtgtctaaaaacattccgcacagtcactctgttgcggaatcacgtgaacactcacaccgggactaggccgtacaagtgtaacgactgtaatatggctttcgtgaccagcggagaactggttcgccatagacggtacaagcacacgcacgagaaaccattcaaatgtagtatgtgcaaatatgcaagcgtggaagcctcaaaacttaagcgtcatgttcgttctcacaccggcgaaaggccattccagtgctgtcagtgctcatacgccagcagggatacgtacaaactaaagcggcacatgcgaacgcattcagaagccacatctaagcgcagcctgcaagaaatccctaggtgcaagtttcatcccgactgtttgcagatgttgcaagtctggcagcgactgttccccttggattag

SEQ ID NO: 217365 - DNA, 1722 bp, synthetic construct
  misc_feature 1..1722: note = Description of Artificial Sequence: Synthetic coding sequence
  source 1..1722: mol_type = other DNA
atggccgcaaccgagatcagcgtgctaagcgagcagtttactaaaatcaaagaactagaactcatgccagagaaaggcctgaaggaagaggaaaaagacggagtgtgccgagagaaagatcacaggtctccctcagagctggaggccgagcggacttccggcgcatttcaggattcagtgctcgaggaggaggtggagctggtcttagccccttccgaggagagcgaaaaatacatactcacacttcagaccgtacacttcacatcagaagccgtggagttgcaggacatgtctttgctttcaatccagcaacaagaaggtgtccaggtagtcgtgcagcagcctgggcctggcctcttatggctggaagagggacccagacaatccctccaacagtgcgtggctatctcaatacaacaggagttgtattctcctcaggagatggaggttttgcagttccacgccctcgaagaaaatgtcatggtggcttctgaagactcaaagctcgccgtgtctctagctgagaccactggattgataaagttggaggaagagcaggagaaaaaccaattattggctgagcgcacaaaagagcagctctttttcgtcgaaactatgtccggcgatgaacgatcggacgagattgtattgactgtgtccaactccaacgttgaggaacaggaagaccagccgactgccggtcaggccgacgctgagaaggcaaagtcaacgaagaaccagagaaagacgaaaggagccaaagggacattccactgcgacgtgtgcatgtttactagctcccgaatgagtagtttcaaccgccacatgaagacccatacttccgagaaacctcacctctgtcacctatgcctgaagacctttcgcacagtgaccctcctcagaaaccatgttaatactcatactggaacgaggccatacaaatgtaacgattgcaacatggccttcgtaacctcaggcgagttagttcgacataggagatacaagcacactcatgaaaaaccattcaagtgcagtatgtgcaaatatgctagcgtggaagctagcaagctgaagcgccatgttcggagtcacactggtgagcgcccatttcaatgctgtcagtgttcgtatgcgtctcgagacacatacaaacttaagcgacacatgagaacacactcgggcgagaaaccatatgagtgccacatctgtcatacacgctttacacaaagtgggactatgaagatacacattctacagaagcatggagaaaacgtgcctaagtatcaatgcccgcactgcgccaccatcatcgcccgaaaaagtgacctgcgagtacacatgaggaacttgcatgcctacagtgccgctgagctcaaatgtcggtactgttccgccgtattccatgagcgatacgccctgatccagcatcaaaagacccacaaaaacgaaaaacggtttaagtgtaagcactgttcgtacgcttgcaagcaggaacgccatatgacggcacacatcaggacccataccggcgaaaaaccatttacctgtctcagttgtaacaaatgtttccggcagaaacaactgctcaacgctcattttcgcaagtaccatgatgccaattttatccccactgtttataaatgcagcaaatgtggtaaaggcttttctcgctggataacatccaaatggtctggccttaaacctcagacattcattacctag

SEQ ID NO: 217366 - DNA, 2103 bp, synthetic construct
  misc_feature 1..2103: note = Description of Artificial Sequence: Synthetic coding sequence
  source 1..2103: mol_type = other DNA
atggcagccacagaaatttccgtgctttccgagcaatttaccaaaataaaggagctagagctgatgcctgagaaaggccttaaagaggaggagaaggacggcgtctgcagggaaaaggaccaccgttcccctagcgagctagaagctgaacgtacgtccggcgctttccaagacagcgtcctggaggaggaggtagagctagtgttggcccctagcgaggaatccgagaagtatattctgaccctgcagaccgtacactttacatctgaagccgtggagctgcaagatatgtcattgctttccattcagcagcaggagggcgttcaggtggttgttcagcagcctgggccaggcctgctctggctcgaggaaggcccacgacagtccttgcagcagtgtgttgccatctcaattcagcaggaactgtattctccccaggagatggaggtgctccagttccatgccctggaagagaacgtaatggtcgccagcgaagatagcaaacttgccgtgtccctggctgagaccaccggcttgattaaactagaagaagaacaggagaagaatcagctgctggccgagcgaactaaggagcagctgttttttgtggagacgatgagtggagatgagagatccgatgagattgttctcacggtctccaactctaatgtggaggagcaggaggatcagcctactgcgggtcaggcggatgccgagaaagccaagagcactaagaaccagcggaaaactaagggggcaaaaggtacattccattgcgacgtttgcatgtttacctcttcaagaatgtccagctttaataggcacatgaagactcacacctcagagaaaccccacctgtgccacctgtgcctgaagactttcagaactgtgactctattacggaaccacgttaatacacacacaggtacccggccatacaaatgcaatgactgtaatatggcctttgtgacttccggtgagctggtaaggcatcggagatacaaacatacacacgaaaagccatttaagtgcagcatgtgtaagtacgcatcagtggaggcatcaaagttaaaaagacacgtgcgctctcataccggggagcgcccttttcagtgctgccagtgcagctatgcctcaagagacacatacaagttaaagcggcacatgaggacgcacagcggcgagaagccttacgaatgtcacatttgccatactcgattcacacagtcaggcactatgaagatccacattctgcaaaagcatggcgaaaacgtgcccaagtatcaatgccctcactgcgccactatcattgccagaaagtccgacctgcgggtccacatgaggaatctgcacgcctattccgctgccgaactcaagtgtcggtattgctctgctgtgtttcacgagagatacgctcttattcaacatcagaaaacccataagaatgaaaagcgttttaagtgcaagcactgcagttacgcgtgcaagcaagaaagacacatgacagcccacatacgtacacacacgggggagaagccgttcacatgtctttcttgcaacaaatgtttccggcagaagcagctgttgaacgctcactttcgaaagtatcacgatgccaattttataccaacagtgtataagtgcagcaagtgcgggaagggattcagccgctggattaatttacacagacatagcgaaaaatgcggatcaggggaagcaaaatctgcagcatccggtaaaggaaggcgcactcgcaagcgtaagcagaccatcctcaaggaggccaccaaaggccagaaagaagccgctaaggggtggaaagaggccgctaatggcgacgaggctgctgctgaagaagccagtaccacaaagggggagcagttccccggagaaatgttccctgtcgcatgccgggaaactactgctagagttaaagaggaggtggatgagggagtgacatgtgagatgttgctgaatactatggataattcagccggatgtacaggacgaatgatgcttgtgtctgcgtggttattaggtcgaccccaggagacttacaaccagggcagaagacgcagaggatcacgacgggtgacatggtag

SEQ ID NO: 217367 - DNA, 1356 bp, synthetic construct
  misc_feature 1..1356: note = Description of Artificial Sequence: Synthetic coding sequence
  source 1..1356: mol_type = other DNA
atggcagcaacagaaatctctgttctgtctgaacaatttaccaaaatcaaagagttagaactgatgcccgagaagggcctaaaagaagaagagaaggatggggtgtgccgtgagaaagatcatcgctctccatcagaattagaggccgagaggacttccggggcttttcaggacagcgtactagaagaagaggtggaattggttctggctccgtctgaagagagtgagaagtatatcctcaccttacagacagtgcacttcacctctgaggcggtcgaactgcaggatatgtccctactcagtatccaacaacaagagggagtccaggtggtggtgcagcagcccggtcctggacttctgtggttggaggagggccctcgccaatcactgcagcaatgcgttgctatttctatccagcaggaactctactcgcctcaggaaatggaggtcctgcagtttcacgcactggaggaaaacgttatggtggcgtcggaggactctaagcttgctgtgagcctcgccgagaccacaggcctaattaaattggaggaagagcaggaaaaaaatcagttacttgcagaaagaaccaaagaacagctgttcttcgtagagacaatgagcggagacgagcgctcagatgagattgttttaacagtctctaattccaacgtcgaggaacaggaggaccagcctaccgcagggcaggcagatgccgaaaaagcaaagtcaactaaaaatcagaggaagacgaagggcgcaaagggtacatttcactgtgacgtttgtatgttcacatcatctcgaatgtcatctttcaaccgacacatgaaaacacacacttcagagaagccccatttatgccacttatgtctgaaaacgtttaggaccgtgactctactgcgcaatcacgttaatacccacaccggcaccagaccatacaaatgcaatgactgcaatatggcgttcgttactagcggtgagctcgtgagacaccggcgatataagcatacccacgaaaagccctttaaatgctccatgtgcaaatatgcctccgttgaggcatctaagcttaaaaggcacgtgcgtagccacaccggcgagcggccttttcaatgctgccagtgttcttacgccagtcgggacacatacaaactgaagaggcacatgagaacacatagcggggaaaaaccatatgaatgtcatatttgccatacaagatttacccagtcgggaactatgaagattcacattctgcagaaacatggggagaatgtgccaaagtaccagtgtccacactgtgccaccatcattgcacgcaagtcagatctgcggttcctaggcctaccatttccctag

SEQ ID NO: 217368 - DNA, 1842 bp, synthetic construct
  misc_feature 1..1842: note = Description of Artificial Sequence: Synthetic coding sequence
  source 1..1842: mol_type = other DNA
atggcggctactgaaatcagcgtgctttcagagcaatttactaaaatcaaagaactcgaattaatgcctgagaaggggcttaaggaagaggagaaggacggagtttgtagggagaaagaccaccggagtccaagcgagctggaggccgaacgcacctctggagctttccaggacagcgttctggaggaggaggtggagctcgtcctcgcaccatcagaggagtcggagaaatatatcttgaccctgcaaacagtccattttacaagcgaagccgtcgagctgcaagatatgtcgctgctctccattcagcaacaggaaggtgttcaggtcgtggtgcagcaacccggacccggtttgctctggctcgaggagggcccacgtcagagcttgcagcagtgcgtggctatttctatacagcaggaactgtacagtccacaggagatggaagtcttacagtttcacgccctggaagaaaacgtgatggttgcgagtgaggattcaaaactggccgtgtctctggcggaaaccaccggattaataaagttagaagaagagcaggagaagaaccaattactggctgaacgcaccaaggaacaactcttctttgtggagaccatgtcaggagatgagcgctccgacgaaattgtcttgaccgtgtccaattctaatgtcgaggaacaggaggaccagccaactgctggacaggctgacgctgagaaggcgaagagtacgaagaaccagcgtaagacaaaaggagctaaaggcacgttccactgcgacgtttgtatgtttaccagtagtagaatgtctagtttcaacagacacatgaagactcacactagcgagaagccccatctctgccacctttgtctgaagactttcagaacggttaccctgctgcggaaccacgtaaatacacacactggcactcggccatacaagtgtaatgactgcaatatggctttcgtcacgtcaggcgagctggtgaggcaccgtagatataagcacacacacgaaaagccctttaagtgtagcatgtgtaagtacgccagtgtagaggcgtcaaagttaaaaagacatgtgcggagccacactggcgaacggccatttcaatgctgccagtgctcttacgcgagcagggatacctacaagctgaagcgccatatgagaacacattccggcgtccacatgcgcaacctccatgcgtacagcgccgctgagctgaaatgtcggtactgctccgccgtttttcacgagagatatgcattgattcaacatcagaaaacccacaagaatgaaaagagatttaagtgcaagcactgcagttatgcgtgcaaacaagagcgccacatgacggcccatatccgcacacataccggggagaagccctttacttgcctatcatgcaacaagtgctttaggcaaaaacagctcctaaacgcacactttagaaaataccatgacgctaatttcattcctaccgtctacaaatgctcaaaatgtggaaagggcttcagtcggtggatcaacctccatcggcacagtgaaaagtgtggatccggggaggctaagtccgctgccagtgggaaaggacggagaacacggaaaaggaaacagacaatactgaaggaagctactaagggccagaaggaagctgctaagggctggaaagaggccgcaaatggagacgaggcagccgcagaagaggcctctaccacgaaaggggagcaatttcccggagagatgttccctgtagcttgccgggaaaccaccgccagggtgaaagaggaagtcgatgagggggtgacttgcgaaatgctgctgaataccatggataagtag

SEQ ID NO: 217369 - DNA, 1452 bp, synthetic construct
  misc_feature 1..1452: note = Description of Artificial Sequence: Synthetic coding sequence
  source 1..1452: mol_type = other DNA
atggccgcaacagagattagcgtacttagtgagcaattcactaagatcaaggagctcgagcttatgccagaaaagggtctgaaggaggaggaaaaagatggcgtgtgtagggaaaaagatcacaggtccccaagcgagcttgaagcagagcgcacttccggcgctttccaggacagcgtgttggaggaggaagtagagctcgtgttggcaccaagtgaagaatcagaaaagtacatcctgacccttcaaacggtgcactttacctcagaagccgtggaactacaagacatgagtctactttccatccaacaacaagaaggcgtgcaggtggtggtccagcagcccggtcctggacttctgtggctagaggagggccctaggcagtccctgcaacagtgtgtggccatcagcattcagcaagagctgtactcccctcaggagatggaggtgctacaattccatgctctggaagaaaacgtgatggtggcgtctgaggacagtaagcttgccgtaagtctggctgagacaacaggactgattaaactggaggaggaacaggaaaagaatcaactgcttgccgaaaggaccaaggaacaactatttttcgtggagacaatgtccggggatgaacgctccgacgaaatcgtgctcaccgtgagtaactccaacgtcgaggaacaggaagaccagcctaccgctggtcaggccgatgctgaaaaggccaaatcaacaaagaatcagaggaagacaaagggcgctaaagggacttttcattgtgatgtgtgtatgttcactagttcccgaatgagtagcttcaaccgacacatgaagacccatacctctgaaaaaccccacctttgccacctctgcctgaagactttccggacagtgacccttttaagaaatcacgttaatacgcacactggaacacgcccatataagtgcaatgactgtaacatggcgtttgtaaccagcggcgagttagtgaggcatcggaggtataaacatacgcacgaaaagcccttcaagtgcagcatgtgtaagtatgcatccgtggaggagagacatatgaccgcccacatacgcacccacacgggggagaagccctttacctgtctgtcctgcaacaaatgtttcaggcagaagcagctgctgaacgcccattttcgtaagtaccatgacgctaatttcatcccaaccgtgtacaagtgcagtaaatgtggcaagggcttttctcggtggatcctgtgggtgggcaatagcgaagtcgctgagctggggggaccaggctcgggaccattactgcggctgcagtccgggtgtcctcccggactacaccatccaaaagccggactcggccctgaagatcctctgcctggccagctgcgtcataccactgccggtacgggcttgagctccctgctgcagggcccattgtgtagagcagcctag

SEQ ID NO: 217370 - DNA, 1998 bp, synthetic construct
  misc_feature 1..1998: note = Description of Artificial Sequence: Synthetic coding sequence
  source 1..1998: mol_type = other DNA
atggctgccaccgaaatttccgttctcagtgaacaattcacgaagattaaggaactggaactgatgccagagaagggactcaaagaggaggagaaggacggtgtatgtagagagaaagaccatcgttcaccctcggaactagaggctgaacgcacctccggcgcatttcaggattcggttctggaggaggaggtcgagctcgtgctagctcccagtgaggagagcgagaaatacatcctgactctgcagacagtccatttcacatctgaggcagtggagctgcaggacatgtcccttctaagcattcagcagcaggagggcgtacaggtcgttgtgcagcagccaggcccagggctgttgtggctggaagagggccctcggcagagcctgcagcaatgcgtcgctatcagcatacagcaggagctgtacagcccccaggagatggaagtcctccagttccacgccctggaggagaatgtcatggtggcttcagaggacagcaagctcgccgtgtccttggccgaaactaccggcctgattaaattagaggaggaacaggaaaagaaccaactgttagcggagcggacaaaagaacagctgttcttcgtcgagaccatgtcaggagatgagcgatctgatgagatcgtcctgaccgtcagcaatagcaacgtggaggagcaggaagaccagcccacggctgggcaagctgacgccgagaaggccaagagcacaaaaaaccagcggaaaaccaaaggggcaaaggggacttttcattgcgacgtgtgtatgttcaccagcagccgcatgtcgtcattcaatcgccacatgaaaacgcatactagtgaaaaaccacatttgtgtcatctgtgcctcaaaacttttaggaccgttactcttctccgcaatcacgtgaatactcacacgggtacaaggccatacaaatgcaatgactgcaacatggccttcgtgacatcaggtgagctcgtgagacatcggagatataagcacacacacgaaaagccatttaaatgctccatgtgtaagtacgcatcagtagaggcctccaaactcaaacgacatgtcagatcccataccggggagcgcccatttcagtgctgtcagtgcagttatgctagtcgagatacatacaaactgaagaggcatatgagaacacatagcggagaaaagccatatgaatgtcacatctgccacactcgcttcacccagtcagggaccatgaaaattcatatccttcaaaagcacggtgagaacgttccaaagtatcagtgtccgcattgcgctaccattatcgcaagaaaatcagatctgagggtgcatatgcgcaacttgcacgcatactcagcagctgaattgaagtgtaggtattgttctgccgtgttccatgagagatacgcccttattcagcaccagaaaacacataaaaacgaaaagagatttaaatgtaaacactgttcttatgcctgcaagcaggaacgccatatgactgcccacataagaactcacaccggcgagaaacctttcacatgtctgtcatgtaacaaatgcttcagacagaagcagctgctgaatgcccacttccgaaaataccatgatgctaacttcatacccactgtttacaaatgctccaaatgtggtaagggcttctctcgatggattaacctccacaggcatagcgaaaaatgcggatctggagaagcgaagagtgcagcttccgggaagggcagacggacaagaaaaaggaagcaaaccattctcaaagaagccacgaaggggcagaaggaggcagctaagggctggaaggaagccgcaaatggagacggagtgatctcagcccatcgcaacctgtgtctattgggctcatcagactcccatgcctcagtgagtggcgcaggaattacagatgcaagacaccacgcgtggttaattgtgctcctgttcctggtggaaatgggtttttaccacgtttcccattcatag

SEQ ID NO: 217371 - DNA, 1212 bp, synthetic construct
  misc_feature 1..1212: note = Description of Artificial Sequence: Synthetic coding sequence
  source 1..1212: mol_type = other DNA
atgttcaccagcagccgaatgagcagcttcaaccgacatatgaagacacatacgtccgagaaacctcacttgtgccacctctgtctgaaaacttttagaacagtcacgcttctcagaaatcatgtcaacactcatacaggcactcgaccatataaatgtaatgactgcaatatggcctttgtgacaagcggggaactagtccggcaccgacgctacaaacatacccacgaaaagcctttcaaatgctctatgtgtaaatacgcttcagtggaagcctctaaacttaagaggcacgtgcgtagccacacaggggaacgtccattccagtgctgtcaatgttcatacgccagtagagacacatacaagctgaaaagacacatgcggactcattctggagagaagccatacgaatgccacatctgtcatacacgattcacacagtccggtaccatgaagatacatattctgcaaaagcacggagagaatgtgcccaaatatcagtgtccccattgtgctacaatcattgccagaaagtcagacttacgcgtccacatgcggaatctgcatgcttatagtgctgcagaactgaagtgtagatactgctctgccgtgtttcatgagagatatgctctgattcagcaccagaaaactcataagaatgagaagagatttaagtgcaagcattgctcttacgcttgcaagcaggagcggcatatgacagcccacatccgcactcacaccggtgagaagccttttacctgcctgagctgtaacaagtgttttcggcagaaacagctcttaaatgctcattttcgaaagtaccacgacgcgaactttattcctactgtatataaatgcagtaagtgtggaaaaggcttttctaggtggatcaacctgcatcgacattcagagaagtgcggctcaggcgaggccaagtctgctgcttcaggtaaaggcaggcggacccggaagcgtaaacagaccatccttaaggaggcgactaaagggcagaaagaggctgcgaagggctggaaagaggcagcgaatggagacggcgttatttctgctcatcgcaacctctgccttttgggaagcagcgattcccacgcctcagtgagcggagcagggatcaccgacgcacggcatcatgcctggctcatcgtactgttatttctggtggagatgggtttttatcacgtgagccattcttag

SEQ ID NO: 217372 - DNA, 1269 bp, synthetic construct
  misc_feature 1..1269: note = Description of Artificial Sequence: Synthetic coding sequence
  source 1..1269: mol_type = other DNA
atgtcgggagacgagcgatcagatgagatagtactgactgtctccaatagcaatgtggaagagcaggaagatcagccaaccgctggtcaggctgacgcagaaaaggccaagagcacaaaaaatcaaaggaaaacgaaaggcgctaaggggacttttcactgtgacgtatgtatgttcacgtcctcgcggatgagctcctttaaccgccacatgaaaactcatacctctgaaaaaccccatctgtgtcatctgtgcttaaagacatttaggaccgtgacattgttacggaaccatgtcaacacacatacaggtacacgcccatataagtgtaacgactgcaacatggcttttgtgacaagtggagaactcgtcagacaccggcgttacaagcatacccatgagaagcccttcaaatgtagcatgtgcaaatatgcctcagtcgaggctagtaagctgaaacgacacgtcagaagccatactggcgagcgcccatttcagtgctgccagtgttcttatgcgagcagagacacttacaagcttaaaagacatatgagaactcacagcggggaaaagccgtacgaatgccatatctgtcacacgcggtttacccagtcaggcactatgaagatccacattctccagaaacacggggagaatgtcccaaagtatcagtgcccccactgcgccacgataatcgctcgcaagagcgaccttagagtgcatatgcgaaaccttcatgcctattctgccgctgaattaaagtgtcgctattgtagtgctgtatttcacgaacgttacgctctgatccagcaccaaaaaactcacaagaatgagaaacgctttaaatgtaagcattgttcctacgcctgtaaacaggagcggcatatgacagcacatatccggacccacactggtgaaaagccttttacctgcctcagctgcaacaaatgttttaggcagaagcagctgctgaacgcacacttccgtaagtaccacgacgcgaactttataccaactgtctataagtgtagtaaatgtggcaaaggcttctctcgatggatattatgggtggggaattctgaggtcgccgagctaggagggcctgggagtggaccccttctccgcctacagtctggttgccccccagggctccatcatcccaaggccggtctggggcctgaagatccacttcccggacaattgagacatacaaccgctggtaccggcctttcaagcctcctccagggacctctctgcagggcggcttag

SEQ ID NO: 217373 - DNA, 1296 bp, synthetic construct
  misc_feature 1..1296: note = Description of Artificial Sequence: Synthetic coding sequence
  source 1..1296: mol_type = other DNA
atgttccattctccacggcgtctctgttctgcactgctgcagcgagacgcacccggacttagacgacttcctgctcctggtctgcggcgtccacttagtcctcctgccgcagtcccaaggcccgctagcccaaggctgttggcagccgcaagcgccgcttctggggctgcgagaagttgttctcgtaccgtttgctccatgggtaccggcacctcacggctgtacagcgcactcgccaagaccttgaacagcagcgcggcaagccagcaccctgagtacctggtctctcccgatcctgaacacctggagcccatcgacccgaaagagctgctggaggagtgccgggctgtactccacacccggccaccgaggtttcaacgagactttgttgaccttaggaccgattgtccctctacccatcctccaataagggtgatgcaatggaacatcctggcacaggccttgggggagggtaaggacaattttgtgcaatgtcccgtggaagccctgaaatgggaggagaggaagtgcttaatcttggaagagatcctggcttaccaaccagacattctgtgcctacaggaagtggatcactattttgacacttttcagcccctgctgagtcgactgggctatcagggcaccttctttccgaagccctggtcaccctgcctggatgtcgaacacaataacggcccagatggctgtgccctgttttttctacagaatcggttcaaattggtgaacagcgccaacatcagactcacagccatgacacttaaaaccaatcaggtggctatcgctcagaccttagaatgtaaggaaagcggtaggcagttttgcatagcagtgacccatctgaaggcacgcactggttgggaacgttttaggtccgcccagggatgcgaccttctacagaacctgcagaatatcacacaaggtgcaaaaatccctttgatcgtatgcggggactttaacgccgagcctactgaggaggtatacaaacatttcgccagttctagcctcaatttgaatagcgcctataagctgctttcggcagacggacaaagcgaacccccttacaccacgtggaagattcgcaccagcggtgagtgcaggcatacactggattatatttggtacagcaagcacgctctgaatgtgcggtcagctctggatcttctaactgaggagcagataggcccaaaccgactgcccagtttcaactatccctcagatcacctgtctctggtgtgcgacttctcatttacggaggagtcagacggtctgagctag

SEQ ID NO: 217374 - DNA, 2133 bp, synthetic construct
  misc_feature 1..2133: note = Description of Artificial Sequence: Synthetic coding sequence
  source 1..2133: mol_type = other DNA
atgtctcggtcaccagacgcgaaggaggacccagtcgaatgtccactctgcatggagcccctagagatcgatgacatcaacttcttcccctgcacttgcggttatcagatttgcaggttctgttggcaccgtatccgtacagacgagaacgggctgtgccctgcctgcagaaaaccttatccagaggatccggcagtctacaaacctctcagtcaagaagagctccagcggatcaaaaacgaaaaaaagcagaaacagaatgagaggaaacagaagataagtgaaaacagaaagcatctggcaagcgtcagggtcgtgcagaagaatctggtcttcgtggtcggccttagccagagactggctgaccccgaggttctgaaaagacccgaatacttcgggaagttcgggaagatccacaaggtggtcattaataactctacctcatacgctggatcacagggaccaagcgcctcagcatacgtgacctatatccgcagtgaagatgcgctacgggctattcagtgcgtgaacaacgtggtagtggatggtagaacactaaaggcatctttgggcacaactaagtactgctcttattttctaaagaatatgcaatgcccaaagccagattgcatgtacctgcacgagctgggcgatgaagctgcctcttttactaaagaggagatgcaggccggaaaacaccaggaatacgagcaaaaactcctccaggagctttacaagcttaaccccaacttccttcagcttagtacaggaagtgtcgacaaaaataagaacaaggtaactcccctgcaatcgcctatcgataaaccttctgattccctcagcattggcaacggagacaattctcagcagatttccaattcagacacaccgagtcccccacccggtttgtcaaagtctaaccccgtgattcctatcagttcatccaaccacagcgccaggtccccattcgagggcgcagtcacagagtcacagtccctgttctctgacaatttcaggcaccccaaccccatcccctccggtcttccgccatttcccagcagccctcagacctcctccgattggccgacagctccagagccccaatcactgtttacttcggaaacaattccagtgtcatcgtcaacagactggcaggccgcatttggattcgggtcctcaaaacagcctgaggatgatctgggctttgaccctttcgatgtgaccaggaaggcactcgcggatcttattgaaaaggagctgagtgttcaggaccaaccctcactatcccccactagcctccagaatagttcatctcataccaccactgccaaagggcctggcagcggatttttacatcctgccgctgcaaccaatgccaactcactgaattcgacttttagcgtgttgccacagagattccctcagttccagcagcaccgcgcagtttataactcattttctttcccaggtcaggccgctcgttacccttggatggccttcccgcgtaacagtataatgcacttgaaccacactgccaacccaacttccaacagcaattttctcgatcttaatctgccgcctcagcacaatactggtctcgggggtatccctgtggccgataactccagtagtgtggagagtctgaacatgaaggaatggcaggacggtctgcgggcattgctacccaatattaatatcaactttggcggtctacccaacagctcgtcaccctccaacgccaatcattcagccccaacttcaaacaccgcaactaccgattccctgagttgggattccccaggatcgtggactgacccggctatcatcacgggcatcccggcaagcagtgggaactctctcgatagtcttcaggacgataaccctcctcactggcttaaatctctacaggcgcttaccgaaatggacggccctagcgccgcacctagtcagactcaccatagcgccccttttagcacgcaaattcctctgcaccgtgcctcttggaacccctacccccctccaagcaacccaagctcttttcatagcccccctcccggattccaaactgcttttagaccaccttcaaaaacacctactgacttgctccaatcaagcacgttagacaggcactag

SEQ ID NO: 217375 - DNA, 3684 bp, synthetic construct
  misc_feature 1..3684: note = Description of Artificial Sequence: Synthetic coding sequence
  source 1..3684: mol_type = other DNA
atgactcaaaaagtcgaagagctgaaagaaaccgtgaaggaggagtttatgccttgggtttcacaatatctagtcatgaaacgcgtctccattgagcccaattttcacagcctctacagtaactttctcgatactttaaaaaacccggaattcaacaaaatggtgctgaacgaaacatatcggaacattaaagatctggatgtgaaatcactgctcctcgaagcatatgtgaaaggacaacaagagttgttgtacgtagtgccatttgtggccaaagtgctggaaagcagcatccggtcagtggtatttcgtcctcccaacccatggacaatggctataatgaacgtgctggccgagctccaccaagagcatgatctaaagctgaacctgaagttcgaaattgaggttctatgcaaaaacttggccctggacatcaacgaacttaaacctggaaatcttctgaaagacaaggaccgtctcaagaacttagatgaacaattaagtgcaccaaagaaagacgtgaagcagcctgaagaattaccaccaattacgacgaccacgacttccaccactcctgcgaccaacaccacctgcacggccaccgtgcccccacagccccagtacagctatcatgatataaatgtctatagcctcgcaggccttgcacctcatatcacattgaatccaaccattccgctctttcaagctcaccctcagctgaagcaatgcgttcgacaggcaattgagcgggctgtgcaggaactagtgcaccccgttgtcgaccggtccataaagattgccatgacaacatgcgagcagatcgtccgcaaagatttcgctcttgatagtgaggagtcccgtatgcgaatcgccgctcatcatatgatgcgcaacctgaccgccggtatggctatgattacctgtagggagcccctgctgatgagcatcagcaccaacctgaagaatagctttgcgagtgctctgcgcactgccagcccccagcagagggagatgatggaccaggccgcagctcagcttgctcaagataactgtgaactggcctgctgcttcattcagaaaacggcagtagagaaagctggaccagagatggacaaaagactggccaccgagtttgaactcagaaagcatgccaggcaggagggcaggaggtactgcgatcctgttgttttgacctaccaagcggagcgcatgcccgagcagatacggctgaaggtggggggtgtcgacccaaagcaattggctgtctatgaagaatttgcgcgaaacgtgccgggttttctgcctaccaacgacctatctcagccgactggttttcttgcgcaacctatgaaacaagcatgggccacagacgacgtggcccagatatatgacaagtgcataaccgaactggagcagcacctacatgcaataccacccaccctggccatgaatccccaggcccaggctcttaggtctcttctcgaagtggtggtgttatcaagaaattcccgagacgcaattgcagccctgggcctcctccagaaagccgtggaaggactgcttgacgcaaccagcggggctgatgccgacctgctgctgaggtacagagagtgccacttgctggtgctgaaagctctgcaggatggcagggcttatgggtctccctggtgtaataagcagatcaccagatgtcttatcgaatgccgggacgagtacaagtacaacgtcgaggccgtcgagcttttaattagaaatcatctggttaacatgcagcagtatgacctccaccttgctcagagcatggagaatggattaaactatatggcggtcgctttcgctatgcagctggtcaaaatcttgcttgtcgacgagcggtctgtggcccacgtgaccgaagctgatctgttccacaccatagagactctgatgagaataaatgcccacagtaggggcaatgcccctgagggactcccccagctcatggaggtggtcagatcgaattatgaagccatgatcgaccgtgcccacggagggccaaactttatgatgcactccggtatatctcaagcgagcgagtacgatgatccccctggattacgagaaaaagcagaatacctacttagggagtgggttaatttgtaccattccgctgccgctggaagagattcaacgaaagcattctctgccttcgtcggacagatgcaccagcagggcatactaaaaacagacgacctgatcacgaggttctttcgcttatgtaccgagatgtgcgtggaaataagttatcgtgctcaggccgaacagcagcataaccctgcggcaaaccccaccatgattagggccaaatgttaccacaatctggacgcctttgtgcggctcatagccctgctcgtgaaacatagcggcgaagcaacaaacacggtgacgaagatcaatctgttaaataaggtgctcggaattgtggtcggcgtgcttctgcaggatcatgatgtgaggcaatcagaatttcagcagctgccatatcacaggatctttattatgctgctgctggagctcaatgctccagaacacgtcctggagacaataaacttccagacgttgacggccttctgtaatacattccatatcctgcgccctacgaaggcgccaggattcgtgtatgcatggcttgaactaatcagccaccgcatcttcattgcccgtatgttggcacacacaccgcagcagaaaggctggccaatgtacgcccagctgcttatcgaccttttcaagtatttagccccattcctgcggaatgtagagctcaccaaacctatgcagatcttgtacaaaggaactttgcgggtgttactggtcctcctacatgattttcctgagtttctgtgtgactatcactatggcttctgcgatgtgattcccccaaactgcatccaactgcgcaacttgattctgagcgccttcccccgtaatatgcggcttccggatccattcactccgaaccttaaagtggacatgctatctgaaattaatatcgcccctaggatacttactaactttactggagtgatgccccctcagttcaaaaaggatctggacagctaccttaagactcgatccccagtcaccttcctaagtgatctcagatcgaacctgcaggtgtccaatgagcctggcaatcggtacaatctgcagttgattaacgcactggtgctatacgtgggcacccaagcaatagcgcacattcataataaggggtctacgccatctatgtccaccatcacccattctgcccacatggatatattccagaacctggccgtggatctcgacacagaaggccgatacttatttctcaatgctatcgccaatcagcttcgctatccaaattcccatacccactatttcagctgcacaatgctgtacctgtttgcagaggccaacactgaggccattcaggagcaaataacccgggtgctacttgagcggttaatagtgaataggccccacccttgggggcttctgattacattcatagaactgattaagaacccagcttttaaattctggaaccatgagtttgtgcattgtgcacccgagattgaaaaattgtttcagagcgtggctcaatgttgtatgggccagaaacaggcgcagcaggtcatggaaggaaccggggcaagctag

SEQ ID NO: 217376 - DNA, 7130 bp, synthetic construct
  misc_feature 1..7130: note = Description of Artificial Sequence: Synthetic coding sequence
  source 1..7130: mol_type = other DNA
atgaacttggattccctatctctggcgctgagtcagatctcatacttagtggataaccttactaaaaagaactatagagccagtcagcaggagattcagcacatcgtcaatcggcatggacctgaggcagatcgccacctactcagatgcctttttagtcacgtggacttttccggagacggcaaatcttccggtaaagattttcatcagacccagttcttaatccaggaatgtgcccttttgattaccaagcccaatttcatttcaacattaagttatgcgatcgacaatcctcttcattatcagaaatctttaaaacctgccccacatctgtttgcacagctgagtaaagtccttaagctgtctaaggtgcaggaagttatctttggactggcactgctcaactccagttcatctgacctccgaggttttgccgcacagttcatcaagcagaaactgccagacctccttaggagctacatagacgcagatgtgtcaggaaatcaggaggggggtttccaagacatcgcgatcgaagtcctgcatctcctactctcacacctgctgttcggtcagaaaggtgcctttggtgtcggacaagagcagatcgacgcttttctgaaaaccctgcgcagagacttcccccaggagagatgtcccgtcgttcttgcccctcttctctacccagagaagcgggacatcttgatggatcgcattctgcccgactccggcggtgtggcaaagaccatgatggaaagctcgttggccgattttatgcaagaggtcggttatggattttgcgcgtcaatagaggaatgtcgaaatatcatagtgcagtttggcgtgcgtgaagtgactgctgcccaggtcgccagggtgctgggtatgatggccaggacacatagcggcctcactgatggtatccccctgcaatctatctccgccccagggtcaggtatctggtccgatggaaaggataagtccgacggtgctcaggctcacacatggaatgtggaggtgctaatcgacgtgctgaaagagttaaacccctctttgaactttaaggaagtaacatatgaattggaccacccaggattccaaatccgggactcaaaaggtctccacaacgtagtttatggcatccagagaggcctcgggatggaggtcttccctgtggatttgatttatagaccatggaaacatgctgaaggtcaattatcattcatacaacatagcctcattaaccccgagatattttgtttcgctgattacccatgccacacagttgctacggacattcttaaagctccaccggaggatgataacagggagatagccacttggaaaagcctggacttgatcgaatcactcttgcgattggccgaggttggtcagtacgagcaagtaaagcaactgttctcatttcccattaagcattgcccggatatgctggtgctggcgctgctgcaaatcaatacgtcctggcataccctgcggcacgaattgatctctactttgatgccaatttttctggggaaccatccaaacagcgcaattatattgcactatgcgtggcacggccagggtcagtcacccagcatccgacagctgattatgcacgccatggcggagtggtacatgcggggagagcaatacgaccaggcaaagctgagtcggatcttggacgtggctcaggacctcaaggctctttcaatgcttttgaatggcactccattcgccttcgtaatcgatctggctgccttggcaagccgcagagagtatcttaaattggataaatggttaacagacaagattcgagagcatggcgaaccatttatccaggcctgtatgacttttctcaagcgtcggtgcccatcaatcctcggagggctcgcacctgagaaggatcagccaaagagtgcccaactgcctccagaaacactcgcaaccatgctcgcatgcttgcaagcatgtgctggttccgtgagccaggaactatccgaaacaatcctgacaatggtggctaactgttccaatgtcatgaataaggcgcgacagccccctcccggtgtgatgccaaaggggaggccccctagcgctagctctctagacgccatatctcctgtgcagattgacccactggccggaatgaccagtttgtctatagggggaagcgcagctcctcacacacagtccatgcagggcttcccacctaacttagggtctgctttctcaaccccacaaagccccgctaaggcttttcctccgctgtcaacaccaaaccagacaactgctttctccggcatcggaggcttgtccagccagctgccagtgggcggacttggtacaggaagtctgacgggtattggcaccggtgcgttgggactgcccgcagtcaataacgaccccttcgtacagagaaaattgggaacatcaggcctgaaccaacctaccttccagcagtcaaaaatgaagccaagcgatctgtcacaggtgtggcctgaggcgaatcagcattttagcaaagagattgacgacgaggccaatagctattttcagaggatatataaccatcctccccacccaacaatgagcgtggacgaggtcctcgagatgctgcagcgctttaaagattcaaccattaaaagggaaagggaagtgttcaattgtatgctgaggaatctgttcgaggagtacaggttctttccacagtaccctgacaaggaactgcatatcaccgcatgcctattcgggggaataatcgagaaaggattggtcacatatatggctctcggccttgcactgcgttacgtcttggaagccctgaggaagccttttgggtctaaaatgtactatttcgggattgctgcactggatcgctttaagaaccgtcttaaagattacccccagtactgccagcacctcgcctccatctctcacttcatgcaatttcctcatcacctgcaggaatacattgaatatggacagcagtccagggatccccctgtgaaaatgcagggatctattaccactccagggtccatcgccttagcccaagcgcaggcacaggcccaggtccccgcaaaagccccactggcgggtcaggtgtccaccatggttacaacctctactactaccaccgtggcgaaaaccgttacggtgaccaggcctacgggggttagtttcaagaaagatgtgcctccatccatcaatacgacaaacatcgatacgcttcttgtggctactgatcagacggagagaatcgttgagccacctgaaaacatacaggagaaaattgccttcatctttaataacctgtcacagtctaacatgactcagaaggtggaggagctcaaagagaccgtcaaagaagagtttatgccctgggtgagtcaatatcttgtgatgaagagagtcagcattgagccgaactttcacagtctgtattcaaatttcttggataccctgaaaaaccccgaattcaacaaaatggtgctgaatgagacctatcgaaatattaaagttttgctcactagtgataaagctgccgcaaacttctcagatcgaagtctgttgaaaaatctgggccactggctcggaatgatcactctcgcaaagaataaaccaattctccacactgacctggatgtgaagagcttgctacttgaggcctacgttaaggggcaacaggagctcctgtacgtggttcccttcgtcgccaaagtgctggaaagctctattcgctcggtggtgttcaggccgcctaacccatggaccatggccatcatgaacgtcctggccgaactccaccaagagcacgacctaaagttgaacctcaagttcgaaatcgaagtactgtgtaaaaacctcgctttggacataaacgagcttaaacctggaaacctgttaaaagacaaggacagactgaagaatctcgatgagcaacttagcgcccctaaaaaggacgtcaagcagcccgaggaacttcccccaatcacgacgaccaccacctcgactactcccgctaccaacaccacttgcactgcaactgtgccacctcagccacagtacagctaccatgatataaatgtgtattctttagccggtctcgccccacatatcaccctgaatcctaccatcccgctgttccaggcgcatccacagttgaaacaatgcgttaggcaagccatcgaaagagccgtgcaagaacttgtacatcctgtggtcgaccgctctatcaaaatcgcgatgacaacctgcgagcagattgtgcgaaaggattttgccctggattctgaggagtcaaggatgcgaattgccgctcaccacatgatgcgcaatttgacagcagggatggccatgattacatgtcgggaacccctgctcatgagtatcagtacaaatcttaagaactcattcgcttccgcgttgcggactgcctcccctcagcagcgcgaaatgatggatcaagccgcagctcagctggcacaggataactgtgagctcgcatgctgcttcattcagaagacagcagtagagaaagcagggccagaaatggacaagcgcctcgctaccgagttcgagctgagaaaacatgccaggcaggagggccgacgctactgtgatcccgtggtgctgacataccaggctgaacgtatgcccgagcaaatccgccttaaggtcggcggtgtggaccctaaacaactagctgtttacgaagagtttgcacggaacgtgcctggatttttaccgaccaacgacctatcgcagcctacaggttttctcgcccagccgatgaagcaggcctgggccaccgatgatgttgcccagatctacgacaaatgcatcaccgagctggagcagcatcttcacgctatcccccctacactagccatgaatccacaggcacaggccttacggagcctccttgaagtggtagtactgagtaggaattcacgcgacgccatcgcggcacttggcctgttgcagaaagccgtggagggcctcctcgacgctacatcaggagcggacgcagacctgctgttgagatatagagagtgccacctcttagtgctcaaagccttgcaagacggtcgtgcctatgggtccccatggtgcaataaacagatcaccagatgcctcatagaatgtagagacgaatacaagtataacgtggaggcagtcgaattgttgatcaggaatcatctcgtcaatatgcagcagtacgaccttcacctggcccagagtatggaaaacgggctcaattatatggcagtcgcttttgcaatgcaactggtgaagatcttacttgtggacgaacggagcgttgcacacgtgacggaggcggacctattccatacaatcgagacactcatgaggatcaacgctcacagccgcggtaacgccccagagggactgccacagctgatggaagtggtgcgctccaattacgaggctatgatcgaccgcgctcacggaggccctaactttatgatgcactcaggcatcagtcaagctagcgaatatgacgatccacccggattacgtgaaaaagctgagtatcttctgcgtgagtgggtcaacctgtatcattcggctgctgcaggccgagactcaacaaaagcattttccgcattcgtcggccagatgcaccagcagggaatcctcaagacagacgacttgattactaggttttttcggctttgcaccgaaatgtgcgtggaaatctcatatcgggcacaagctgaacagcagcacaatcctgcagctaatcctaccatgatacgcgctaagtgctatcataacctggatgcgttcgtgagactgatcgccttgctcgtgaagcattcaggtgaagctaccaataccgtgaccaagataaacctgctgaataaagttcttggaatcgttgtgggtgtgctgctgcaggaccatgacgtaagacagagtgaatttcaacagctcccataccataggattttcatcatgctgttattggaattgaacgctcccgagcatgtgctggaaaccatcaatttccagaccctgacggcattctgcaacactttccacatcctgaggcccaccaaggcccctggatttgtgtatgcctggctcgaacttatctctcaccgtatttttatagcccgaatgttagcccacacccctcagcagaaggggtggcccatgtatgcccaactgctgatagatctgttcaagtatctcgctccgttcctgcgcaacgtggagctcacgaagccgatgcagatactttacaaggggactttacgggtgcttctggttctcctgcacgatttccctgaattcctttgcgattaccattatgggttctgcgacgtgattccccctaattgcatacaactccggaatctgattctcagtgcttttcctcggaatatgagactgcctgatcccttcaccccgaatctgaaagtggatatgctctctgagatcaacatagcccctaggattcttaccaactttacgggcgtaatgcctccacagtttaagaaagacttagactcttacctgaagactagaagtccggtgacgtttctgagcgatctccggagcaatctgcaggtctcaaatgagccgggaaatagatacaacctgcagctgattaacgcactcgttctgtacgttggcacccaggctatagcacacatccataacaagggatccactccaagtatgtcaactatcactcactcagcacatatggacatctttcagaacctggcagtggatctggacactgagggccgatatttgttcttaaacgccattgccaatcagctgcgatatcccaactcgcatacacattatttctcttgcacaatgttgtatctgttcgccgaagctaataccgaagctattcaggaacagattacgcgagttctcctcgaaagactgattgtgaatcgccctcacccttggggccttctgattacttttatcgagcttatcaaaaaccccgcttttaagttctggaatcatgagtttgttcattgcgccccagaaattgagaagctcttccagtctgtggcccaatgttgtatggggcaaaagcaggcccagcaggtgatggaaggcacgggtgcatctta

SEQ ID NO: 217377 - DNA, 6452 bp, synthetic construct
  misc_feature 1..6452: note = Description of Artificial Sequence: Synthetic coding sequence
  source 1..6452: mol_type = other DNA
atgaatttggactctttgtctctggctctctctcaaatttcctacctggtggacaacctgaccaaaaagaactacagggccagccagcaggagatacaacacatcgtcaacaggcatgggcctgaagccgaccggcatctgttgagatgccttttttctcacgtggacttttcaggggacggtaaaagttccgggaaggacttccaccaaacgcaattcctgatccaggaatgtgccctgctgataacaaaaccaaactttatctctaccctctcttacgcaatcgacaatccactgcattatcagaagtctttgaagcccgctccccacctttttgcccaactgtccaaggttctcaaattatctaaggttcaggaggtgatttttggccttgccctgttgaactccagctcgagcgacctcaggggctttgccgcacagtttattaaacagaaattgccagacctgctccgatcttatatcgatgccgacgtctccggtaaccaggaggggggtttccaagatatagcgatcgaggttctgcacctgctgctgagtcacctgctgttcggccagaaaggtgccttcggcgtgggccaggaacagattgacgctttcctgaaaaccctccggagggatttcccacaggagcgatgtcccgtggttctggctcctctgctctatccggaaaagcgagatattttgatggaccggatcttgccggactctggaggagtcgccaagactatgatggagagttccttagccgattttatgcaagaagtcggttacgggttttgtgcctctatcgaagaatgtcggaatattatcgtgcagttcggtgtaagagaggtaacagcagctcaggtggctcgagttctgggaatgatggccagaacccattctggcttgaccgatggtatcccattacagtctatctccgccccaggtagcggcatctggtctgatggtaaggataagagcgatggggctcaggcccatacctggaacgtcgaggtgcttatcgatgtgttgaaggagctgaatccctctctgaatttcaaggaagttacttacgagctggaccaccccggatttcagattcgcgattccaaggggctgcacaatgtagtgtacggtattcagcgcggactgggtatggaggtctttccagtggatcttatctatcgtccgtggaagcacgccgagggccagctgtcttttattcagcactcgttgatcaaccccgaaatcttttgtttcgctgactatccctgtcacactgtggctacagacatcttgaaggcaccccctgaggacgacaacagggaaattgcgacctggaaaagcctggatctgatcgagtccttgctcagactggccgaagtggggcaatacgagcaagttaagcagctcttttccttccccattaagcactgccctgacatgcttgttcttgctttgctccaaattaacacgtcctggcacaccttacgtcatgaattgatctctactctcatgcctatcttcctcggaaaccacccaaactcagcaatcatcttgcactatgcctggcatgggcaaggacagtcaccttcaataagacaactgataatgcatgccatggccgaatggtatatgcgcggagagcagtatgaccaggctaaattatcaaggattctggacgttgcccaagatttgaaagccctgagcatgcttttgaatgggacaccttttgctttcgtcatcgatttggcagcgctggcctctcggcgagaatacctgaaattggataaatggctgacagacaagattcgagagcacggcgaaccttttatccaggcatgcatgacttttcttaagagaaggtgcccttctatcctgggaggactcgcccctgagaaggatcaacccaaaagcgcacagctgccccctgaaacgctggccacaatgctagcatgcttgcaggcctgtgccggtagcgtcagtcaggaactctcagagactattttgactatggtggccaattgtagcaatgtgatgaacaaggccagacagccacctccaggggtaatgcccaaaggtaggcctcccagcgcctcttcgctggacgcaattagtcctgtgcagattgacccgctcgctggtatgacttctctcagtatcggcggatccgccgcaccccacactcagagcatgcagggctttccgccaaatttgggttcagctttctctaccccccaatcaccagccaaagccttcccccctctatcgacacccaaccagactacagccttcagcgggatcggagggttgtcaagtcaactgcctgtgggcggacttggcacagggtcgttaaccggaattgggacaggggctctaggccttccagctgtaaataacgatccatttgtgcagagaaagctgggaacctccggtctgaaccagcccaccttccagcaaactgacctttcccaggtttggcctgaagcgaatcagcacttctccaaagagatcgatgacgaagccaactcttactttcagcgcatctacaatcatcctccccacccgacgatgtctgttgatgaggttctggaaatgctgcagagattcaaagactccacaatcaaaagggagagagaagtcttcaactgcatgttgagaaacctgtttgaagaatatcgattcttcccccagtacccagataaggaactgcatatcaccgcatgcctgttcggcggtattatcgaaaagggattggtgacgtatatggctctaggcttagccctgaggtatgttttggaagccttgcggaaaccattcggctcgaagatgtattacttcgggatcgccgcactggatcgctttaaaaacagattgaaagactatccgcagtattgtcagcacctggcctctatcagtcatttcatgcagttccctcaccatctgcaggagtacattgaatacggtcagcaaagtcgcgacccccctgtgaagatgcaaggttcaattacaacacctggatccatagccctcgctcaggcccaagcgcaggctcaagtgcccgctaaagctcccctagccggtcaggtaagtacaatggtcaccaccagtaccaccactactgtggccaaaacggtgacggtgacaaggccgacaggggtgtccttcaaaaaagacgtccccccttcaatcaatactacaaatattgacacactcttagtggccactgatcagactgaacggattgttgaacctcccgaaaacatacaggaaaaaatagccttcatcttcaacaatctatcacagagtaatatgacacagaaggttgaggaactgaaggagacagtgaaagaagaattcatgccatgggttagtcagtacctcgttatgaagagagtgtctatcgagcccaatttccactccctttattccaactttctcgacacgttgaaaaaccccgaattcaacaagatggtcttgaatgaaacatatagaaacatcaaagtgctgttgactagtgataaagccgctgctaactttagtgacagatcgctgctcaaaaatcttgggcactggttgggcatgattacactcgccaaaaataaaccgatcctgcatacagacctggacgtcaaatcccttctgctcgaggcctacgtgaaagggcagcaggagctgctttatgtcgtgccctttgttgctaaagtactcgaatcttcgattcgttccgtagtgtttaggcccccaaatccctggaccatggctatcatgaacgtattggctgaattacaccaggagcacgacctgaaattgaacctgaagttcgagatcgaagttctgtgtaaaaaccttgctctggatattaacgaactgaagcctggcaacctgcttaaggacaaggatcgcttgaagaatctcgacgagcagctgagcgcacccaaaaaagatgtgaagcagcccgaggagctgcctccaataaccaccacgactacttctacaaccccagccacgaacacgacctgtaccgccaccgtgcctcctcagccccagtattcctaccatgacatcaatgtttacagcctggcaggtcttgcccctcacattaccctgaaccccaccatcccacttttccaagcacatccacagctgaaacagtgtgtacggcaggccatcgaacgcgctgtgcaggagctggtacaccctgtagtcgacaggtctatcaagattgccatgaccacctgtgagcaaattgtccggaaggacttcgccctagactccgaagagagcagaatgcgtattgccgcacatcacatgatgcgcaaccttaccgctggaatggctatgattacttgcagagagccgctgcttatgagcataagcacaaatctgaagaactcgttcgcttctgccttgaggacagcgtctccacagcagagggagatgatggatcaggctgccgctcaactggctcaagataattgcgagttggcttgttgtttcattcagaaaacagctgtcgaaaaagccggtcctgaaatggacaaacggttagccacggagttcgagctgcgtaagcacgctcggcaagaggggaggcggtattgcgatcctgtagtcctgacttaccaggctgagaggatgcccgaacagatccggctgaaagtgggcggagtggatccaaagcaactagccgtgtatgaggaattcgcgagaaacgtgcctggattcctgcctaccaacgacctgtcacagcccacaggttttcttgcccaaccaatgaagcaggcctgggctacagacgacgttgcccagatctacgataaatgcattaccgagctagagcaacacctgcacgctatcccccctacattagcaatgaatccacaagctcaggccttacgctccctgctggaagtggtagttttgtcccggaactcccgcgatgccattgcagccttgggactgctccagaaggcggtcgagggactattagatgcaacatctggcgctgatgcggatcttctcctgcgctaccgggagtgtcatcttctggtcttgaaggcactgcaggatggcagggcatacggctctccttggtgcaataaacagattacacgctgcctgatcgaatgccgcgatgagtataaatataacgtggaagccgtggaacttttgatacgaaaccatctggtgaacatgcagcagtatgatctccacttagcacagtccatggagaacggcctgaattacatggccgtggcattcgcaatgcagctagttaagattctgctcgtcgatgagaggagcgtggcacatgtcacggaggccgacctctttcatactattgaaacgttaatgagaattaatgcacatagccgcggtaatgcccctgaggggttaccccagcttatggaagtggtgaggagcaactacgaagccatgatcgatagagcccacggaggtcctaactttatgatgcattcgggtatttcccaggccagcgagtatgatgaccctcccggattgcgcgaaaaggcagaatacctgctaagagaatgggtcaatctgtaccactctgctgctgccggaagggacagcacaaaggccttctctgcatttgtggggcagatgcatcaacagggaatccttaaaactgatgatctcattacacgatttttcagactctgcactgaaatgtgcgtcgaaatttcctaccgcgctcaggctgaacaacaacataatcccgctgccaaccccactatgattcgcgctaaatgctaccataaccttgacgctttcgtgaggctcatcgcccttctggtaaagcactcaggcgaggcaactaatacagttaccaaaatcaacctgctcaataaggtccttggtatcgtcgtgggcgtgttgctgcaggatcatgatgtccgccagtccgaattccagcagcttccttaccaccggatctttataatgcttctcttagaactgaacgccccagagcatgtcctagagactatcaactttcagaccttaacagccttttgtaacactttccatatattaagacctacgaaggctcccggttttgtttatgcctggctggagctcatttcccatagaatctttatagctaggatgcttgctcacactccacagcaaaaaggctggcccatgtacgcacaactgctgatcgatcttttcaaatatctggctcctttcctgaggaatgtcgaactgaccaagcctatgcagatcctctataaaggcacccttagggtgctgttggttcttctgcacgacttccctgaattcctctgcgactaccactatggcttttgcgacgtgatcccccctaattgtatccaacttaggaaccttatcctttctgcgttcccacgtaacatgcggctgccagatccattcacgccaaacttgaaagaaatcatgctcta

SEQ ID NO: 217378 - DNA, 3213 bp, synthetic construct
  misc_feature 1..3213: note = Description of Artificial Sequence: Synthetic coding sequence
  source 1..3213: mol_type = other DNA
atgctgctcaatgggaccccttttgcttttgtaatagacctggcagcgcttgcctctcggagagagtacttaaagctggacaagtggctcaccgataaaatccgcgaacacggcgagccctttatccaagcgtgcatgacctttctcaagagaaggtgccccagcatactgggcggtttggcccctgaaaaggatcagcccaaatcagctcagctgccgccagaaaccctcgcaacaatgctggcctgtctgcaggcttgcgctgggtccgtaagtcaggaactgagcgaaaccatcctcaccatggttgcaaattgtagtaatgttatgaataaggccagacaaccaccgccaggcgtgatgccgaaagggagacctccatccgccagcagcttggatgctattagccccgtccaaatagatcctctggcgggtatgacctccctcagcattggaggaagcgctgcgccacatacacagtctatgcagggttttccccctaatttggggtcagctttctcaaccccccagtctcccgctaaagcttttccacccctgtctacgcctaaccagacaaccgcatttagcggaatagggggactgtcttcacaattgccagtgggaggcctaggcacaggatctctaactggaatcggtacaggagccctcggactcccagccgtaaataacgacccattcgtccagagaaagttggggacgtccggactcaaccaacctacatttcagcagtcaaagatgaagcctagtgatctatcccaagtgtggccggaggccaatcagcacttcagtaaagagatcgacgacgaagccaactcctactttcaacggatttacaaccaccctccgcaccccaccatgtctgtggacgaagtactcgagatgcttcaacggttcaaggattctacaatcaagcgggagagagaggtgtttaattgcatgctgcggaacctgttcgaagaatacagattttttccacagtatcccgacaaggagctccacatcacagcttgcctattcggaggaatcattgaaaaaggcctggtcacttacatggccttaggactggctctgaggtacgtcctagaggcccttagaaaaccttttggcagcaagatgtactattttggcatagctgccttagataggtttaagaacaggctcaaggactatccgcagtactgccagcacctagcatccatttctcacttcatgcagtttccacatcatctgcaggagtatattgagtatggccagcaatcccgagatccaccggttaagatgcagggctcaatcacaactcccggttccattgcactggctcaggcccaggctcaagcccaggtcccagccaaagcccctcttgcagggcaggtgtctacgatggtcaccacaagcacgacaactacagtggcaaagaccgtgacagtgactcgccctacaggcgtgagcttcaagaaggacgtcccgccttcaattaacacaaccaatatcgacacacttctggtcgcaaccgaccaaaccgagagaattgtggagccacccgagaacattcaggaaaagattgcatttatttttaataacttgtctcagagcaacatgacgcagaaagtggaagaacttaaagaaaccgtcaaagaggagttcatgccttgggtcagccagtatctcgttatgaaacgcgtgagcatcgagccgaattttcattctctgtactccaattttctcgataccctgaaaaacctgattacccgattcttccgcctgtgcaccgagatgtgcgtggagatctcttacagggcccaagctgaacagcaacataacccagcagctaatcctacgatgatacgcgcaaaatgttaccacaacctggacgccttcgtgcgacttattgccctcctggtgaagcactccggcgaagccaccaacaccgtgactaaaatcaatctcttgaataaagttttggggattgtggtgggagtgctgctgcaagaccacgatgttaggcaatccgaattccagcaactgccctaccaccggatcttcattatgctattgctggaactaaacgcaccagagcatgttttagagacaattaattttcagacgctgaccgccttttgcaatactttccatatcttgcggcctaccaaagctcctggatttgtttacgcatggctagagttgatttcacataggatctttatcgcacgtatgcttgcccacacacctcaacaaaaaggatggccgatgtacgcacagctcttgatcgatctgttcaagtacctggcccctttcttgaggaatgtcgagctgacaaagcccatgcagatactgtataaagggacactccgcgtgcttctcgtgctattgcatgactttcccgagttcctgtgcgactatcactatggattttgtgatgtgatccctcctaattgtatccagttgaggaatcttattctgtcagcattccccagaaacatgaggctgcctgatcctttcacgccgaacctgaaggtggacatgttaagcgagattaatattgctcccagaatcttaaccaatttcacgggcgtcatgccgccacaattcaagaaagaccttgactcttatttgaagactcggtcacccgtgaccttcctgtccgatctccgctctaatctgcaggtatctaatgaacctgggaatagatacaatctgcagctcataaatgccctagtgctgtacgtgggcacccaggctatcgcccacattcacaataaaggatctacaccatctatgtcaaccataacacactctgcccacatggatatctttcagaacttggccgttgacttggacaccgagggcagatacctattcctgaatgctattgccaatcagctgcgttatcctaacagtcacactcattatttttcctgtacgatgctgtaccttttcgccgaggccaacactgaggcaatacaggaacagataactcgcgtgctgctggaacggctcatagtcaacagaccacacccttggggattgttgatcacttttattgagctcataaaaaatccagcttttaagttctggaaccatgaattcgtgcactgtgcccctgaaatagagaagcttttccagtccgttgcacagtgttgcatgggacagaaacaggcacaacaggtcatggaaggcaccggagcaagttag

SEQ ID NO: 217379 - DNA, 4656 bp, synthetic construct
  misc_feature 1..4656: note = Description of Artificial Sequence: Synthetic coding sequence
  source 1..4656: mol_type = other DNA
atgaaccttgacagtctgagcctggcactaagtcaaatcagctacctggtggacaatctgactaagaagaattaccgtgcctcgcaacaggaaatccaacacatcgtcaatagacatggtccagaagcagacaggcacttactgcgctgtcttttcagtcatgtcgatttctccggcgacggtaaaagttctggcaaggactttcaccaaacccaatttttgattcaggagtgcgctctgctaatcacgaaacctaattttatctcgaccctgtcctacgccatcgacaaccccctacactaccaaaagtctctgaagccagctccccacctattcgctcagctttctaaagtgctgaaactgagtaaagtccaggaggtgatctttggcctggcacttttgaactccagctcctctgacctccggggatttgccgctcagtttataaaacagaaactgcctgatctgctccgctcctacatcgacgctgatgtgtctggcaaccaggaagggggatttcaggacatcgcaattgaggtactgcacctgctcctgtctcacctgctgttcggtcagaaaggcgcatttggcgtcggccaggaacagatagacgctttcttgaagacgctgcggcgtgatttcccacaggagcgatgccctgtcgtgttagctcccttgctgtaccccgaaaaacgggacatcctgatggaccgcattctgcccgactctgggggagtggctaagactatgatggagtcatccctggccgacttcatgcaggaagtgggttatgggttttgcgcaagtattgaggagtgccggaacattatcgtccaattcggcgttcgtgaagtgactgcggcacaggtggcaagagttctaggcatgatggcaagaacacactccgggcttactgatggcataccacttcagtccatctccgcgcctggttcaggcatctggtcggatggtaaggataaaagcgacggagctcaggcccatacctggaacgtggaggttctgatcgacgtgctgaaggagctaaatccctctctgaattttaaggaagttacctatgagttggaccaccccggattccagatccgcgacagtaaagggttacataacgttgtgtatggcattcagcggggattgggaatggaagtctttcctgtggatcttatatacaggccatggaaacatgccgaggggcaattatcctttatacagcacagtctgatcaatcccgagattttctgctttgccgactatccttgccacaccgtggcgactgacatcttgaaggcaccacccgaggatgataatagggagattgcgacatggaaatcactcgacctgattgagtccctgctgcgtctagctgaggtaggtcagtatgaacaggtgaaacaattattctcattccccataaagcactgtcccgatatgctggtgctggcgctgctacagattaacaccagttggcacacactgcgacatgaattgatctctacactcatgcctatcttcctcggtaatcacccaaactcagccattatcttgcactacgcttggcacggccagggtcagtccccatcaattcggcaactcatcatgcacgctatggctgagtggtacatgcgcggagaacagtacgatcaagcaaaactttctcgcatactcgacgtggcccaagatcttaaagccttgtccatgctgctgaatgggaccccctttgcgttcgtgatcgacctggccgctctggcctctcgcagagaatatctgaagctggacaagtggctaaccgacaagattcgggagcacggcgaaccttttatacaggcctgtatgacatttcttaagcgcaggtgtccatccatcttaggcggtctcgcacccgagaaggatcagccaaaatctgctcaactgccaccagagaccctcgccaccatgctcgcatgtctgcaggcatgcgccggatccgtgtctcaggaactcagtgagacaatcctgaccatggtggcgaattgctcaaacgttatgaataaggcacggcagccaccgcctggggtgatgccaaaaggtcggccaccgtctgctagctctctggacgcaatttcccccgttcagatagacccattagctggcatgacatcacttagcatagggggatctgccgctccccacacgcaatccatgcaggggtttccgcctaaccttggcagtgccttctctacaccccagtcccctgccaaagcctttccaccactcagcacgccgaaccagaccacagccttttcgggaatcggaggcctttccagccagttgcctgttggtggtttaggaaccggcagtttgaccggaattggaactggggctctcggcttgccagccgtgaataatgaccccttcgtccagcggaagctgggaaccagtggactaaaccagcctacgtttcagcagagcaagatgaagccaagcgacctgtctcaagtgtggcccgaggccaatcagcatttttccaaggaaattgatgatgaggcaaatagttacttccaacggatctacaatcacccccctcacccaacaatgagtgtggatgaggtgctggaaatgctccaaagatttaaagactctactattaaacgtgagcgcgaagtgtttaactgcatgctcaggaaccttttcgaggaatatcgcttttttcctcaataccctgacaaagagctccacataacagcttgccttttcggcggaattatagagaagggcctggtgacgtacatggcacttggccttgctctgcgttacgtgctggaagccctgcggaaaccgtttgggtcaaagatgtactactttggaattgccgcactggacaggtttaaaaacaggctgaaagattatccccagtattgccaacacctcgctagtattagccacttcatgcagtttccacaccatctacaagaatacatcgagtacggacaacagagcagggatcccccagtcaaaatgcaggggagcattactacgccagggtcaatagccctcgcccaggcccaggcacaggctcaggtgcctgcgaaggccccactcgctggccaggtcagcacaatggttacaacctctaccacaacaactgtggctaagaccgtgacagtaacgagacctacaggcgtgtcctttaaaaaggacgttcccccttctataaatactaccaatattgatacactgctcgtggccacagaccagacagaacgtattgtggaacctccagagaacattcaggaaaaaattgccttcatcttcaataatctgtcacaaagcaacatgacacaaaaggtcgaggaactcaaagaaacagtgaaggaggagtttatgccgtgggtttctcaatatctggtcatgaaacgagtgagtatcgaacctaactttcactcactttattctaatttccttgatacactgaagaacccagaatttaacaagatggtgctcaacgaaacctacagaaatattaaggtgttgctgacctctgataaggcagcggctaacttttcagatcgcagcttgttgaaaaacctgggacattggctgggcatgattaccctggcaaagaataagccgatcctccatacagatctagatgtgaagtctttacttctggaggcatacgtaaaaggtcagcaggagctgctgtacgtggtgccttttgttgccaaagtcctagaaagctccataaggtccgttgtcttccggcctcccaatccctggactatggcgatcatgaatgtgcttgctgaattgcaccaagagcacgacctgaaacttaacctgaaattcgagattgaggtcctgtgcaagaatctcgctttggacatcaacgagttgaaacccggtaatctcctaaaggataaggaccgactgaaaaatctggatgagcagttgagcgcaccaaagaaggatgttaagcagccggaggagctcccccctattaccactactacgaccagcaccacgccagctacaaacacgacctgtacagccaccgtgcccccacagcctcagtattcctatcatgacatcaatgtctacagcttagccggtctagcacctcatataaccctgaaccccacgattcccctgtttcaggcacatccgcagctcaagcagtgcgtgaggcaggcaatagagcgcgctgtgcaggaacttgtccaccccgtagtcgatagatctatcaaaatagctatgaccacttgtgagcagatagtgaggaaggatttcgctctagactcagaggagagcaggatgaggatagcagctcaccatatgatgcgaaaccttactgccggtatggctatgatcacctgtagggaaccccttttgatgtctatcagcactaacttaaaaaactccttcgcaagcgcacttcgtgtgtcttggctgtttccatggtatagatataaaacttattactgtctgtcagtgattatcttctttttcgtctacatatggcattgggccctgcccctgattttaaacaatcatcacatatgtctcatgtcttccatcatcctggactgtaactcggttcggcagtcgattatgtctgtgtgttttttctttttcctactttattctcagcatgacgtgtag

SEQ ID NO: 217380 - DNA, 951 bp, synthetic construct
  misc_feature 1..951: note = Description of Artificial Sequence: Synthetic coding sequence
  source 1..951: mol_type = other DNA
atgctcctgctggaactgaatgcaccagagcatgtcctcgagacgataaacttccagacactgaccgctttttgtaacacgttccacattttgaggcccactaaggcccctggcttcgtgtatgcctggctcgaactgatttcccaccgcattttcatcgccaggatgctagctcatacaccgcaacagaaagggtggcctatgtacgcccagctgttgattgaccttttcaagtatttggctcctttcttgcggaatgtggaacttaccaagcccatgcagattctctacaagggcacccttagagtgcttctggtcctgctgcacgactttcctgaattcttgtgcgattaccactatggcttttgtgatgtgatacccccaaactgcatccagctgcgtaacctgatcttgagcgccttccccagaaatatgcggttaccagatcccttcacccccaatcttaaggtcgatatgctgtctgaaatcaacatcgccccaagaatacttaccaacttcaccggggttatgccaccacagttcaagaaggatcttgactcatacctgaagactcggtctcctgtcacttttttgtccgaccttagaagcaatctccaggtttctaatgagccaggtaataggtataacctccagcttattaacgcccttgtgctttacgtcgggacgcaggcaatcgcacacatccacaataagggatctactcccagcatgagcaccataacccactctgctcatatggacatcttccagaacctcgcagtggacctggatactgaaggcagatatctattccttaatgcaatcgccaaccaatcagggacacaaattgccaccttgacaacatctgtcgccccatgttgtacgttcctgcagcgacccattcgtaagccaagcaaaaaccggagccaggaattctcatggaatgggtag

SEQ ID NO: 217381 - DNA, 2778 bp, synthetic construct
  misc_feature 1..2778: note = Description of Artificial Sequence: Synthetic coding sequence
  source 1..2778: mol_type = other DNA
atggatcggtctgggtttggtgagatctcttcaccagtgattagggaggccgaagtaacgcggaccgctaggaagcagtccgcacagaaacgagtccttctccaggcctctcaagatgaaaactttggcaacacaacaccacggaaccaagtaatccctcgaaccccctcctcgtttcgtcagccatttacaccaactagccgctccctcctgagacagccagacatatcgtgtattctgggaacagggggaaaatccccgcgactcacccagagctcaggtttcttcggcaacctgagcatggtgacgaatctggatgatagcaactgggccgcagctttttcctcacagcgctcaggactgtttacaaacaccgagccacacagtattactgaagatgtgacaattagcgcagtcatgctgagggaggatgatccgggagaagccgcatcaatgagcatgttctcggacttcttacaatcattcctgaagcattcttctagtacagtgtttgacctggtcgaagagtatgagaatatttgtgggtcgcaagtgaacattttgagtaaaatcgtaagccgtgctaccccaggactgcagaagttcagtaaaaccgcttcaatgctttggttgcttcagcaggagatggtgacttggcggttgttggcgtcgttgtaccgagatcgcatccaatctgccctggaggaggaatccgtgtttgccgtcactgcggtcaatgcctccgagaaaacagttgtggaggctcttttccagagagacagcctagttagacagtctcagctggtggtagactggctggagagcatcgccaaggatgaaatcggtgaattttctgacaatatagaattctacgctaagtcagtctactgggagaacaccttgcacacgctaaagcagagacaactgacgtcttacgtcggctctgtgagacctctcgtgaccgaacttgaccctgatgcgcctatacggcaaaagatgccactggacgatttggatcgtgaggacgaggtcaggttactcaagtacctgttcaccctcatccgtgccggtatgaccgaggaagcccaaaggttatgcaagaggtgcgggcaggcctggagggctgcaacactggagggctggaaactgtaccatgatcccaacgtcaacggaggaactgaactagaacccgtggaaggaaatccgtatagacggatttggaaaataagctgttggagaatggctgaggatgagctttttaaccgctacgaaagagccatttacgctgccctgtcagggaacttgaaacagctgcttccagtgtgcgacacgtgggaggatactgtctgggcatatttccgtgtgatggtagacagcctcgtggagcaggagattcaaacatcagttgcaacgctggatgagactgaggagctccccagggagtatctgggggctaattggaccttggaaaaagtattcgaggaattgcaggcaaccgacaagaaacgagtactcgaagagaaccaagaacattaccacattgttcaaaaatttctcattctcggtgatatcgacggactgatggacgagttcagtaagtggctcagcaaatcccgcaacaatttgcctggacatctactcagattcatgacccacctgattctgttctttcgcactttggggctgcagacaaaggaggaggtgtctatcgaagtgctgaagacatatatccagctgctcataagggaaaaacacaccaacctgattgctttttacacgtgtcatctgccccaagacctggcagtggcccagtatgcgctgttcctggaatcagtgacggagttcgagcagcggcatcattgccttgaactagccaaggaagccgacctggatgtggctactatcacgaaaaccgttgtggagaacatacggaaaaaagacaacggagaattcagtcaccacgacctggctccagcgctagatactggcactaccgaggaagatcgcttgaagatcgacgttattgactggctggtgttcgacccagcccagagggccgaggcactgaaacagggaaatgctataatgcggaagtttctggccagcaaaaagcacgaagctgcaaaggaggtgttcgtgaaaatcccacaggactcaatcgcagagatctacaatcagtgtgaggaacaaggaatggaatccccactcccagccgaagacgataacgccattcgagaacacttgtgtatcagagcctatctcgaagctcatgaaacctttaatgagtggttcaagcatatgaattctgtgccacagaagcccgcactgatccctcagccaactttcaccgagaaggtcgctcacgaacacaaagaaaagaaatatgaaatggactttggaatctggaaggggcacctagacgccctgacagcagatgtgaaagagaagatgtacaatgtcctgctattcgttgacggcggttggatggtagatgtgcgagaagacgccaaggaggatcatgagaggactcaccagatggtacttctacgcaagctgtgtctgcctatgctctgtttccttctccatactattttgcacagcactggacagtatcaggagtgtctccagctcgccgatatggtctctagtgagagacataagctgtatctcgtcttctcaaaggaggaacttcgtaagctcctccagaagctgagggaatccagcctcatgttgctagaccagggcctggaccccctcgggtacgagatccagctgtag

SEQ ID NO: 217382 - DNA, 1623 bp, synthetic construct
  misc_feature 1..1623: note = Description of Artificial Sequence: Synthetic coding sequence
  source 1..1623: mol_type = other DNA
atggtgcggacagatggacacaccctctccgaaaaaagaaactaccaagtcactaacagcatgtttggcgctagccgcaagaaattcgttgaaggagttgatagtgattatcacgatgaaaatatgtattacagccagtcgtctatgttcccacatcgaagcgagaaggacatgctcgccagcccttctacctccggacagctgagccagtttggagcttctctgtacgggcagcagtccgcactgggcctgccgatgagaggaatgtccaacaatactccccagttgaatcggtctttgtctcaggggacccagctgccctctcacgtgacacctaccactggcgtccctaccatgtctcttcatacaccaccgtcccccagccgcggtatacttccgatgaatccacgaaatatgatgaaccacagccaagtgggccagggtattgggatcccttcgagaactaattcaatgagcagctccgggttggggagcccaaaccgctctagcccctcaatcatttgcatgcctaagcagcaaccatcccgtcagcctttcacggtcaacagcatgtctggatttggtatgaatcgcaaccaggcttttggaatgaacaacagcttgtcgagtaatatctttaacggaacagatggaagcgaaaatgtgaccggactggacctcagtgactttccggcactggccgatcgcaaccgtagagaggggagtgggaacccaactccattgattaacccccttgccggaagagctccctacgtaggcatggtaacaaagcctgccaatgaacaaagtcaggacttcagcatccataacgaggactttccggcacttcctgggagtagctacaaagacccaacaagtagcaacgatgattccaagtctaatctaaatacatcaggtaaaactacatcctcaactgatggaccaaagttccctggtgataaatcctctactacccagaataacaaccagcaaaagaaggggatccaggttcttccagacggaagagttactaacatccctcaggggatggtgacagaccagttcgggatgatcggtctgctcacctttatccgagccgcagagacagaccctgggatggtacatctggccctcgggtctgatctcacaacgctcggcctcaacttgaacagccctgagaacttgtatcccaaattcgcctctccttgggcaagtagcccatgcagaccccaagatatcgatttccacgtcccctcagagtatttgaccaatattcatattagggataaactggccgctatcaagttaggtcggtacggtgaggaccttctcttctacctgtattacatgaacggcggagacgtgctgcagttgctcgccgcagtagaactgttcaatagggattggcgctatcacaaggaggagagagtgtggattaccagggctcctggcatggagccaactatgaagacaaacacatacgagagggggacttactatttttttgactgcttgaactggcgtaaagtggcgaaggaattccacttagaatacgacaaactggaagagagaccacacttgcctagcacatttaattacaaccctgcacaacaagcattttag

SEQ ID NO: 217383 - DNA, 78 bp, synthetic construct
  misc_feature 1..78: note = Description of Artificial Sequence: Synthetic coding sequence
  source 1..78: mol_type = other DNA
atggtgcggaccgacgggcacactttgtcagagaaacggaactatcaggttacaaattccatgttcggcgcttcatag

SEQ ID NO: 217384 - DNA, 552 bp, synthetic construct
  misc_feature 1..552: note = Description of Artificial Sequence: Synthetic coding sequence
  source 1..552: mol_type = other DNA
atggtgcgcacggatggccacaccctctcagaaaaacgcaattaccaggtgactaactcaatgttcggggcttctagaaaaaagtttgtcgaaggagtcgacagcgattaccacgacgagaatatgtactactcacagagctccatgttccctcacaggagtgagaaagatatgctagcgtcgccttcaacatctggacagctgtcgcaattcggcgcaagtctgtacggacagcagtccgccctgggactgccaatgagggggatgtcaaacaataccccgcagctgaataggtccttgagtcaaggtacgcagctccccagccacgtgacaccaactaccggcgtgccgacaatgtccctgcatacaccccctagcccaagccggggaattctcccaatgaaccctaggaacatgatgaaccactcccaagttgggcaaggcatcggaatcccctcacgtacaaattcgatgagctctagcggactcgggtccccaaaccgctccagtcccagcattatttgcatgcctaaacaacagccaagtaggtag

SEQ ID NO: 217385 - DNA, 1623 bp, synthetic construct
  misc_feature 1..1623: note = Description of Artificial Sequence: Synthetic coding sequence
  source 1..1623: mol_type = other DNA
atggtacggactgatggccataccctgtcggagaagaggaattaccaggtgacaaacagcatgtttggggcatctcgcaaaaaatttgttgagggcgtagattcggattatcacgacgaaaacatgtactattcccaaagtagcatgtttccccatagaagcgagaaggatatgctggcttcaccaagtacctccgggcagcttagccagttcggagcatctctttacggacaacagtccgcgcttggtctgcccatgagaggaatgagtaataatacaccccagcttaaccgatctctgagccaaggaactcaactcccaagtcatgttaccccaaccaccggcgtgcctaccatgtccttgcacacaccaccctcgccttcccggggtattttacccatgaaccctcggaacatgatgaaccacagccaggtcggccagggaataggaattccatctcgtactaattccatgagcagctccgggctgggatcgcccaaccggtcctctccatcaattatctgtatgccgaaacagcagcccagccggcagcctttcacagtcaactctatgtcaggctttggaatgaacagaaatcaagcgttcgggatgaacaacagcctgtcaagcaatatcttcaatggcaccgacggaagcgaaaatgtgacaggactggacctcagcgacttccctgcattggcagatagaaacagacgggagggctccggaaacccaaccccgcttataaaccccctggccggacgagccccttacgtaggtatggtcaccaaacctgcgaacgagcagagtcaggatttcagtatacataatgaggacttcccagctcttccgggttcatcctacaaggatccgacaagcagcaacgatgattctaagtctaatctgaacacctccggtaagactacgtcaagtacagacggtccaaagttccctggcgacaagagctcaacaactcagaacaataaccaacagaagaaagggatccaggtcctgccagatgggagagtgacaaacattccacagggcatggtgactgaccagtttggaatgatcgggctgctgacatttataagagccgctgagactgatccaggtatggttcatctagcattagggtcggaccttacaacgcttggactcaatctcaactcccccgagaacctgtatccaaagttcgccagcccctgggctagtagcccatgccgcccacaggacattgacttccatgtgccatcagagtatcttactaatatacatatacgcgataaacttgcagcaataaaactcggtcggtatggcgaagacctgctgttctatctttactacatgaatggaggcgacgtgctacagctgctcgccgcagttgaactcttcaatcgcgactggcgctaccacaaggaggagagagtgtggattacccgggcaccgggtatggaaccaacaatgaaaactaatacctacgaaagaggtacatattatttttttgattgcctgaattggcgcaaagtggccaaggagtttcatctcgaatacgataaactggaagagcgaccccatctgccatcaacattcaactataaccccgctcagcaggccttttag

SEQ ID NO: 217386 - DNA, 576 bp, synthetic construct
  misc_feature 1..576: note = Description of Artificial Sequence: Synthetic coding sequence
  source 1..576: mol_type = other DNA
atggtcaccgatcaatttggcatgatcggactgttgacatttatccgagctgcagagacagatcctgggatggtgcacctagcacttgggagcgatctgactacactcggcctcaatctgaattctcctgagaacctctatcccaaattcgcaagcccatgggctagcagcccttgtcggccacaggatatcgacttccacgtgccatccgaatacttaaccaacatccatattcgcgataagctcgctgctattaagttaggccgttatggggaggacctgctattttacctgtattacatgaatggaggcgacgtgcttcagttgctcgcagccgtggagctattcaatcgggactggcggtaccacaaagaggaacgcgtctggatcacacgggcaccaggcatggaacctacaatgaagactaatacctatgagagagggacttactatttcttcgactgtctaaattggaggaaagtggccaaagagttccatctcgaatatgacaagctcgaggagcgacctcaccttccctctaccttcaattacaaccccgctcagcaggccttctag

SEQ ID NO: 217387 - DNA, 966 bp, synthetic construct
  misc_feature 1..966: note = Description of Artificial Sequence: Synthetic coding sequence
  source 1..966: mol_type = other DNA
atggtacgtacagacggccataccctgtctgagaaaagaaactatcaggtgactaacagcatgtttggggcttctcgcaagaagttcgtggaaggcgttgactccgactaccacgacgagaacatgtactactctcagtcaagcatgtttccacacagatctgagaaagacatgctggcatcaccgagcaccagcggacagttatctcaattcggagccagcctgtacgggcagcagtcagcgctcggcttaccaatgcgaggcatgagcaataacacaccccagctgaatcgcagcctcagtcaggggactcagctaccgagtcatgtgactccaactaccggcgtgcccaccatgtcgctacacacgccaccctcaccctcgagaggaatattgcctatgaatcctcgcaatatgatgaaccatagtcaagttggacaagggatcggcatcccgtccagaactaattccatgagctcctctggcctcgggtcacccaaccgttctagcccatccataatctgtatgccaaagcagcagccctctaggcagcccttcaccgtcaacagtatgtctggtttcggcatgaatcggaaccaagcttttggaatgaataattccctgtcttctaacattttcaacggaacggacggatccgaaaatgtgactggcctcgacctgtctgactttcccgcattggcagacaggaacagaagagaagggtccggcaatcccaccccccttattaaccccctcgcgggacgagcaccttatgtgggcatggttaccaagcccgctaatgagcagagccaggatttcagcattcacaatgaagatttccctgccctccctgggtcctcatataaggatcccacctcctcgaacgatgacagcaagtcaaaccttaacacctccggcaagacaacttctagcacagatgggccaaagttccccggtgacaagtag

SEQ ID NO: 217388 - DNA, 978 bp, synthetic construct
  misc_feature 1..978: note = Description of Artificial Sequence: Synthetic coding sequence
  source 1..978: mol_type = other DNA
atgagcacagctagggaacagccgatctttagcactagggcacatgtttttcaaatagaccctgcaacaaaaaggaactggattcccgcagggaagcacgctctaactgtctcttatttttacgatgccacaagaaatgtgtaccggattatatcaatcggaggtgccaaggccattattaacagcactgtcactcctaacatgacgttcaccaagacctcccaaaaatttggccaatgggccgatagtcgggcaaatacagtgtacggactcggatttgcctctgaacagcacctgacacaagtgccccctagccccctggttagtgctaacggccctggagaggagaagttgttcagatctcaatctgcagatgcccctggacccacggagagagaaagattgaaaaaaatgctctcagagggaagtgtcggtgaagtgcaatgggaggccgagtttttcgccttacaggattcgaataacaaactcgcaggcgctctccgggaggccaatgcggcagccgcacaatggcgccagcagctcgaagctcagagagctgaggctgaacggctgagacaacgggtggccgagctggaagcacaagcggcaagtgaagttacccccacaggggaaaaggaaggtttgggccaagggcaaagcctggagcaactggaggcactcgtgcagactaaggatcaggaaatccagacgctcaagagccagaccggcggacccagggaggctctggaagccgcagagagggaagaaactcagcaaaaggtccaggatctggagaccaggaatgccgaattggagcaccagctacgcgcaatggagcggagtctggaggaggccagagcggagcgtgaacgggcacgagctgaagtgggacgggcagcgcagctgttagacgtaagtctctttgaactctctgaactgcgagagggattagcgcgactggctgaagcagcgccatag

SEQ ID NO: 217389 - DNA, 1716 bp, synthetic construct
  misc_feature 1..1716: note = Description of Artificial Sequence: Synthetic coding sequence
  source 1..1716: mol_type = other DNA
atgctggagacaatcttacgaatgcttgacaatgactctattctagtcgacgctatccggaagattaaggacgatgtggaatattatgttgactcgtcccaagatccagatttcgaggagaatgaattcctgtatgatgaccttgatctggaggatattccccaagctctcgtcgccacctcaccaccatctcactcccacatggaagacgagatcttcaatcagtcctcctccacgcctacttccactacttcatccagccctatccctccttctcccgctaactgcacaacagagaatagcgaagatgataagaaacgtggcaggagtacagacagcgaggtcagccagtcaccggcaaaaaacggcagcaagccagtgcactcaaatcagcacccccagtcgccagcagtcccccctacctatccatccggtcccccaccagcggctagtgcactgagtaccactcctggtaataacggagtaccagccccagccgcacctcccagtgccctgggacccaaagcaagccctgccccatctcacaactccgggacacccgcaccgtatgcccaagcggttgcacctccggctccttcaggcccttccactacgcaaccgagaccccctagcgtacaacctagcggcggagggggaggtggtagcgggggaggaggcagttcaagctcctcaaatagctctgccggtgggggagctggtaagcagaacggagcaacttcctacagttccgtggtggcggattcccctgccgaagtcgcactgagctcctctggtggcaataatgcgtctagccaggcactgggacctccctccgggccacataacccgcctccaagtactagcaaggaaccatctgctgcagcacccacaggtgcaggcggtgtagcccctggcagcggcaataacagtgggggtcccagcctgcttgtaccgctacctgtgaatcctccttcgagtcccaccccaagtttctccgatgcaaaggcagctggggctctattgaacggtccaccacagttctccactgccccagaaattaaagccccagaacccctcagttccttgaagtcaatggcggagcgcgcagccatatcctctggcatcgaggacccggtgcctaccttacatcttacagagagagatattattctgtccagcacgagcgccccaccagccagcgcccaaccgcctttacagttgtccgaggtgaacattcccctgagtctgggggtttgccccctgggccctgttccattaacaaaagagcagctctaccagcaggctatggaagaggccgcttggcatcatatgccacacccaagcgactctgaacgcatcagacagtacctcccccgtaatccttgtccaactccgccatatcatcaccaaatgccacctccacacagtgatacagtagaattctaccagaggctgagcaccgagactctcttctttatattttactaccttgagccccgtgacgtgcggacagcttgggtagacagcgaggccggtccgttgagacacacgtctgcaccactccctgtagcccattggttgactcggggtccttccccagcccttctgcagcagcctcagtcacgaccaaccccattatgcagctcagcgcatagccaagcctctctggagaccaccggcgaactaagctccccactgcccacacccctactgtag

SEQ ID NO: 217390 - DNA, 2262 bp, synthetic construct
  misc_feature 1..2262: note = Description of Artificial Sequence: Synthetic coding sequence
  source 1..2262: mol_type = other DNA
atggccgacaagcgaaaattgcagggtgagattgaccgctgcctgaagaaggttagcgagggcgtcgagcaatttgaagacatttggcagaagctccacaatgccgctaatgccaatcaaaaggaaaagtacgaggccgacttaaagaaagaaatcaagaaattgcagagactgagggatcagattaagacatgggttgcctctaatgagatcaaagataagcgccagctgattgacaacagaaagttgatcgaaacacagatggagaggtttaaagtggtagaaagagagacaaagactaaggcttatagtaaagaggggcttggactggcccagaaagtggatcctgcacaaaaagaaaaagaggaagtgggccagtggttaaccaacactatagacacacttaatatgcaggtggatcagtttgaaagcgaagtcgagagtctcagcgtgcagacccgtaaaaagaaaggcgataaggataagcaggaccgaattgagggtctgaagcgccatattgagaaacatcgatatcatgtgaggatgctggaaacaatcctgcgcatgctcgacaatgactctattctggtggacgccatccggaaaatcaaggatgatgtggagtattacgtggattctagccaagatcccgactttgaagaaaacgagttcctatatgatgatctcgatctagaagacatcccgcaggccctggtggctacttctccaccctctcactcacacatggaggatgaaatctttaaccaatcatcctccactcctactagtactacatccagctcaccaattcctccctcccctgccaactgtactacagaaaactccgaagacgacaagaagcggggtcgttctacagactcggaggtcagccagtcacctgcaaaaaatggcagcaagcccgtacattcgaatcagcacccgcaaagccccgcagtcccacccacctatccttccggtcctccacctgctgcctcagctctatccactacaccgggtaacaacggggtgcctgccccagcggctccaccttccgctctgggacctaaggcatccccagccccatcacataattcagggactcctgccccatatgctcaagctgttgcccctcctgctcccagcgggccttcaactactcagcctcgaccaccttccgtgcaacccagcggcggtggcggtggagggtctggtgggggaggatcatcaagctcttctaattcttcagcaggagggggtgctggtaaacagaatggcgctacgtcttatagctcagttgtcgccgacagtccggctgaggtggcgttgtccagcagtggcggaaataatgccagttcccaggccttgggacctccatcgggaccccacaaccccccaccctctactagtaaggagccaagcgccgctgcgcctacgggggcagggggagtggcacccggaagcggcaacaactctggcggtccatcactgttggtccctctccccgtcaaccctccatctagtccaacaccgtctttctctgatgccaaggccgctggagccctgctgaatggaccaccacagttcagcaccgccccagagattaaggccccagaacccttgtccagcctgaaatccatggcagaacgagcagcaatctcttcgggaatcgaagatcccgtaccaacgctccacttaacagagagggatatcattctgtcttctacttctgctcccccagcttctgctcagccccctctacagctctccgaagtgaacataccactttcccttggagtttgcccccttggccctgtgcccctgacaaaggagcaactgtaccaacaggccatggaggaagctgcttggcaccatatgccccacccctctgattccgagcgcatcagacagtacctgccgaggaatccgtgccccacccccccatatcatcaccagatgccacccccacactcagacaccgtggaattttaccagcgcctgtcaactgagactttgttttttatattctactatctggaagggactaaggcacagtatttggccgctaaggcactcaagaagcagagctggcgtttccataccaagtacatgatgtggttccagaggcatgaggagcctaagaccatcactgatgagtttgaacagggtacatatatctacttcgactacgagaagtggggacagcggaaaaaggaaggcttcacattcgagtacagatacttagaggatcgcgatctgcagtag

SEQ ID NO: 217391 - DNA, 867 bp, synthetic construct
  misc_feature 1..867: note = Description of Artificial Sequence: Synthetic coding sequence
  source 1..867: mol_type = other DNA
tgaaaggaaccctccgctgccgcaccaacgggagctgggggtgttgccccaggttctggaaacaatagtgggggaccttcacttctggtccccctgccagttaacccaccttcctctcctaccccaagtttcagtgatgcgaaggcagcaggagccctcttgaatggtcctccacagttttcgaccgccccagagattaaggcccctgaacccctgagttcactgaaatcaatggcagagagagcggcaatttcctcaggcattgaggacccagtgcctacccttcacctcacagagagggacatcatcctgtccagtactagtgcacctccagccagcgcccagccaccgttgcaattgtccgaagtgaatattccactgagccttggtgtttgtcccctggggcctgttcctttaacaaaggagcaattgtatcagcaggccatggaagaagcagcttggcaccacatgccgcatccatctgactcagaacggatccgacaatatctgccccgaaacccatgtccgacacctccttatcaccaccagatgcctcctccacactctgatacagtcgagttctatcagaggctttctaccgagactctgttttttatcttctactatctggaaggcacgaaagcccagtaccttgcagcaaaggcacttaaaaagcagtcatggagatttcatacgaaatacatgatgtggttccagagacacgaagagccaaagaccattacagatgagtttgagcagctggcccagagtcttagtctcactaagtattcctccctctggctttcagcccagcctggaacccccccttcacatccaccgctgggacagctgctaggcctgctgtag

SEQ ID NO: 217392 - DNA, 2304 bp, synthetic construct
  misc_feature 1..2304: note = Description of Artificial Sequence: Synthetic coding sequence
  source 1..2304: mol_type = other DNA
atgtctaggagccctgacgccaaggaggatcccgtggaatgcccgttgtgtatggagcctctggaaatcgacgacatcaacttctttccctgcacatgtggctatcagatctgtcgcttctgctggcataggattcgcacagacgagaatgggctctgccccgcttgcagaaagccataccctgaggatccggcagtctataagccactgagccaagaggaactccagagaatcaagaacgagaagaagcagaagcagaacgagagaaagcaaaagatatcagagaataggaaacacctggcctccgttcgggtcgtgcagaagaacctagtttttgtggtgggtctgagccagagactcgccgatccagaagtcctcaagagacccgaatacttcggtaaatttgggaaaatccacaaagttgtgatcaacaacagcacctcttacgcgggtagccagggcccatcagcaagcgcctacgtcacgtacatccgctcggaggatgccctccgagctatccagtgcgtaaacaacgtggtagtggatggcagaactttaaaggcttctctgggcactactaagtattgttcctactttctcaagaatatgcagtgccctaaacctgattgtatgtacctacacgagctgggtgatgaggccgcttctttcaccaaggaggaaatgcaagcaggtaagcaccaggagtacgaacaaaagctacttcaggagctgtataagctcaaccctaactttcttcagctctctactgggtctgtagacaagaataaaaacaaagtaaccccccttcagagatatgacacaccaatagacaagccatctgactccctctcaattggaaacggggacaattctcaacagatctccaattctgacactccctcacctccacccggacttagcaaatctaaccctgtaatccccattagctcgtcaaaccactccgctcggagcccatttgaaggtgccgtcaccgaaagccaatccctattctccgacaactttcgccatcccaatccaattccgtcaggtctaccaccttttccgagttctccacaaacaagttctgactggcccacagctcccgagccgcaatcgttgtttacctctgagaccattccagttagttcctcaaccgattggcaggcggcttttgggttcggcagctccaagcaacccgaggacgatctaggcttcgatcccttcgacgttacacgcaaagccctggcagacctgattgagaaagagctgtcggtgcaggaccagcctagcctctcgcctacaagcctgcaaaatagtagctcacataccacgacggctaaggggcctgggtctgggttccttcatcctgccgctgctacaaacgccaattccctgaactccaccttcagcgtgttaccacaacgtttcccacagtttcaacagcaccgcgctgtgtacaactccttcagctttcccggacaagccgcaaggtacccttggatggcttttccaagaaatagcatcatgcacctcaatcacacagcaaaccctacaagcaattcaaatttccttgacctgaatttgccccctcagcacaacactggccttggtggaatccccgtagctgacaattcctcgtccgtcgaatccttaaatatgaaagagtggcaggacggcctccgagcactgctccctaacatcaacatcaactttggtggacttccaaattccagtagtccctccaatgcaaaccatagcgcccctacctctaacaccgccactactgattccctgtcttgggacagtccgggatcgtggactgatcctgccatcatcaccggtatccctgcctcctccggcaattcgctggattctctgcaggatgataacccaccccactggctgaaaagcctgcaagcgctgacagagatggatgggcctagtgccgctccatctcagacacaccactccgccccattttcaacgcagattcccctccatcgagctagctggaatccgtatcctccccctagtaacccaagtagttttcatagcccccctcctggtatttattatcgagtccagcattggaccgctatcagacagcgaggcgcaacgatacggaaatgtcgaatctgccccacactgttttcccctagccagccgacaacccatagtagtctgttgattagctacgtgcttaaaaaccccgttcctgatcaatttttcttctcgttaacccctgacgccatgcgctctcagggacattaccaccttttcattaattgcaagaacttttgttag

SEQ ID NO: 217393 - DNA, 1728 bp, synthetic construct
  misc_feature 1..1728: note = Description of Artificial Sequence: Synthetic coding sequence
  source 1..1728: mol_type = other DNA
atgtcccgcagccccgacgccaaggaagatccggtcgagtgtccattgtgtatggagccattagagatagacgacattaacttctttccttgcacctgtggataccagatttgtaggttttgttggcatagaatcaggaccgacgagaacggactctgccctgcttgtagaaaaccgtatcccgaggaccctgcagtgtataagcccctgagccaggaagaactgcaaagaataaagaacgaaaaaaagcaaaaacagaatgaacgaaagcagaagatctccgagaatcgcaagcacctcgcttccgttcgggtggtgcagaagaatctggtttttgtggtagggttaagccaaagactggccgaccccgaggtactcaagcgcccagagtatttcggcaagttcgggaaaatccacaaggtcgtgattaacaattccacaagctacgctggctcacagggtcctagcgcttccgcatacgtgacatatattcgttccgaggatgccctgcgggcaatccaatgtgtcaataatgtggtggttgatgggcgaacacttaaggccagccttggaacaaccaagtattgtagttatttccttaaaaacatgcaatgccctaaacccgactgtatgtatctccacgagctgggtgacgaggcggcatccttcactaaagaagaaatgcaggcaggaaagcatcaggagtacgagcagaagctgttgcaggaactgtacaagttaaacccaaattttttgcagctgtccacagggtcggtggataagaacaaaaacaaagtgacccccctgcaaaggtatgacacacccatcgacaaacctagtgacagtctctccattggaaacggagataacagtcaacagatctccaacagcgatactcccagtcctccacccggactctctaaatcgaatcctgtcatacctatttcgtcgagcaatcattccgcgaggagtccctttgagggtgctgttaccgagagccaaagtctcttttccgacaactttcggcacccaaaccctattcctagcggactcccaccgttcccctccagccctcagacctcctctgactggccgactgcccctgaaccccaatccctgtttacttccgaaaccatccctgtcagctccagtaccgattggcaagccgcattcggatttggttcgtccaagcaacccgaagacgacttagggttcgaccccttcgacgtgacgaggaaagccctcgccgacctcatagagaaagaactcagcgttcaagaccaaccatcgctgtctcctacttctctacagaactcctcgagccacaccaccaccgccaaaggacccggttccgggtttctccaccccgcagccgctacaaacgctaactctttaaacagtacgttttccgtgcttccgcaacgcttcccccagttccagcagcatcgggctgtttataacagtttcagctttcccggtcaggcagccaggtacccctggatggccttcccacgcaactccattatgcacctgaaccatacagctaatcctacctccaacagcaactttttggatctaaacctgcctccacagcataacacaggcctaggcggaatacccgtcgctggggaggaggaggtaaaagtatccactatgccactgtcgacgagcagccattcgttgcaacaaggccaacagcctaccagcctacacaccactgtagcttag

SEQ ID NO: 217394 - DNA, 1302 bp, synthetic construct
  misc_feature 1..1302: note = Description of Artificial Sequence: Synthetic coding sequence
  source 1..1302: mol_type = other DNA
atgtctagatctccagatgcaaaagaagatcccgtggaatgtcccctctgcatggagccactggagatcgatgacatcaacttcttcccatgtacctgtgggtaccagatttgtcgcttctgctggcatcgaatacggactgacgaaaatgggctttgcccagcatgccgtaagccatacccagaggacccagctgtgtacaaacctctgagtcaggaagaactccaacggatcaagaacgagaagaaacaaaagcagaacgagcggaagcaaaagatttccgagaacaggaagcacctcgcatccgtgcgcgtggtgcagaaaaatctcgtctttgtagtgggcttgtcccagaggttggccgatcccgaggtcctgaagaggcctgaatactttgggaaatttgggaaaatacacaaagtcgtgatcaacaatagcacttcctacgccggatcacagggccctagtgcttctgcgtatgtgacttacatccggagcgaggacgcccttcgcgcaattcagtgcgtcaacaacgttgtggtggacggccgaaccttgaaagctagcctcggcacaacaaaatattgcagctattttttaaagaatatgcagtgcccgaaacccgattgcatgtatttgcatgagctgggcgacgaagcagccagctttactaaagaggagatgcaagccggaaagcaccaagaatacgaacaaaaactgttgcaagagctctataaattaaacccaaatttcctgcagctgtctactgggtctgtggacaagaataagaacaaagtgacgcctctgcagcggtatgacactccgattgacaagccatctgattccctatctatcggtaacggcgataattcacaacagatctccaacagtgacaccccatcccctccgccagggttgtcaaagtccaatcccgtcatcccgatcagttctagcaatcattccgctcgctctccattcgagggtgccgtcacagagtcgcagagcctgttttcagataacttccgccatccgaacccaattccttccggcctacctccatttcccagctcaccccagaccagttccgattggcctaccgctccagaacctcagagcctcttcacatctgagacaattcctgtgtctagtagcacagactggcaagctgcctttgggttcggatcgtccaaacagcccgaagacgatcttggcttcgatccattcgatgtgacacgcaaagccctggctgatctaaccgagccaatcgaacggaaacggttagcggtcttaaaaagacggtag

SEQ ID NO: 217395 - DNA, 1920 bp, synthetic construct
  misc_feature 1..1920: note = Description of Artificial Sequence: Synthetic coding sequence
  source 1..1920: mol_type = other DNA
atgagtaggtcacctgatgcgaaggaagaccctgtggagtgccctttatgcatggagccactcgagattgatgacatcaattttttcccctgtacatgcggttaccagatttgtcggttctgctggcatcgaattcggacagacgagaacggcctctgccccgcatgccgcaagccgtaccccgaagacccagcagtgtacaaacctctctctcaggaggagctacaaaggatcaagaacgaaaaaaaacagaaacagaatgagagaaaacagaagatctccgagaaccggaagcacttggccagtgttcgcgtggtccaaaagaatctcgtgtttgtcgtgggcctgagccaaaggctggccgaccccgaagttctgaagcgccctgagtattttgggaagttcggaaagatacacaaggtggtgattaataattctacctcttatgcagggagccaaggtcctagtgccagtgcttacgtcacttatattaggtcagaggatgctctgagagctatccagtgtgtcaacaacgtggtcgtggacggtaggaccttgaaagcatctcttggcaccaccaaatactgttcttacttcctgaagaacatgcaatgccctaaacctgactgtatgtacctacatgagctcggggacgaggcagccagcttcacaaaggaggaaatgcaggccggaaagcaccaagagtacgagcagaagttactccaagagttgtataagctcaatcccaactttctgcagctcagcaccggatcagtcgacaaaaataagaacaaggtcacccccttgcagagccctatcgataagcccagcgattccctatctatcggtaacggcgataattcacaacaaatctccaattccgatacgccctctccaccgccaggcctctctaaaagtaatcctgtaatccctattagctcttccaaccacagcgctaggtctccttttgaaggtgctgttactgaaagccagtccctattttccgacaatttccgccatcccaaccccataccttctgggttgcccccatttccatcctcgcctcagaccagttctgattggccaaccgcccctgagccccagtccctgtttacctcagagacaatcccggtgagctcctcgaccgattggcaggctgctttcgggtttggtagtagcaagcagccggaggatgacttaggattcgatccctttgacgtcactcgtaaggctttggcagacttaatcgaaaaggagctgtcagtgcaggaccagccctcactgagtcctacttccctgcagaattcatcctctcacactaccacagctaaggggcctgggagtgggtttctacatcctgccgctgctacaaatgcaaatagtctgaatagcactttctcagttctgcctcaacggtttccccagttccagcaacaccgggctgtgtataattccttctccttccctggccaagctgcgcgttacccttggatggcctttcctagaaattccattatgcacttaaaccacacggcaaaccccaccagtaattccaacttcctagacctgaacctgccccctcaacataataccgggctgggcggaattccagtggcaggcattcccgctagcagcggcaacagcctggattcactacaggatgacaaccctcctcattggctgaagtctctccaggcattgacagagatggatggcccatccgctgctcccagccaaacccaccattcggcgcctttctcaactcagatacctctgcatagggcgagctggaatccctaccctccaccatccaatccttctagttttcactccccgcctcctggcttccagacagccttccgtcctccaagcaagaccccaaccgacctgctgcagagtagtaccctggatcgccactag

SEQ ID NO: 217396 - DNA, 1302 bp, synthetic construct
  misc_feature 1..1302: note = Description of Artificial Sequence: Synthetic coding sequence
  source 1..1302: mol_type = other DNA
atgtcaagatctccggacgccaaagaggacccagtggagtgccctctgtgcatggaaccattggagatagacgacatcaattttttcccgtgcacatgtgggtaccagatctgccggttctgctggcaccgcatccgaaccgacgaaaacggcctctgtcctgcttgccggaaaccttatcctgaagatcctgccgtttacaagcctttgtctcaagaggaactgcagcgcataaagaacgaaaaaaaacaaaagcaaaacgagagaaagcagaaaatctccgaaaacagaaaacacctagctagcgttcgggtggtgcagaagaacttagtatttgtggtcggcctgagccagaggctggcagacccagaagtcctgaagcggcctgaatactttggaaagtttggtaagattcataaagtcgtcattaataactcaaccagttacgccggatcgcagggtcccagtgcgtccgcgtatgtgacctacattcgttctgaggatgccctgcgcgcaattcaatgcgtaaacaacgtggttgtggacgggagaaccttaaaagccagcctcggcactaccaaatattgctcctacttcttaaaaaatatgcagtgcccaaaacccgattgtatgtatctgcatgaactgggtgacgaggccgcaagttttacaaaagaggaaatgcaggccggtaaacaccaggaatatgagcaaaagctgctccaggagctctacaaactgaaccccaatttcttacaactgagcacagggtccgtagataaaaataaaaataaggtgacacctctgcagaggtacgacacacccatcgacaagccctctgacagcctaagtattggaaacggagacaattctcagcagatttctaatagcgatacccctagcccacccccaggactttcaaaaagcaaccccgtgattccaataagctcgtctaaccactcggctaggagccccttcgagggagccgtgaccgaaagccagagtctctttagtgataatttcagacacccaaacccgataccatccggtctgcccccttttccgagttccccccagacctcttcggactggcccacagcaccagagccacagagcctctttactagcgagaccatccctgtcagcagctccaccgattggcaagccgcatttggtttcggttccagtaaacaaccggaggatgatctaggcttcgaccctttcgacgtcacccgcaaggcactggctgacctaaccgaacccattgagcgtaagcgcctcgcggtcctcaagaggcgctag

SEQ ID NO: 217397 - DNA, 1929 bp, synthetic construct
  misc_feature 1..1929: note = Description of Artificial Sequence: Synthetic coding sequence
  source 1..1929: mol_type = other DNA
atgtccagatctcctgatgctaaggaggatccagtggagtgccctctttgtatggagcccctggagattgacgatatcaatttctttccctgcacttgcggctaccagatctgtagattttgctggcaccgcattaggactgatgagaacggcctgtgccccgcatgcaggaaaccctaccctgaggacccggctgtatacaagccactgtcgcaagaagagctccagagaataaaaaatgagaagaaacagaagcagaatgagagaaagcagaaaatcagtgaaaaccgcaaacatctggcgtctgtcagggtggttcaaaagaatctagtgttcgtggtgggactgtcccagcgacttgccgacccggaggtcctgaaaaggccagaatacttcggaaaattcgggaaaatccacaaggttgtgattaacaatagtacctcatatgctgggagccagggccctagcgcgtcagcttatgttacatatattcgtagcgaagacgcactacgggctatccagtgcgtgaacaatgtggtggttgacggcaggactctgaaagctagccttggtaccaccaaatattgctcttattttctaaagaatatgcagtgtcctaaacccgactgtatgtacctacatgaactcggtgatgaagccgcatcatttacaaaggaggagatgcaggcgggtaagcatcaggaatatgagcagaagttgctccaggaactgtacaaactgaatcctaactttttgcaattgtcaacggggtctgtggacaagaataagaacaaggtcacacccttacaaagatacgacacaccaatcgataagcctagcgactctctcagtattgggaatggtgataattcccagcagatctccaacagtgacacaccttctcctccacctggcctaagcaaaagtaatcctgttattcccatcagctcttctaaccactccgctcgctccccctttgagggcgctgtaaccgagtctcagtcactcttcagtgataatttcagacatcccaaccccattccctcaggtttgcctcctttccccagcagtccacagacatcttctgactggccaacagccccagagccccaaagcctgttcacatccgagacaatacccgtgagcagtagcaccgattggcaagccgctttcggtttcgggagttccaaacagccggaggatgatctgggcttcgacccatttgatgtcaccaggaaggccctcgccgacctaatagagaaggaactcagtgtgcaggaccaaccatctttgagtcccaccagcttgcagaatagcagttcccacacaactaccgctaaaggacccggaagcggctttctgcacccagccgcagcgactaacgcaaattccctgaattcaacttttagcgtcttgcctcaaagatttccccagttccaacagcaccgggcagtctataacagtttttcctttcctggccaggcagcccgatacccctggatggcctttccaagaaactcaatcatgcatctgaaccatacagctaacccaacatctaactctaactttcttgatttgaatctgccaccccaacataatactggcttgggaggcattcctgtggccggaattccagcgagcagcggaaattccttagacagtttacaagatgacaatccccctcattggcttaagtccttgcaggcactgaccgaaatggatggcccatcagccgcacccagccagacccaccactcagccccatttagcacacagataccactacatagagcctcctggaatccttaccctccacccagtaatccatctagtttccattcacccccacctggttttcagacagcatttcggccacccagcaaaacacccacagacttgctccaatcaagtacactggaccgacactag

SEQ ID NO: 217398 - DNA, 1719 bp, synthetic construct
  misc_feature 1..1719: note = Description of Artificial Sequence: Synthetic coding sequence
  source 1..1719: mol_type = other DNA
atgagtagaagtcctgacgccaaggaagatccggtggaatgtccattgtgtatggagcctctggagattgacgatataaacttcttcccgtgcacatgtggctaccagatttgtaggttctgctggcaccggatccggacggatgagaatggcctctgcccagcttgtagaaaaccctacccagaagaccctgcagtgtacaagcctctgagccaggaagaactccaaagaatcaagaacgaaaagaaacagaagcaaaacgaacgcaaacaaaaaatcagcgagaaccgtaaacacctggcgagtgttcgcgtggtgcagaaaaacttggtgttcgtggtgggactaagccaacgcctggccgatccagaggtgttgaaacgccctgaatactttggtaagtttggcaagattcacaaagtggtcatcaacaactctacttcctatgcgggaagccagggacccagtgcgagcgcttatgtgacatacatccggtcagaggatgctttgcgagccatacagtgcgttaacaacgtagtcgtagacggccgaactttgaaggcttcactagggaccaccaagtactgtagctatttcctgaagaatatgcagtgccccaagcctgactgtatgtatctccatgagcttggggatgaggctgcttcctttaccaaggaagaaatgcaagctggcaagcaccaggagtacgagcagaaactgcttcaggaactgtataagctgaatcctaattttctgcagctttcaacgggttcagtggacaaaaacaagaacaaggtgactccccttcaaagccccattgacaaaccgagtgacagtctgagcattggcaacggcgataattcacagcagatcagcaactccgatacaccctctccccctcctggccttagtaagtccaatccggtgattcctatctcctcctctaatcatagtgcccgttcgccatttgaaggcgcagtgacggagtctcagtccctcttctcagataattttaggcacccaaaccccattcccagcggtcttcctccatttccatcatctccccagacaagctctgactggccaaccgctcccgagccccaaagcctgttcacctccgagactatccccgtctcaagctccacagattggcaggccgcatttggctttggatcctcgaagcaaccggaggacgacctgggatttgaccctttcgatgtgacccgaaaagccttggccgacctaatcgaaaaggaactgtctgtgcaagaccagccgtctttaagtccaacctccctacaaaactccagtagtcatactaccacagccaaaggtcctgggtctggattcttacaccccgcagccgcaacaaatgccaattctctgaattcgactttctcggtcctgcctcaacgtttcccccaattccagcagcatcgagccgtctacaattcttttagttttcccggacaggcagcacggtatccctggatggcttttccacggaactccatcatgcacttgaatcacaccgctaatcccacctctaactccaattttctcgacctgaatctgccccctcagcacaataccggcctcggcggaatccccgtcgctggtgaggaagaagtaaaggtcagcaccatgccactttctacctcttcacactctctccagcagggccagcagcctaccagtctccatacaacagtcgcctag

SEQ ID NO: 217399 - DNA, 2142 bp, synthetic construct
  misc_feature 1..2142: note = Description of Artificial Sequence: Synthetic coding sequence
  source 1..2142: mol_type = other DNA
atgagccgctctcccgatgccaaggaggatcccgtggaatgtcctctatgcatggagcccctcgaaatagacgatattaacttcttcccatgcacctgtggctatcaaatatgtcgcttctgttggcatcggatacgcactgacgagaacggactgtgtcctgcctgtcgcaagccgtatcctgaagaccctgctgtttacaaaccactttcccaggaggagctccaacgcatcaaaaatgagaagaagcaaaaacagaacgaaaggaagcagaaaatctcagagaatagaaagcatctcgctagcgtgcgggtggtccaaaagaacctggtgttcgttgttggcctgtcgcagcgcctcgctgatccggaagttctaaagagaccagaatatttcggaaaatttggtaagatccataaagttgttatcaacaactcgacgagctatgccggatctcagggccctagcgcgtcagcatacgtgacctatattcgtagtgaagatgcattgagggccatccagtgcgtcaacaacgtcgtggtggacgggaggacgctgaaggcaagcttagggaccacaaagtattgttcctacttccttaagaacatgcagtgccctaagcccgactgtatgtacctgcatgagctcggcgatgaggcagcttcattcacaaaagaggaaatgcaggctgggaagcaccaggagtacgagcaaaaactactccaggagctgtataagctcaaccccaacttcctgcagctgtcaacgggcagcgtggacaagaacaagaataaggtaaccccgcttcagaggtacgacacacccatagataaacctagcgatagtctgtcgattggcaatggagacaattcgcaacagatctccaacagcgatacaccttccccaccaccaggactcagcaagtccaacccagtcattccgatctcatcctccaaccattctgccaggtcccctttcgagggcgctgttacggagtctcagtcgctgttctcggataattttcgacatcccaaccctattccctccggcttgccgccttttcccagcagcccccagaccagctctgactggccaactgctcccgaaccccaaagtctcttcacctcagaaacaatccctgttagcagttccacagactggcaggctgcctttgggttcggcagtagtaagcagccagaagatgatttgggcttcgatccctttgatgtgactcggaaggccttggctgatctaattgaaaaggaactgtcagtgcaggatcaaccatcgctaagccccaccagcctgcagaacagtagctcccatactaccactgctaaggggcctggctcaggctttttgcacccagccgcagccactaatgctaattcattaaacagcacatttagcgtgttgccacagcgcttccctcagttccagcagcaccgggcagtatataatagcttctcttttccgggacaagcagccagatatccgtggatggcttttcccagaaacagtattatgcacttgaatcacacagcaaaccccacctctaattccaactttctggacctgaatctgccgccacagcacaacacaggactgggcggtattccagttgccgacaactcttcaagtgtggagagtttgaacatgaaagagtggcaggatggcctgagggctttgcttccaaatataaacatcaactttggcggtcttccaaacagttctagcccttctaatgcgaatcatagcgcccctactagcaacaccgcaacgacagatagcttaagctgggacagtcccggatcctggacagacccagccataattactggaattccggcttcaagcgggaatagcctggattctctgcaagatgacaacccaccccactggctgaagtccctgcaagcactgaccgagatggacggaccatccgccgcaccatcccagacacatcacagtgcaccattttctacgcagatccccctgcatcgcgctagctggaacccatatcctccgccttcgaacccatcttccttccactctccgcctcccggattccaaaccgcgtttcgcccaccaagtaaaacccctaccgatctgcttcaatccagcaccctggataggcactag

SEQ ID NO: 217400 - DNA, 1674 bp, synthetic construct
  misc_feature 1..1674: note = Description of Artificial Sequence: Synthetic coding sequence
  source 1..1674: mol_type = other DNA
atgcccaaggaaaagtacgaaccaccggacccgaggaggatgtacaccataatgtcttcagaggaagctgccaacggaaaaaagtcccattgggctgagctagaaatcagcggcaaggtaaggagcctgtccgcgtcactctggtccttgacccacctgaccgcattgcatttgtccgacaattccctgtctaggattccatctgacatcgcaaagctgcataacctggtgtatctcgacctgtcgagcaataaaattcgcagcctgcctgccgagctgggaaacatggtaagcctgcgcgagctgcatctgaataacaacctactgagagtcttaccatttgagctcggaaagctctttcagctgcagacattggggttgaaggggaatccacttactcaggacatactcaatctgtatcaagagcctgatggcaccaggagactgctgaattacctgcttgataacctaagcggcactgccaagaggattaccacagagcagccgcctcccaggagctggattatgctgcaggaaccggataggaccaggcccacagccttattcagcgtcatgtgctacaatgtgctgtgcgacaagtacgccacacggcagctgtacggttactgcccttcttgggctttaaactgggattaccgcaagaaggccatcatccaggagattctgagttgtaacgcggatatcgtgagcctgcaggaggtggagaccgaacagtactacagtttcttcctggtggaattgaaggagagaggatacaacgggtttttttctcccaagtcccgggctcgcacaatgagcgagcaggaaagaaagcatgtggacggatgtgccatcttctttaagaccgagaagtttaccctggtgcagaagcatacggtcgagtttaatcagttggctatggccaattcagaaggcagcgaggcgatgctcaatagagtcatgaccaaggacaatattggagtagctgtattgctggagcttcggaaggaatctattgaaatgccatcgggtaagcctcacctgggcactgagaaacagctgatcctcgttgcaaacgcccacatgcattgggatccagaatacagcgatgtaaaactggttcagacaatgatgtttctgagcgaggtaaaaaatatcattgataaggcttccaggaatctgaaaagttccgtgctcggcgaatttggtactatcccccttgtgttgtgtgccgacctgaatagtttgcctgatagtggggtcgtggagtacctgagtactggtggggtagagacaaatcataaggacttcaaggagctcagatataatgagtctctgacaaactttagctgtcacggcaaaaacgggacgacaaacggcaggataacccacggctttaagctccagtcagcctatgagtccggtttgatgccctacacaaattacacatttgactttaagggcattatcgactacatcttttattcaaaaccccagctaaacacactcggaatcctgggacctttggaccaccattggctggtggaaaataacatttcaggctgccctcatccgctgatccctagtgaccacttcagcctctttgctcagctggagctccttctaccctttcttcctcaggtaaacgggattcatctacccggaaggagatag

SEQ ID NO: 217401 - DNA, 1674 bp, synthetic construct
  misc_feature 1..1674: note = Description of Artificial Sequence: Synthetic coding sequence
  source 1..1674: mol_type = other DNA
atgccaaaggagaagtatgagcctccagaccctcggagaatgtataccattatgtccagcgaggaagccgcaaatggcaaaaaaagccactgggccgaactcgagataagcggcaaggtccggtccctgtcagcctcattgtggagcctcacacacctaaccgccctgcacctctcagataattcgctgtcgaggattccatccgacattgcgaagttgcacaacctggtttacctggacttgagcagcaacaagattagaagtctccctgcggaactcggaaacatggtttcactgagggagctgcacttgaataacaacctgttacgcgtgctgcctttcgagctgggaaagctctttcaactgcagacactcgggctcaagggaaaccccctgacgcaagatattctcaatttgtatcaggaaccagacggaacccgaagactgctcaactaccttctggacaacttgtcggggaccgctaagaggattaccactgaacagcccccacctcgctcttggataatgctgcaggagcctgacagaacaagaccaacagccctgttcagcgtgatgtgttataatgtcttatgcgacaaatacgcaactcggcagttgtatgggtactgcccatcctgggctctgaattgggactaccggaagaaggctataatacaggagattctgagttgcaatgccgacattgtgagccttcaggaggttgaaacagagcagtattactctttttttctggtggagctcaaagagcgtggatacaacgggtttttctcaccaaagagccgagccaggacaatgtcagaacaggagcgcaaacacgtggatggttgcgccatcttttttaaaacagaaaaatttacacttgttcagaagcacaccgtagagttcaaccaactggctatggctaatagcgaaggatcagaggcgatgctcaatagggtgatgactaaagataacatcggcgtggccgtgcttctggagctccgaaaggaatccatcgaaatgccatctggaaaaccacacttgggcactgaaaagcaactgatcctggtggccaatgcccacatgcactgggatccagaatactccgatgtcaagctggtgcaaaccatgatgttcctaagcgaagtgaagaatattatcgacaaggctagccgcaatctcaagtccagcgtcctgggagaattcggcacgattcccctggttttgtgtgccgatctgaatagtctccctgactccggcgttgtagaatatctgagtacagggggagtggagaccaatcacaaggatttcaaagaactgagatataacgaatctctgactaactttagctgtcatggtaagaacggaactactaatggaaggatcacacacggatttaagctgcagagcgcctacgaatccggccttatgccgtacactaattatacttttgactttaaagggatcattgattatatcttctactcgaagccacaattgaacacgttggggattctcgggccacttgaccatcattggctcgtggaaaacaacatctccggctgtccgcaccctcttatcccatctgaccatttctcactgtttgcacagttggagctgttgctgccattcctgccacaggtcaacggcattcatctgcccggaagacggtag

SEQ ID NO: 217402 - DNA, 858 bp, synthetic construct
  misc_feature 1..858: note = Description of Artificial Sequence: Synthetic coding sequence
  source 1..858: mol_type = other DNA
atgccagcagccacggtcgatcattcccagagaatctgcgaggtctgggcttgtaacctggatgaggaaatgaagaaaattcgacaggtgatcaggaagtataactatgtggctatggacaccgaatttcctggtgtcgtggccaggcctattggagagtttcgttccaacgccgattatcagtaccagctgctcagatgtaacgtggatttgttgaagatcatccaactaggtttaacattcatgaatgaacagggcgaataccccccaggaacctccacatggcagtttaacttcaaatttaatctcacggaggatatgtatgcacaagatagtatcgaactcctgaccacaagcgggatacagttcaaaaagcatgaggaggagggaattgaaacacagtacttcgccgaacttcttatgactagtggtgtggtgctgtgcgaaggtgtgaagtggctaagctttcactcggggtatgattttggctatttgattaagatactgaccaactctaacctacctgaggaagagctggactttttcgagattttgcggctattcttccccgtgatctacgacgtgaagtacctgatgaaatcctgcaaaaacctcaagggagggctccaggaggttgctgaacagttggagctcgagcggattggtccgcagcatcaggctgggagcgatagcctcctaaccgggatggcctttttcaagatgcgggagatgttcttcgaggatcatatcgatgacgctaaatattgtggccatttgtacggcctagggtctggctctagctacgtgcagaatgggacaggaaatgcatatgaagaagaagctaataagcagagttag

SEQ ID NO: 217403 - DNA, 126 bp, synthetic construct
  misc_feature 1..126: note = Description of Artificial Sequence: Synthetic coding sequence
  source 1..126: mol_type = other DNA
atgcctgctgcgacagtcgaccactctcaaaggatttgcgaggtgtgggcttgtaatctcgacgaggagatgaagaagatcagacaggtgattcggaagtataactatgttgcaatggatacatag

SEQ ID NO: 217404 - DNA, 735 bp, synthetic construct
  misc_feature 1..735: note = Description of Artificial Sequence: Synthetic coding sequence
  source 1..735: mol_type = other DNA
atgcctgccgcaaccgtggatcacagccaacgcatttgtgaggtctgggcttgtaacctcgatgaagagatgaagaagatccgacaggtaatacgtaaatataattacgtggcaatggatacggagttccctggagttgttgcacgaccaattggggaattcaggagcaatgctgactaccaatatcagcttctgcggtgtaatgtggatctgttgaaaattatccagctgggtttaacattcatgaacgagcaaggagaatatcccccaggaacttccacatggcagttcaatttcaagttcaatctcaccgaagacatgtatgcccaggactccattgaactgctgacgacatccggaatacagtttaaaaaacatgaagaagaaggtatagaaacccagtactttgccgagctgcttatgaccagcggggtagtcctgtgtgagggtgtaaagtggctcagttttcatagtggctacgacttcggatacttgattaaaatattgacaaattcgaacttgcccgaggaagagctagacttctttgaaatcctccgactgttcttccccgtcatttatgatgtcaaatacttgatgaagtcctgtaaaaatctgaaaggtggacttcaagaggtcgctgagcagctcgagttggagcggattggcccacagcaccaggccggatctgattccctgttgacaggtatggctttttttaaaatgcgggaggtgtag

SEQ ID NO: 217405 - DNA, 444 bp, synthetic construct
  misc_feature 1..444: note = Description of Artificial Sequence: Synthetic coding sequence
  source 1..444: mol_type = other DNA
atgcccgctgcaactgtggatcatagccaaaggatatgcgaagtgtgggcatgtaacttagatgaggagatgaagaagattaggcaggtcatacgcaagtacaactacgttgcaatggacacagagtttccgggagtggttgcacgcccaattggcgagttcaggtccaatgctgattaccagtaccagttgctccgctgtaatgtggatctcttgaagatcattcagctggggttgacctttatgaatgaacaaggggagtacccacccggtacatctacgtggcaatttaatttcaagtttaatctgaccgaagatatgtacgcccaggattccatcgagctgcttaccacaagcggtatccagtttaaaaaacacgaggaggagggaattgaaacccagtattttgcagagttactgatgacttccggagtggtactttag

SEQ ID NO: 217406 - DNA, 879 bp, synthetic construct
  misc_feature 1..879: note = Description of Artificial Sequence: Synthetic coding sequence
  source 1..879: mol_type = other DNA
atgccagctgctctcgtcgagaactcacaggtgatatgtgaagtgtgggcatccaatttggaggaggaaatgcgaaagatcagagaaatcgtcctttcctattcgtacatcgccatggacactgagtttccaggggtagtagttcggccaattggagagtttagatcatctatcgactaccagtatcagctcctccgctgcaacgttgatctcctgaaaataatccaactggggcttacatttaccaacgagaagggggaatacccttctggaataaatacctggcagttcaattttaagtttaatctaacagaagatatgtactctcaagacagcatcgatcttctcgccaactctggcctgcagtttcagaagcacgaagaggagggcatcgatactctgcatttcgcagaactgctgatgacctctggtgtggttctttgcgacaatgtgaaatggctgtcattccattctggctacgactttggctatatggttaaactgttaacagattccaggctccctgaggaggaacatgaattttttcacattctcaatctcttcttccccagcatctacgatgtaaaatatctcatgaaatcatgtaaaaacctgaaggggggtcttcaggaagtcgctgaccaactggacttacagaggatcggaaggcagcatcaggcaggatcagactccctactcactggaatggcctttttccgcatgaaagagctctttttcgaagattccattgacgacgccaaatattgtggccgactgtacggcctcggcacaggtgtggcacagaagcagaatgaggacgtcgattctgcccaggagaaaatgtctatcctcgcaatcatcaataacatgcagcagtag

SEQ ID NO: 217407 - DNA, 879 bp, synthetic construct
  misc_feature 1..879: note = Description of Artificial Sequence: Synthetic coding sequence
  source 1..879: mol_type = other DNA
atgcccgctgcacttgtcgagaactcccaggtgatttgcgaggtgtgggcgtcaaacctggaggaggagatgagaaagatcagagagatagtcctatcatactcttatattgccatggataccgagttcccgggtgtggtcgtgaggcctatcggcgaatttcgttcatccatcgattaccagtatcaacttctcaggtgcaacgtggatcttctgaagatcatccagcttggccttacctttactaacgagaagggagagtaccccagcggcatcaatacttggcagttcaacttcaaattcaatctcaccgaggacatgtactctcaggacagcattgatctgctcgcaaattctggcctccaatttcaaaagcacgaagaggaaggcatcgatacattgcatttcgctgaactgctaatgacatctggggttgtgttgtgcgataacgtgaagtggctgagctttcactccggctatgattttggatatatggtaaagttgctgactgactcacggcttcctgaggaagaacatgaattcttccatatactgaatctgtttttcccttcaatctacgatgtgaagtatcttatgaaatcttgtaagaacctgaaaggtgggcttcaggaagtggccgaccagttagacctgcagagaattgggagacagcatcaggccggaagcgattctctgcttacaggaatggctttcttcaggatgaaagaacttttcttcgaagactcaattgatgacgccaagtattgcggaagattatacggtctcggcactggggtggcgcagaaacagaatgaggacgttgactctgcacaggaaaagatgagtatcttggctatcattaacaacatgcagcagtag

SEQ ID NO: 217408 - DNA, 357 bp, synthetic construct
  misc_feature 1..357: note = Description of Artificial Sequence: Synthetic coding sequence
  source 1..357: mol_type = other DNA
atgcccgcagccttggtggaaaacagccaagtgatttgcgaggtttgggcaagcaacctggaagaggagatgagaaaaatccgggaaatagttttgtcctattcatacattgcgatggacaccgaattccccggagtggtggtcagacccattggcgaatttaggagctcaatcgactaccagtatcagctgctaagatgcaacgtagatctgctgaagatcatacaattgggactcaccttcacaaatgagaagggggagtacccttccggaataaatacatggcagtttaattttaagtttaacctcactgaggacatgtacagccaggacagtattgacctcttagccaattag

SEQ ID NO: 217409 - DNA, 879 bp, synthetic construct
  misc_feature 1..879: note = Description of Artificial Sequence: Synthetic coding sequence
  source 1..879: mol_type = other DNA
atgcccgcagcgctcgtagagaactcccaggtgatttgtgaggtgtgggcaagtaatctagaggaggaaatgcgcaagataagagagattgtactctcatactcatatattgccatggacacagagtttccaggcgtggtagtcagacctattggagaatttcggagcagcatcgattatcagtaccagctgctccgatgtaacgtggacttgttgaagattatacaactgggattaactttcacaaatgaaaaaggtgaatacccttctggcatcaatacctggcagtttaattttaagtttaacctgaccgaagacatgtactcccaagactctatcgacctgctagccaactccgggttacagtttcagaagcacgaagaggaggggattgacaccctgcacttcgccgaactccttatgacatccggcgtggttttgtgtgataacgtgaagtggctgtcttttcactctggatacgattttggttacatggtgaagctgcttacagactcccgccttcccgaggaagagcatgagttttttcatattctgaaccttttttttcccagtatctacgacgtcaagtacctgatgaagagctgtaagaacctgaaaggagggctgcaagaagtggcagaccagctagatctccagaggattggtcggcaacatcaggcgggatccgactcattactgacgggtatggctttctttcgcatgaaagagcttttcttcgaggacagcatcgacgacgccaagtattgcggtcgactctatggactaggcacaggagtcgcgcagaagcaaaatgaggacgttgactcagcccaggagaagatgagcattctggccatcataaataacatgcagcagtag

SEQ ID NO: 217410 - DNA, 168 bp, synthetic construct
  misc_feature 1..168: note = Description of Artificial Sequence: Synthetic coding sequence
  source 1..168: mol_type = other DNA
atgcccgcagccttagttgagaacagccaggtgatttgtgaggtgtgggcctcgaatcttgaagaagaaatgcggaagattcgggagatagtcctttcatatagttatatcgctatggatactgagttccctggggtagtggttagaccaatcggcgagtttagatag

SEQ ID NO: 217411 - DNA, 678 bp, synthetic construct
  misc_feature 1..678: note = Description of Artificial Sequence: Synthetic coding sequence
  source 1..678: mol_type = other DNA
atgccagccgctctggttgaaaactcacaggtcatttgtgaggtatgggccagcaacctcgaggaagaaatgcgcaagattagagaaatcgtgctcagctacagctatatcgccatggacacagagtttcccggagtcgtcgtgagacctattggcgagttccggagtagcatcgactatcagtaccaactgttacgatgtaatgttgatctgctgaagatcattcagctgggccttactttcacaaacgaaaaaggggagtatccaagtgggatcaatacctggcagtttaactttaaatttaacctgaccgggtacgacttcggatacatggtgaagttattgacagactcccgcctacccgaggaagaacacgaattttttcacattctgaacctcttctttccttctatttacgatgtcaaatatttgatgaagagttgtaagaatctgaaggggggactacaagaagtcgccgatcaactggacctgcagaggattggtcgccagcatcaggctgggtcagatagcctgttgacaggtatggcctttttcaggatgaaggagttgttttttgaggattccatagacgacgctaaatactgcggcagactttatgggttggggacgggcgtggctcagaaacagaatgaagatgtcgattccgcccaggaatag

SEQ ID NO: 217412 - DNA, 360 bp, synthetic construct
  misc_feature 1..360: note = Description of Artificial Sequence: Synthetic coding sequence
  source 1..360: mol_type = other DNA
atgccagctgctctggtcgagaattctcaggtgatttgtgaggtgtgggcctccaatctcgaggaggagatgcgaaaaattagagagattgtgcttagctactcttacatagccatggatacagaattccctggcgtagtcgttagacccattggcgaatttcggtcaagtattgactaccagtaccagcttttacgctgcaatgtagatcttttaaagatcatacagctgggtttaaccttcacaaatgagaagggggaatacccctccgggattaatacatggcagtttaatttcaaatttaacttaaccgaggatatgtattctcaggacagcatcgatctcctcgccaattcttag

SEQ ID NO: 217413 - DNA, 717 bp, synthetic construct
  misc_feature 1..717: note = Description of Artificial Sequence: Synthetic coding sequence
  source 1..717: mol_type = other DNA
atgccagcagcattagtggagaactctcaggtgatttgcgaggtgtgggcaagcaacctggaagaagaaatgaggaaaatcagggaaatcgtactctcatattcctatatagccatggacacagagttccctggcgtggtcgtaagacctatcggcgaatttaggtccagcatcgactaccagtaccagctactcagatgtaatgtggacctgttgaaaattatccaactggggctcactttcacgaacgaaaagggtgaataccctagcggcattaacacctggcagttcaactttaaatttaacctgactgggtacgactttggttatatggtgaagctgttgacagattccagattacccgaagaggaacacgagtttttccatatcctgaatttgttctttccatcgatttacgatgtgaagtatcttatgaagagctgcaagaatctgaagggcggactccaagaagtggcagaccaattagacctgcaaagaatagggcgtcagcaccaggccggttccgactccctgctgacgggaatggctttctttcggatgaaagaattgttctttgaggactccatcgacgacgctaagtactgtgggaggctgtacggcctcggcactggggtagcccaaaaacagaacgaagacgttgactctgcccaagagaagatgtcaattctcgccatcataaataacatgcagcagtag

SEQ ID NO: 217414 - DNA, 168 bp, synthetic construct
  misc_feature 1..168: note = Description of Artificial Sequence: Synthetic coding sequence
  source 1..168: mol_type = other DNA
atgccagcagcactggtagagaattcgcaggtcatctgtgaggtgtgggcatctaaccttgaagaagagatgaggaagattcgggaaatcgtcctttcttactcttatatagctatggacacagagttcccaggtgtcgtcgtacggccaattggcgagtttcgttag

SEQ ID NO: 217415 - DNA, 258 bp, synthetic construct
  misc_feature 1..258: note = Description of Artificial Sequence: Synthetic coding sequence
  source 1..258: mol_type = other DNA
atgtattcacaggatagcatcgacctcctggctaacagcgggttacaatttcagaaacacgaagaggaaggtatcgacacattacatttcgcggagttgctcatgacctccggagtcgttctctgtgacaacgtgaaatggcttagctttcactccggctacgatttcggttacatggttaagctccttacagattcaagactacccgaagaggaacacgaattctttcacattctgaacctgttcttcccatcttag

SEQ ID NO: 217416 - DNA, 402 bp, synthetic construct
  misc_feature 1..402: note = Description of Artificial Sequence: Synthetic coding sequence
  source 1..402: mol_type = other DNA
atgccggctgccttggtagagaattctcaggtgatctgcgaagtgtgggcctctaatttggaggaagagatgcggaaaattcgggaaattgtgctgtcatactcatacatagccatggacacagagtttccaggagtcgtcgtccgccctatcggagaattcagaagctccatcgactaccagtatcagctgctgagatgcaacgttgacctattaaagatcatacagctgggcctgacctttaccaatgaaaaaggggagtatccctctggaattaacacttggcagtttaacttcaaattcaaccttactgaggatatgtattctcaggattccatcgatttactggcgaattccgggcttcagtttcagaagcatgaagaggaaggcatcgatacttag

SEQ ID NO: 217417 - DNA, 561 bp, synthetic construct
  misc_feature 1..561: note = Description of Artificial Sequence: Synthetic coding sequence
  source 1..561: mol_type = other DNA
atgtacagtcaggactccatcgacctgttggcaaacagcgggctacaatttcagaagcatgaagaggagggcatcgacacattgcacttcgccgaactgctgatgaccagcggcgtggttttgtgcgacaacgtaaagtggctaagctttcacagtggatatgactttggctatatggttaaactgctcaccgactcccgcctgccagaggaagagcatgaattttttcacattttgaatctcttcttcccgtccatttacgacgttaagtatctgatgaagagctgtaagaatctgaagggcggactacaggaggttgcagaccagctagacctccagcggattggcagacagcaccaggcgggtagcgacagcctccttacaggaatggcattcttccgcatgaaagaattgtttttcgaagactctatagatgatgccaagtactgcggacggttatatgggctgggcacgggcgtggcccagaagcagaatgaggacgttgatagcgcgcaagagaagatgtctatcctggctatcatcaacaacatgcaacagtag

SEQ ID NO: 217418 - DNA, 561 bp, synthetic construct
  misc_feature 1..561: note = Description of Artificial Sequence: Synthetic coding sequence
  source 1..561: mol_type = other DNA
atgtattcacaggactccatcgacctgttagcaaacagcgggttacagtttcaaaaacacgaggaggagggcatagataccctacactttgcagagttgctcatgacttccggtgttgtactctgcgataatgttaaatggttgtcattccatagtgggtatgacttcggctacatggttaaactgctgacagattcgcgcctgccagaagaggagcacgagttctttcacatcctgaacctttttttccctagcatttacgatgttaagtacctcatgaaaagctgcaagaatctcaaagggggattgcaggaagtagccgatcagctggacctgcagagaatcggaagacagcatcaagccggttccgactccctgctgactggtatggccttcttcagaatgaaggaattatttttcgaggattccatagatgacgcaaagtactgcggtcggttatacgggctaggcacgggggtcgcccaaaagcagaatgaagatgtcgattccgcacaggaaaagatgagcatattggcgatcatcaacaacatgcagcagtag

SEQ ID NO: 217419 - DNA, 561 bp, synthetic construct
  misc_feature 1..561: note = Description of Artificial Sequence: Synthetic coding sequence
  source 1..561: mol_type = other DNA
atgtatagccaggactctatcgatctactggcaaactccggacttcaatttcagaagcacgaggaggagggcatcgacactctgcacttcgcagaactcctcatgacatctggcgttgtgctgtgcgacaacgttaaatggctgagcttccactcgggatacgattttgggtatatggtcaaactgctgaccgacagccgacttcctgaagaagagcacgaatttttccatatactgaatctgttttttccaagcatttacgacgtgaagtacctgatgaaatcatgtaaaaatcttaaaggcggactgcaggaggtggccgaccagcttgacctgcaacgcatcggcagacagcaccaagcagggtcagatagtcttttgaccgggatggcgttctttagaatgaaagagctgtttttcgaggatagtattgacgatgcgaagtactgcggacgactctacgggctcggcacaggtgtggcccagaagcaaaatgaagatgtcgactctgcccaagaaaagatgtctattctggccataattaacaacatgcaacagtag

SEQ ID NO: 217420 - DNA, 366 bp, synthetic construct
  misc_feature 1..366: note = Description of Artificial Sequence: Synthetic coding sequence
  source 1..366: mol_type = other DNA
atgcccgcagctttggtggagaattctcaagttatatgcgaagtgtgggcgtcaaacctcgaggaggagatgcggaagattagagagattgtgttatcctatagctacatagctatggatacagagtttcctggagtggtggtgagacccatcggcgagtttcgatcatcaattgattaccagtaccagctgcttaggtgcaatgtcgacctgctgaaaatcattcagctgggcttgacatttacgaacgaaaagggcgaataccctagcggcatcaacacctggcagttcaattttaaattcaacttgaccggttatgacttcgggtatatggtaaaattgctgacagatagtcgattgccatag

SEQ ID NO: 217421 - DNA, 561 bp, synthetic construct
  misc_feature 1..561: note = Description of Artificial Sequence: Synthetic coding sequence
  source 1..561: mol_type = other DNA
atgtactctcaagactctatcgacctgctggccaacagcggcctgcagttccagaaacacgaggaggagggtatcgacactcttcatttcgccgagctgctgatgacaagtggcgtggtgctctgcgataatgtcaaatggttgagctttcattcgggatatgacttcgggtacatggtgaaactgctcaccgactcaaggctgccggaagaagaacacgagttcttccatattcttaatctgttctttccttcaatctatgatgtcaagtacctgatgaaatcatgtaagaacctgaaggggggtctgcaagaggtggccgatcagctggacctgcagaggattgggaggcagcatcaagccggttctgattccctgctcacagggatggctttttttaggatgaaggagctcttctttgaggattcgattgatgacgccaaatactgtggccgactctatggactcgggacgggagtcgctcagaaacagaatgaagacgtggactctgctcaggagaagatgagcatcctggcaataatcaataacatgcagcagtag

SEQ ID NO: 217422 - DNA, 387 bp, synthetic construct
  misc_feature 1..387: note = Description of Artificial Sequence: Synthetic coding sequence
  source 1..387: mol_type = other DNA
atggtgaaactgctcaccgatagtagattacccgaggaggaacatgagttcttccatattctgaacctgtttttcccctccatatatgacgtgaagtacttgatgaaaagttgtaaaaacttaaaaggtggactgcaggaggttgcagatcagctcgaccttcagaggataggcagacagcaccaagctggtagcgactctctcttaacagggatggccttcttccgaatgaaggaactgttttttgaggacagtatcgatgacgctaagtactgcgggaggttatacggacttgggactggagtcgctcagaaacaaaacgaggacgttgacagtgcgcaggaaaaaatgtcgatactagccattatcaataacatgcaacagtag

SEQ ID NO: 217423 - DNA, 810 bp, synthetic construct
  misc_feature 1..810: note = Description of Artificial Sequence: Synthetic coding sequence
  source 1..810: mol_type = other DNA
atgcgcaagatacgcgagatcgtgctaagctacagttacattgcaatggacacagagtttcctggcgtggttgtgcggccaattggcgaatttaggagtagtattgattatcaatatcagttattgcgatgcaatgtggatctcctgaagatcatccaactgggtttgacctttactaatgaaaagggtgaatatccgtctgggatcaatacatggcagttcaatttcaagttcaatttaaccgaggatatgtatagtcaagacagtatagacttgttagcaaattctgggctgcaatttcaaaaacacgaggaggaggggattgatacactgcacttcgccgagctgctgatgacttcaggcgtggtgctgtgtgacaatgtcaagtggctgtcatttcattccggttacgactttggctatatggttaaattgctgactgattctagactaccggaggaggagcacgaattttttcacattttgaatttgttttttcccagcatatacgacgtcaaataccttatgaaaagctgcaaaaacttgaaaggcggactacaggaggttgctgaccagctagatttgcaaaggatcggacgccaacatcaggccggaagcgactccctgttaaccggcatggctttttttagaatgaaggagctgttcttcgaggactctatcgatgacgccaagtactgtggcagactctacggtctggggactggggtagcacagaagcagaacgaggatgtggatagtgcgcaggagaagatgagcatcttggctatcatcaataatatgcaacagtag
